United States Patent Application Publication US 2018/0126003 A1 - sequence listing, part 64

SEQ ID NO: 115375 - DNA, 1392 bp, Artificial Sequence
  derived and/or modified sequence
atgcagttcgtgagcacccggccccagccccagcagctgggcatccaagggctggggctggactcgggctcttggtcctgggcccaagctttgccacccgaagaagtatgccaccaggagcctgcgttacggggtgagatggcggagggcatgccgcctatgcaggcccaggaatgggatatggacgcacggagacccatgcccttccagtttcctccttttccagatagagccccggtgtttcctgatagaatgatgcgcgagccacagctgcccacagctgaaatcagcctgtggacggtggtggccgcaatccaggccgtggaaaggaaggtcgacgcccaagctagccagcttctcaatctggaaggcaggactggcaccgctgaaaagaagttggcagattgtgaaaaaactgcagtggagttcgggaaccacatggagagtaagtgggcagtattgggcaccctcttacaagaatatgggctcctccaacggcgactggaaaatttagagaacttactgcgaaaccgtaacttctgggtgttgcgcctcccccctggatccaagggggaggcccctaaggtcccagtcacctttgttgatatcgctgtgtacttctctgaagatgaatggaaaaacctggacgaatggcagaaggagctgtacaataatctggtcaaggaaaactacaagacattaatgtccttggacgctgagggttctgtccctaaaccggacgccccggtgcaggccgaacccagagaggaaccatgtgtctgggagcagagacaccctgaagaaagggaaattccaatggaccccgaggccggcgccgaaccactcgtccccgctcaggatgcgagttctcaagttaagagagaagatacactgtgtgtcagaggacaaagaggcctggaggaacgggctataccaaccgagagcattacggacagtccaattagcgctcaggatctccttagccggatcaaacaggaagaacaccagtgcgtatgggaccagcaggatctggccgaccgcgatatcccaacagatccaaactccgagtcactaatttcggcccatgacattctctcgtggataaagcaggaagaacagccatatccttggggaccgagagattccatggacggagaactcgggttggacagcggtccatctgactctttgttgatggtcaagaaccctcctcccgccccaccacagcctcagcctcagccccaacccccccagccacagcttcaatctcaaccccagcctcagtcactgcctcccatcgcagttgccgaaaaccctggaggtcctccttcccggggacttctcgacgatgggttccagccccatcagggcgctgcgttacgggttaggtag

SEQ ID NO: 115376 - DNA, 975 bp, Artificial Sequence
  derived and/or modified sequence
atgcgagagccccagcttcctaccgccgagataagtctgtggaccgtggtggccgcaatacaagctgtggagaggaaagtggacgctcaagcgagtcagcttcttaatcttgaagggaggaccggcaccgcagagaagaaactcgccgattgtgaaaagaccgctgttgaatttggcaaccatatggaatctaagtgggccgtgctgggcaccctgctccaggagtacgggctgttgcagcgcaggctggagaacctggagaacctgctgaggaacaggaatttttgggttctgagactgccaccgggttctaagggagaagctccgaaggtgcccgttaccttcgtggatatcgccgtgtatttctctgaagatgaatggaaaaacctggacgaatggcagaaggaactctataacaaccttgttaaggagaactataagactctgatgtcacttgatgccgagggaagtgtgcccaagcccgacgcccctgtccaggcagagccatcatactcttgtcccgagtgcggcaagtcatttggtgtgcgtaagtcccttattattcatcacaggtcccacacaaaagagaggccttacgagtgtgccgagtgtgaaaaatccttcaattgccactcaggactcatccgtcatcagatgacccacagaggagagcgaccatataagtgttcagagtgcgaaaaaacgtactcaaggaaagaacatttgcaaaatcaccaacgcctgcataccggtgaacgccctttccaatgtgccctgtgcggaaaatcatttatccggaagcagaatctcctgaaacaccagcgcatccacaccggagagcgcccttatacctgcggcgagtgcggcaagtcattcagatacaaggagtcactgaaggatcacctgcgcgtgcacagcggcggtcccggtcctggtgcgcctaggcaattgccaccaccccctgaaagggactag

SEQ ID NO: 115377 - DNA, 1392 bp, Artificial Sequence
  derived and/or modified sequence
atgcagttcgtttctaccagaccccagccccagcagttagggatacagggcctgggactggactccggtagctggagttgggctcaggccctccctccggaggaagtctgtcaccaggagccggcactccggggtgaaatggccgaaggcatgcctcctatgcaggcccaggagtgggacatggacgcgagacgtccaatgccattccaatttcccccattcccggaccgcgcacctgtgttccccgaccggatgatgcgcgagccgcagttacccacggcggagatctctctgtggactgttgtggctgcaatacaggcagtggagcgaaaagtcgacgcccaagcctcccaactgctcaatttggaaggccgaacaggaactgccgagaaaaagttggctgactgcgagaagacagccgttgagttcggcaatcatatggaaagcaaatgggccgtccttggcacactcttacaggagtacggactcctgcagcgcaggttggagaatctggagaacttattgcggaataggaacttttgggtccttcggctgccccctggaagcaagggcgaggcaccaaaggtccctgtgacattcgtggatattgctgtgtacttttcagaagacgagtggaagaatctcgacgagtggcaaaaagagctctataataatttagtcaaagagaattataagactcttatgagcctggacgccgagggcagcgtgccaaaacctgatgctccagtgcaagccgagcccagggaggagccatgcgtatgggagcagcgacatcccgaagaacgtgagatccccatggatcccgaagctggggctgagccccttgtgccagcccaggatgccagcagtcaggttaaacgggaggatacactttgtgttagggggcagcgaggcctcgaggagagagccattcccaccgaatcaatcaccgattctcccattagcgcacaggacttgctgtctagaatcaaacaggaggaacatcaatgcgtctgggaccagcaagacttggcagatcgggatattcccacagatccaaatagcgaaagtttgatctctgcccacgacatattgtcctggattaagcaggaggaacagccctacccctgggggcctagggacagtatggacggcgagctggggctggattccggccctagcgatagtctcctgatggtaaaaaatcctccacccgcaccgccacagccccagccccagccacagccccctcagccccagctccagtcccaaccccaaccacaatcgctgcccccaatcgctgtggctgagaaccctgggggaccgcctagcaggggactgctggatgacggcttccaaccacaccagggagctgcactccgggtccggtag

SEQ ID NO: 115378 - DNA, 1358 bp, Artificial Sequence
  derived and/or modified sequence
gccgccgaaggggactgtttgctcctacgggctgtagatggagctgtccggccccggagagggggaaggcgcctggaaaacgttcttcttctccctggccgacccgagcggggaacagcactcccaggatgcagtttgtgtcaacacggccgcagcctcagcagctgggcatccagggcctggggctggacagcgggagctggagctgggcccaggctctgcccccggaggaggtctgccaccaggagccggcgctgcgcggggaaatggccgagggaatgccgcccatgcaggctcaagaatgggacatggacgcccggcggccaatgccttttcagttcccaccctttccagatagggcacctgtcttccccgaccgcatgatgcgagagccccagttgcccacagcagagatctcactctggactgtggtggctgccattcaggctgtggagaggaaggtggatgcccaggccagccagctgctgaacctggaggggcgcacggggacagccgagaagaagctggccgactgtgaaaagacggccgtggaatttgggaaccacatggagagcaagtgggccgtgctggggaccctgctgcaggagtacgggctgctgcagaggcggctggagaacttggagaacttgctgcgcaacaggaacttctgggtcctgcggctgcccccgggcagcaagggggaggcccccaaggttccagtgacttttgtcgacattgctgtgtacttctccgaagacgagtggaagaacttggacgaatggcagaaggagctttataacaaccttgttaaggagaactacaaaaccctcatgtccctggacgcggagggctcagtccccaagccagatgctccagtccaggctgagcccagctactcgtgccccgagtgcggcaagagcttcggcgtgcgcaagagcctcatcatccaccaccgcagccacaccaaggagcggccctacgagtgcgctgagtgcgagaagagcttcaactgccactcgggcctcatccgccaccagatgacgcaccgcggcgagcggccctacaagtgctcggagtgcgagaagacctacagccgtaaggagcacctgcagaaccaccagcggctgcacacgggcgagcggcctttccaatgtgcactgtgcggcaagagcttcatccgcaagcagaacctgctcaagcaccagcgcatccacacgggcgagcgcccctacacgtgcggcgagtgcggcaagagcttccgctacaaggagtcgctcaaggaccacctgcgcgtgcacagcggcggcccgggccccggcgccccacggcagctcccgccgcctcctgagcgagactag

SEQ ID NO: 115379 - DNA, 1815 bp, Artificial Sequence
  derived and/or modified sequence
ttctccctggccgacccgagcggggaacagcactcccaggatgcagtttgtgtcaacacggccgcagcctcagcagctgggcatccagggcctggggctggacagcgggagctggagctgggcccaggctctgcccccggaggaggtctgccaccaggagccggcgctgcgcggggaaatggccgagggaatgccgcccatgcaggctcaagaatgggacatggacgcccggcggccaatgccttttcagttcccaccctttccagatagggcacctgtcttccccgaccgcatgatgcgagagccccagttgcccacagcagagatctcactctggactgtggtggctgccattcaggctgtggagaggaaggtggatgcccaggccagccagctgctgaacctggaggggcgcacggggacagccgagaagaagctggccgactgtgaaaagacggccgtggaatttgggaaccacatggagagcaagtgggccgtgctggggaccctgctgcaggagtacgggctgctgcagaggcggctggagaacttggagaacttgctgcgcaacaggaacttctgggtcctgcggctgcccccgggcagcaagggggaggcccccaaggttccagtgacttttgtcgacattgctgtgtacttctccgaagacgagtggaagaacttggacgaatggcagaaggagctttataacaaccttgttaaggagaactacaaaaccctcatgtccctggacgcggagggctcagtccccaagccagatgctccagtccaggctgagcccagggaagaaccttgtgtgtgggagcagcgccaccccgaagagagagaaatcccaatggatcccgaagcaggagcagagcccctggtgcctgcgcaggatgcgtcctcccaggtgaagcgtgaggacaccctgtgtgtccggggtcagcggggcctggaggaaagagccatccctacggaatccattaccgactccccaatttctgcccaggacctcttgtcccggattaaacaggaggagcatcagtgcgtgtgggatcagcaggatttggcagacagagatattcccacggatcccaattcagagtctctcatctcagcacatgacattttgtcatggatcaagcaggaggagcagccatacccatggggaccacgcgactcaatggacggagagcttggattagactctggccctagtgacagcctgctgatggtgaagaacccacccccggccccgccacagccccagccccagccccagccaccgcagccgcagctgcagtcgcagccccagccccagagcctgccccccatcgcggtggccgagaacccgggcggccccccgagccgagggctgctggacgacggtttccagccacaccaaggagcggccctacgagtgcgctgagtgcgagaagagcttcaactgccactcgggcctcatccgccaccagatgacgcaccgcggcgagcggccctacaagtgctcggagtgcgagaagacctacagccgtaaggagcacctgcagaaccaccagcggctgcacacgggcgagcggcctttccaatgtgcactgtgcggcaagagcttcatccgcaagcagaacctgctcaagcaccagcgcatccacacgggcgagcgcccctacacgtgcggcgagtgcggcaagagcttccgctacaaggagtcgctcaaggaccacctgcgcgtgcacagcggcggcccgggccccggcgccccacggcagctcccgccgcctcctgagcgagactagggctgggctgggggag

SEQ ID NO: 115380 - protein, 315 aa, Artificial Sequence
  derived and/or modified sequence
MTHQDLSITAKLINGGVAGLVGVTCVFPIDLAKTRLQNQHGKAMYKGMIDCLMKTARAEGFFGMYRGAAVNLTLVTPEKAIKLAANDFFRRLLMEDGMQRNLKMEMLAGCGAGMCQVVVTCPMEMLKIQLQDAGRLAVHHQGSASAPSTSRSYTTGSASTHRRPSATLIAWELLRTQGLAGLYRGLGATLLRDIPFSIIYFPLFANLNNLGFNELAGKASFAHSFVSGCVAGSIAAVAVTPLDVLKTRIQTLKKGLGEDMYSGITDCARKLWIQEGPSAFMKGAGCRALVIAPLFGIAQGVYFIGIGERILKCFD

SEQ ID NO: 115381 - DNA, 948 bp, Artificial Sequence
  derived and/or modified sequence
atgacacaccaagatttgtccattacagcaaagctgattaatgggggcgtggcaggcttggttggagtcacctgtgtgttccccattgacctggccaagacaagattgcagaaccagcacgggaaagccatgtataaaggaatgattgattgtcttatgaaaacggctagagcagaaggtttctttggaatgtacaggggcgccgccgtgaacctcactctggttacaccagagaaagccattaaactggctgcaaacgatttttttaggagattgttaatggaagatggcatgcagagaaacctgaagatggagatgctggcgggctgtggggcaggaatgtgccaggttgttgtaacctgcccgatggagatgctgaagatccagctgcaggatgccggtcgcctggcagtgcatcatcaaggttctgctagtgcacccagcacttcccgatcttacacaaccggcagcgcttccacgcatcgccgcccgtctgctacactgatagcctgggagctcctgcggacccaggggctggctggattatatcgtgggctcggcgccactctcctgcgcgacataccttttagcatcatctatttccctctatttgccaacctcaacaacctgggtttcaacgagctcgctgggaaagcctcttttgcgcacagctttgtgagcggctgtgttgccgggtcgatcgcagctgtggccgtgacccctctggatgtactaaagacccggatccagaccttgaaaaaaggcctgggcgaggatatgtacagtggaattaccgattgcgctaggaaactgtggattcaagaagggccctccgccttcatgaaaggagctggatgtcgagccctggtcattgcaccactgtttggaatcgcgcagggcgtgtactttatcggcattggagagagaattctaaaatgtttcgattag

SEQ ID NO: 115382 - DNA, 948 bp, Artificial Sequence
  derived and/or modified sequence
atgacccaccaggacctgagcatcactgcaaagctgattaatgggggagtggctggcctggtgggagttacgtgtgtctttcctatagatttagccaagacaagacttcaaaatcagcatggaaaggctatgtacaagggcatgatagactgcttgatgaagacggcccgcgctgagggtttcttcggcatgtatcggggtgccgccgtcaatttgacattggtgacccctgagaaagctatcaagcttgccgcaaacgattttttcagacgtttgctgatggaggatggcatgcagcggaatttgaagatggaaatgcttgctgggtgcggagcgggaatgtgccaggtggtggtcacatgtccgatggaaatgctgaagattcagttacaggacgcaggccgcctggccgtccatcaccagggctccgcttcggccccttctaccagccgcagctataccactgggagcgcaagcacccatagacgcccctcagccactctgatcgcctgggagttgctgagaacacagggtttggccgggctttataggggcttgggagccacactgctgcgggacatcccctttagtataatatactttccactctttgccaacctgaacaacctcgggttcaacgagctggctggcaaggcgtcttttgctcacagtttcgtctctggttgcgtcgccggcagtatagctgctgtggctgtgactccattagacgtgttaaagactcggatccagaccctcaagaaggggctgggcgaagacatgtacagtggcatcactgattgcgcacgcaaattgtggatccaggaaggcccctcagctttcatgaagggcgccggctgtcgcgccctggttatcgcgcctctgtttggcatagctcagggggtatatttcattgggatcggcgagaggattttaaaatgcttcgattag

SEQ ID NO: 115383 - DNA, 948 bp, Artificial Sequence
  derived and/or modified sequence
atgacccaccaggacctgagcatcacagccaagctgatcaatggaggagtggccggcctggtgggcgtgacctgtgtgttccccatcgacctggccaagacccggctgcagaaccagcacggcaaggccatgtacaagggcatgattgactgcctgatgaagacagcccgggcagagggcttcttcggcatgtacagaggagctgctgtgaacctgaccctggtgaccccagagaaggccatcaagctggccgccaatgacttcttccggcggctgctgatggaggatggcatgcagaggaacctgaagatggagatgctggccggctgtggggccggcatgtgccaggtggtggtgacctgccccatggagatgctgaagatccagctgcaggatgctggccgcctggccgtgcaccaccagggcagcgccagcgcccccagcaccagccgcagctacaccactggaagtgccagcacccaccggcggcccagcgccaccctgattgcctgggagctgctgcggacccagggcctggccggcctgtaccggggcctgggcgccaccctgctgcgggacatccccttcagcatcatctacttccccctgtttgccaacctgaacaacctgggcttcaatgagctggccggcaaggccagctttgcccacagctttgtgtctggctgtgtggccggcagcattgctgctgtggccgtgacccccctggatgtgctgaagacccgcatccagaccctgaagaagggcctgggggaggacatgtacagcggcatcacagactgtgccaggaagctgtggatccaggagggccccagcgccttcatgaagggggccggctgccgggccctggtgattgcccccctgtttggaattgcccagggcgtgtacttcatcggcatcggggagcgcatcctgaagtgctttgattag

SEQ ID NO: 115384 - DNA, 948 bp, Artificial Sequence
  derived and/or modified sequence
atgacccaccaggacctgagcatcaccgccaagctgatcaacggcggagtggctggcctcgtcggtgtcacttgtgtctttcctattgatctagccaaaacgcgcctgcagaatcaacatggcaaagcaatgtacaagggcatgatcgactgtctaatgaagactgcccgagctgagggattttttggcatgtaccgcggcgctgccgtgaacctaacacttgtcacccccgaaaaggcgattaaactcgccgccaacgatttctttagacggctgctgatggaagacggcatgcagcgcaatctgaagatggaaatgctcgctgggtgcggcgctggcatgtgccaagttgtggtgacttgcccgatggaaatgctgaagattcaacttcaggacgctgggcgcctggccgttcatcatcaagggtctgcctcagcaccgtcgacctcacggtcgtacaccacgggatcagcctccacacaccgcagaccctccgccaccttaattgcatgggagctccttaggacccagggcctggctggactgtatcgtggactgggggccaccttgctcagagatatccctttcagcatcatctactttcccctcttcgctaatctgaacaacctgggctttaacgagctggcgggcaaggcgagcttcgcccactcttttgtgtccggctgtgttgccgggtcaatagccgccgtggcagttacgccccttgacgtgctgaagactcgcattcaaaccctcaaaaaggggctgggcgaggacatgtacagcgggattactgactgcgccaggaagctgtggatccaggaggggccctctgcattcatgaagggggctggctgccgggccttggtgatagctcccttgttcggaattgcgcaaggagtctatttcattgggataggggaaagaattctgaagtgctttgactag

SEQ ID NO: 115385 - DNA, 948 bp, Artificial Sequence
  derived and/or modified sequence
atgacccaccaggacctgagcatcaccgccaagctgatcaacggcggcgtggcaggcctcgtgggcgtaacctgcgtctttccaatagacctggccaagaccaggctccagaaccagcacggtaaagctatgtacaaaggcatgatcgactgcctcatgaagacggcccgggcagaaggcttctttggtatgtacaggggagctgccgttaatctgaccctggttactcccgagaaggccattaaattagctgcaaatgatttctttcgtaggctcttgatggaggacggcatgcaaaggaacctgaaaatggaaatgctagccgggtgtggtgcgggcatgtgccaggtggtagtgacttgtcctatggagatgctcaaaatccagttacaagacgctggacgcctggctgtccaccatcaaggctccgcctcagccccgagcacatcaaggtcgtacacaaccggtagcgccagcacacaccgaaggccttctgccacccttattgcatgggagctgctgcggacacaaggactcgcaggcctgtatcgcggccttggcgcaaccctactgcgggacattcctttcagcattatatacttcccactcttcgctaatctcaataacctgggcttcaatgagctagccggcaaggccagctttgcgcattcctttgtgagcgggtgtgtagcgggcagcatcgccgcagttgcagtcactcccctggatgttctcaaaacacgcatccaaacgctcaagaagggcctgggagaagacatgtactctggaatcacagattgcgcaagaaagttatggatccaggagggaccaagcgccttcatgaaaggtgcaggatgcagggctttagtcattgcccccctatttggcatcgcccagggtgtgtactttatcggcatcggtgaaagaattcttaaatgcttcgactag

SEQ ID NO: 115386 - DNA, 948 bp, Artificial Sequence
  derived and/or modified sequence
atgacccaccaggacctgagtatcacagctaaactgatcaatggaggggtcgctgggctcgtcggcgtaacttgtgtgtttcccattgacctggccaaaactcgcttacagaaccagcacggtaaggccatgtacaaggggatgattgattgcctgatgaaaactgctagggccgagggatttttcggcatgtatcgcggagccgcagtcaatcttacactggtgactcccgagaaagccatcaaactcgccgctaacgatttctttcggcgtcttctcatggaggatggcatgcaacggaatctgaaaatggagatgctcgcgggttgcggtgcgggaatgtgccaggtggtagtgacttgtcctatggaaatgcttaagattcagctacaagatgcaggcagacttgccgtgcatcatcaggggtcagctagtgccccaagtacttcacggtcttatactaccggatcagcttctacgcaccgcagaccgtccgctactttgattgcatgggaactccttcgcacgcaggggctcgcaggtctgtataggggactgggcgctaccctgctccgggacattccattctccataatctattttccactgttcgccaacctgaacaacctgggatttaatgaattggccggaaaagcttccttcgcccatagctttgtgtcaggttgtgtggccggaagcatcgccgcagtcgcagttacgcctctggacgtgctgaagactcgaatccagacactgaaaaagggtcttggcgaggatatgtactctggcattaccgactgcgcccgaaagctgtggatacaggaggggccatcggcgttcatgaagggggctgggtgccgagccctggtgatagctccattgtttggaatcgctcagggcgtttacttcatcggcatcggggaacgaatattgaaatgtttcgattag

SEQ ID NO: 115387 - DNA, 948 bp, Artificial Sequence
  derived and/or modified sequence
atgactcaccaagacctttctatcaccgccaaactgatcaacggcggtgtggctgggcttgtgggagttacttgcgtctttcctattgaccttgccaaaacacgtctgcaaaaccaacacggtaaagcaatgtacaagggcatgatcgattgtctcatgaaaacagctagggctgaaggattttttggaatgtacaggggtgccgcagtgaatctgaccctcgtcacccccgagaaagcaattaagcttgcagcaaatgacttctttaggcgtttgcttatggaagacgggatgcagcggaatctgaaaatggagatgctggcaggatgtggtgctggaatgtgtcaggtggtggttacatgcccgatggagatgctcaagatccagctgcaggacgctgggagactggcggtgcaccatcagggttccgcctcggccccttccacaagcaggagttacactaccggctcagccagcacacaccggagaccatccgccacccttatagcgtgggagctgctccggacccaaggcctggcaggcttgtaccggggtctgggtgccaccctgctccgtgatattcctttttccatcatctatttccccctgttcgccaacctgaataatctgggctttaatgagctcgccggaaaggcgtctttcgcacacagttttgtatccggttgtgtggccggaagcatcgccgctgtcgcggtcacgccccttgacgtgctcaagactagaattcaaaccctgaagaaagggctgggcgaggacatgtatagcggtattactgattgcgcacggaagctctggatccaggaagggccaagtgcatttatgaagggggcaggctgtcgagcattagttatcgcaccactgttcggaattgcccagggggtttatttcattggcatcggcgaacgcatattgaagtgcttcgattag

SEQ ID NO: 115388 - DNA, 948 bp, Artificial Sequence
  derived and/or modified sequence
atgacccaccaggacctgagcatcaccgccaagctgatcaacggcggcgtggccggcctggtgggcgtgacctgcgtgttccccatcgacctggccaagaccagactgcagaaccagcacggcaaggccatgtacaagggcatgatcgactgcctgatgaagaccgccagagccgagggcttcttcggcatgtacagaggcgccgccgtgaacctgaccctggtgacccccgagaaggccatcaagctggccgccaacgacttcttcagaagactgctgatggaggacggcatgcagagaaacctgaagatggagatgctggccggctgcggcgccggcatgtgccaggtggtggtgacctgccccatggagatgctgaagatccagctgcaggacgccggcagactggccgtgcaccaccagggcagcgccagcgcccccagcaccagcagaagctacaccaccggcagcgccagcacccacagaagacccagcgccaccctgatcgcctgggagctgctgagaacccagggcctggccggcctgtacagaggcctgggcgccaccctgctgagagacatccccttcagcatcatctacttccccctgttcgccaacctgaacaacctgggcttcaacgagctggccggcaaggccagcttcgcccacagcttcgtgagcggctgcgtggccggcagcatcgccgccgtggccgtgacccccctggacgtgctgaagaccagaatccagaccctgaagaagggcctgggcgaggacatgtacagcggcatcaccgactgcgccagaaagctgtggatccaggagggccccagcgccttcatgaagggcgccggctgcagagccctggtgatcgcccccctgttcggcatcgcccagggcgtgtacttcatcggcatcggcgagagaatcctgaagtgcttcgactag

SEQ ID NO: 115389 - protein, 491 aa, Artificial Sequence
  derived and/or modified sequence
VDLLRAGEVPKPFPTHYKDLWDNKHVKMPCSEQNLYPVEDENGERTAGSRWELIQTALLNKFTRPQNLKDAILKYNVAYSKKWDFTALIDFWDKVLEEAEAQHLYQSILPDMVKIALCLPNICTQPIPLLKQKMNHSITMSQEQIASLLANAFFCTFPRRNAKMKSEYSSYPDINFNRLFEGRSSRKPEKLKTLFCYFRRVTEKKPTGLVTFTRQSLEDFPEWERCEKPLTRLHVTYEGTIEENGQGMLQVDFANRFVGGGVTSAGLVQEEIRFLINPELIISRLFTEVLDHNECLIITGTEQYSEYTGYAETYRWSRSHEDGSERDDWQRRCTEIVAIDALHFRRYLDQFVPEKMRRELNKAYCGFLRPGVSSENLSAVATGNWGCGAFGGDARLKALIQILAAAAAERDVVYFTFGDSELMRDIYSMHIFLTERKLTVGDVYKLLLRYYNEECRNCSTPGPDIKLYPFIYHAVESCAETADHSGQRTGT

SEQ ID NO: 115390 - DNA, 1476 bp, Artificial Sequence
  derived and/or modified sequence
gtagatctcctgcgagctggcgaggttccaaagccattccccactcattacaaggacctgtgggacaataagcatgtcaagatgccctgtagtgagcagaacctttaccctgtcgaagatgagaatggggagaggacagcgggctcccgctgggaactaatccagacagcgctcctcaataaatttacacgaccccagaacctgaaggacgctattttaaaatacaacgttgcttactccaagaaatgggactttacagcgctgatcgacttctgggataaggtcctcgaggaggcagaagcccagcatttgtatcaatctatactcccagatatggtgaaaatcgctctgtgtctgcctaacatttgcacccagcccattcctcttctgaagcagaaaatgaaccactccataaccatgagtcaagaacagattgcgagtctcttggccaatgccttcttctgcacctttccgagacggaacgccaaaatgaagtcagagtactcatcctatcccgacattaacttcaacagattgttcgagggacgctctagccgtaagcccgaaaaacttaagaccttgttctgttactttaggagagtcacggagaagaagcccaccgggttggtcacgtttacccgtcaatccctcgaggatttccctgaatgggagcgttgcgagaaacctttgacacgcctgcacgtgacttacgagggcacaattgaggaaaacgggcaggggatgttgcaggtcgacttcgcgaataggtttgtgggagggggagtgacctcagcgggcctggtgcaggaagagattcgcttcctaattaatcccgagcttatcattagccggctgttcacagaggtgttggatcacaatgagtgtctgattatcaccggtaccgagcagtactctgagtatactggctacgcagagacgtatagatggtccagatcccacgaagatggatcagagcgagacgattggcaacgcaggtgcacagagattgtggcaattgacgccctgcacttcagacgatatctcgaccagttcgtgcccgagaagatgcggcgagagctgaataaggcgtactgcggctttctaagacccggcgtctcttctgaaaatctttcagctgtcgctaccgggaattggggatgtggcgcctttggcggcgatgcacgtctgaaggcccttatccagattctggccgcggccgcagctgagagggatgtggtgtacttcacttttggggacagcgaattgatgcgagatatctattccatgcacatcttcctcactgagagaaaactgacggtgggggatgtatataaattactgctgcgctattataatgaagagtgcaggaattgttcaacaccaggtcccgatattaaactctacccttttatctatcacgcagtggaaagttgtgcagagaccgccgaccattccggccagagaaccggaacctag

SEQ ID NO: 115391 - DNA, 1476 bp, Artificial Sequence
  derived and/or modified sequence
gtggacctgctgcgggccggggaggtgcccaagcccttccccacccactacaaggacctgtgggacaacaagcacgtgaagatgccctgcagcgagcagaacctgtaccctgtggaggatgaaaatggagagaggacagctggcagccgctgggagctgatccagacagccctgctgaacaagttcacccggccccagaacctgaaggatgccatcctgaagtacaacgtggcctacagcaagaagtgggacttcaccgccctgattgacttctgggacaaggtgctggaggaggccgaggcccagcacctgtaccagagcatcctgcctgacatggtgaagatcgccctgtgcctgcccaacatctgcacccagcccatccccctgctgaagcagaagatgaaccacagcatcaccatgagccaggagcagatcgccagcctgctggccaatgccttcttctgcaccttccccaggagaaatgccaagatgaagtctgagtacagcagctacccagacatcaacttcaacagactctttgagggccgcagcagcaggaagccagagaagctgaagaccctcttctgctacttcagaagagtgacagagaagaagcccaccggcctggtgaccttcacccggcagagcctggaggacttccctgagtgggagcgctgtgagaagcccctgacccggctgcacgtgacctatgagggcaccattgaagaaaatggccagggcatgctgcaggtggactttgccaacagatttgtgggcggcggcgtgaccagcgctggcctggtgcaggaggagatccgcttcctgatcaaccctgagctgatcatcagccgcctcttcacagaggtgctggaccacaatgaatgtctcatcatcactggaacagagcagtacagcgagtacacaggctatgcagagacctaccgctggagccgcagccatgaagatggcagcgagagagatgactggcagaggcgctgcacagagatcgtggccattgatgccctgcacttccgccgctacctggaccagtttgtgcctgagaagatgagaagagagctgaacaaggcctactgcggcttcctgcggcctggggtgtcctctgagaacctgtctgctgtggccaccggcaactggggctgtggggcctttggaggagatgcccggctgaaggccctgatccagatcctggccgctgctgctgctgagagagatgtggtgtacttcacctttggagacagcgagctgatgagggacatctacagcatgcacatcttcctgacagagaggaagctgactgtgggagatgtgtacaagctgctgctgcgctactacaatgaggagtgcaggaactgcagcaccccaggccctgacatcaagctgtaccccttcatctaccacgctgtggagagctgtgccgagacagctgaccacagcggccagaggacaggcacctag

SEQ ID NO: 115392 - DNA, 1476 bp, Artificial Sequence
  derived and/or modified sequence
gtggacctgctgcgggccggcgaggtgcccaagcccttccccacccattataaagatctctgggataacaagcatgtgaagatgccgtgcagtgagcagaacctgtacccagttgaggatgagaatggcgaaagaacagccggcagtcgctgggagttaattcagaccgcgctgttgaacaagttcacacggcctcaaaatcttaaggatgcaatcttaaaatacaatgtcgcctattcgaaaaaatgggatttcacagccctgatcgatttctgggacaaggtgctggaagaggcagaggcccaacacctgtaccagtcgattttgcctgatatggttaaaatagcactgtgtctaccaaatatttgtactcaacctattcctctcctcaaacagaagatgaatcactcaattacgatgagccaagagcagatagctagcctgctggcaaatgcgttcttctgtacttttccacgaaggaacgctaagatgaaaagcgagtactcatcttatcccgacatcaatttcaatcggctgtttgaaggccgctcatcacgtaagcctgagaagttgaagactctcttttgttattttaggagagtcaccgagaagaaacccaccgggctcgtaacgtttactcgccaaagcttggaggactttcccgaatgggagcggtgcgagaagcctcttacgcggctgcacgttacctacgaaggcacgattgaggagaacggacagggcatgttgcaggtggactttgctaatcggttcgtaggaggcggcgttaccagtgctggactggtccaggaagagattcggttcttgattaaccctgagctgattattagtaggctattcaccgaggtgcttgaccataatgagtgcctgattattaccgggaccgagcaatacagcgaatacaccgggtatgcagaaacatacagatggagccggagccacgaggacggatccgagagagatgattggcagcggagatgtacagaaatagttgccatcgacgccctccatttcagaagatatttggatcagttcgtgcccgaaaagatgaggagggagctgaacaaggcctactgcgggttcctaagacctggagtcagctccgaaaatctctcagccgtggcgacgggcaattgggggtgcggcgcctttggaggggacgcccgactgaaggccttgatacagatcttagccgctgcggcagccgagcgagacgttgtctacttcacgtttggtgattctgagctgatgagagatatctatagtatgcatatctttctgacagagcgcaagctaactgttggggatgtgtacaagctcctgttgaggtactacaacgaggagtgcagaaattgttccactcctggtcctgatataaagttgtaccctttcatctaccacgccgttgagtcctgtgccgagaccgcagatcatagcggtcaacgaactggaacttag

SEQ ID NO: 115393 - DNA, 2429 bp, Artificial Sequence
  derived and/or modified sequence
gtagatcttttgcgagcaggagaagttcctaaaccttttccaacacattataaagatttgtgggataacaagcatgttaaaatgccttgttcagaacaaaatttgtacccagtggaagatgagaatggtgagcgaactgcggggagccggtgggagctcattcagactgcacttctcaacaaatttacacgaccccaaaacttgaaggatgctattctgaaatacaatgtggcatattctaagaaatgggactttacagctttgatcgatttctgggataaggtacttgaagaagcagaagctcaacatttatatcagtccatcttgcctgatatggtgaaaattgcactctgtctgccaaatatttgcacccagccaataccactcctgaaacagaagatgaatcattccatcacaatgtcgcaggaacagattgccagtcttttagctaatgctttcttctgcacatttccacgacgaaatgctaagatgaaatcggagtattctagttacccagacattaacttcaatcgattgtttgagggacgttcatcaaggaaaccggagaaacttaaaacgctcttctgctactttagaagagtcacagagaaaaaacctactgggttggtgacatttacaagacagagtcttgaagattttccagaatgggaaagatgtgaaaaacccttgacacgattgcatgtcacttacgaaggtaccatagaagaaaatggccaaggcatgctacaggtggattttgcaaatcgttttgttggaggtggtgtaaccagtgcaggacttgtgcaagaagaaatccgctttttaatcaatcctgagttgattatttcacggctcttcactgaggtgctggatcacaatgaatgtctaattatcacaggtactgagcagtacagtgaatacacaggctatgctgagacatatcgttggtcccggagccacgaagatgggagtgaaagggacgactggcagcggcgctgcactgagatcgttgccatcgatgctcttcacttcagacgctacctcgatcagtttgtgcctgagaaaatgagacgcgagctgaacaaggcttactgtggatttctccgtcctggagtttcttcagagaatctttctgcagtggccacaggaaactggggctgtggtgcctttgggggtgatgccaggttaaaagccttaatacagatattggcagctgctgcagctgagcgagatgtggtttatttcacctttggggactcagaattgatgagagacatttacagcatgcacattttccttactgaaaggaaactcactgttggagatgtgtataagctgttgctacgatactacaatgaagaatgcagaaactgttccacccctggaccagacatcaagctttatccattcatataccatgctgtcgagtcctgtgcagagaccgctgaccattcagggcaaaggacagggacctgaggagccgagcgaatagcatctcctcccacctcccaccagagacgtcctgtttgagctgtcaggtgtaatatatgaattgacttaagttaatataaatgtgtacataatccacatttgtagtcaaggacgcaatctcttccacacatgtgcagttgtcagttggtacatctaaactccctccatcctgactcacgtggacttagatatgttttgtttctattttcttctatttcagtttttcattctttgatgtttatttcttttgtccatcagatctcttgtgaaatcccatggaaggttgtgctcagcctgtcgggtctctttcttcctgcccatatattataccagttgcttctgcagcccgcagatgccagcgatgccaggaaacaagttgaaatccaggaatctctttaactgattttgctaaaaatctccctgtgagccttccactcaactcttaatatgcttgcattgtttaagtttttaaattctgaaaattaataattagggtttttttcatatgtgttgcataatgcaaacctcctaggttaaaatagtttctttatttaagatagaataatttccagaaattgtacttttgaggtatcatttttatctgtaatggtttgtctgtcttttttcctctgatcagtatttttttataccagttttggagactggctgagatgaaaggaaatgtggaataaaaggaggttttcctgatgtggtgtaaagaaaacagattcaagagaattgaagattttttttgtttcttggtacttttttctttttaaattaggactaatgtttcttttgtggtgcttgaggcatattcatataaccaaagtttgagaactgggaacttcatgctgatttgtacatattgaagtttctctggtattcaaaggttatatagtgaatgaattttcattaataaatcactttgtcagaaa

SEQ ID NO: 115394 - DNA, 1476 bp, Artificial Sequence
  derived and/or modified sequence
gtagatctgttaagagctggagaagtgcccaaaccatttcctactcattacaaggatctgtgggacaataaacacgtcaagatgccctgtagtgaacagaacctctaccctgtcgaagacgaaaacggggagcgtacagccggttctcggtgggaactgatccagacagcactcttaaataaattcacccggccacaaaaccttaaggacgcaattttgaagtacaacgtggcctactctaagaaatgggattttacagctcttatcgacttctgggacaaagtgctggaggaagccgaggcacaacatctgtatcagtctattctccctgacatggtcaagatcgcgctatgtctcccaaatatctgcactcaacctatcccccttctgaagcagaagatgaatcactccattacaatgagccaagagcagattgcaagtctactagccaacgcttttttctgcacattccccaggcgcaacgcgaaaatgaagtctgaatattcgagctatccggacattaatttcaaccgacttttcgaagggcgatcaagccgcaaacccgaaaaactgaaaactctcttctgctacttcagacgagtcaccgaaaaaaagcctacagggttggtcacttttactcgacagagtctggaggatttccccgagtgggaaagatgtgaaaaaccactcaccaggctgcacgtcacctatgagggcactattgaagagaacgggcaaggcatgttgcaggtcgactttgcgaaccgcttcgttggcggaggtgtaactagcgccggtcttgttcaagaggaaatacgcttcctcatcaaccccgaattgatcatctctagactcttcactgaggttcttgaccacaatgagtgtcttataatcaccggtacggagcaatactcagagtatacgggttacgccgagacttaccggtggtcacgatcccacgaggatgggagtgagagagatgactggcagcggaggtgcactgaaatcgtggcgattgatgctttgcacttcagacggtatttggaccagttcgtccctgaaaagatgaggagagaactaaacaaagcttattgtggtttcttgagaccaggcgtgtccagcgagaacctgagcgctgtggcaacaggaaattggggatgcggagctttcggcggagacgctcggcttaaagccctaatacagatcctggcagctgctgccgctgagagggatgtggtttatttcacctttggcgattccgagttgatgcgggacatctattcaatgcacatcttcctcacagagcgtaagctcacagtgggcgatgtttataaactgctcctgcggtactacaacgaggagtgccgtaactgttccactcctggtcccgacatcaaactctatccctttatttatcacgccgtggagagctgtgctgagacagcagatcattcaggtcaacggacggggacctag

SEQ ID NO: 115395 - DNA, 1476 bp, Artificial Sequence
  derived and/or modified sequence
gtggacctgctgagagccggcgaggtgcccaagcccttccccacccactacaaggacctgtgggacaacaagcacgtgaagatgccctgcagcgagcagaacctgtaccccgtggaggacgagaacggcgagagaaccgccggcagcagatgggagctgatccagaccgccctgctgaacaagttcaccagaccccagaacctgaaggacgccatcctgaagtacaacgtggcctacagcaagaagtgggacttcaccgccctgatcgacttctgggacaaggtgctggaggaggccgaggcccagcacctgtaccagagcatcctgcccgacatggtgaagatcgccctgtgcctgcccaacatctgcacccagcccatccccctgctgaagcagaagatgaaccacagcatcaccatgagccaggagcagatcgccagcctgctggccaacgccttcttctgcaccttccccagaagaaacgccaagatgaagagcgagtacagcagctaccccgacatcaacttcaacagactgttcgagggcagaagcagcagaaagcccgagaagctgaagaccctgttctgctacttcagaagagtgaccgagaagaagcccaccggcctggtgaccttcaccagacagagcctggaggacttccccgagtgggagagatgcgagaagcccctgaccagactgcacgtgacctacgagggcaccatcgaggagaacggccagggcatgctgcaggtggacttcgccaacagattcgtgggcggcggcgtgaccagcgccggcctggtgcaggaggagatcagattcctgatcaaccccgagctgatcatcagcagactgttcaccgaggtgctggaccacaacgagtgcctgatcatcaccggcaccgagcagtacagcgagtacaccggctacgccgagacctacagatggagcagaagccacgaggacggcagcgagagagacgactggcagagaagatgcaccgagatcgtggccatcgacgccctgcacttcagaagatacctggaccagttcgtgcccgagaagatgagaagagagctgaacaaggcctactgcggcttcctgagacccggcgtgagcagcgagaacctgagcgccgtggccaccggcaactggggctgcggcgccttcggcggcgacgccagactgaaggccctgatccagatcctggccgccgccgccgccgagagagacgtggtgtacttcaccttcggcgacagcgagctgatgagagacatctacagcatgcacatcttcctgaccgagagaaagctgaccgtgggcgacgtgtacaagctgctgctgagatactacaacgaggagtgcagaaactgcagcacccccggccccgacatcaagctgtaccccttcatctaccacgccgtggagagctgcgccgagaccgccgaccacagcggccagagaaccggcacctag

SEQ ID NO: 115396 - protein, 394 aa, Artificial Sequence
  derived and/or modified sequence
MELSAVGERVFAAESIIKRRIRKGRIEYLVKWKGWAIKYSTWEPEENILDSRLIAAFEQKERERELYGPKKRGPKPKTFLLKPSASASSPKLHSSAAVHRLKKDIRRCHRMSRRPLPRPDPQGGSPGLRPPISPFSETVRIINRKVKPREPKRNRIILNLKVIDKGAGGGGAGQGAGALARPKVPSRNRVIGKSKKFSESVLRTQIRHMKFGAFALYKPPPAPLVAPSPGKAEASAPGPGLLLAAPAAPYDARSSGSSGCPSPTPQSSDPDDTPPKLLPETVSPSAPSWREPEVLDLSLPPESAATSKRAPPEVTAAAGPAPPTAPEPAGASSEPEAGDWRPEMSPCSNVVVTDVTSNLLTVTIKEFCNPEDFEKVAAGVAGAAGGGGSIGASK

SEQ ID NO: 115397 - DNA, 1185 bp, Artificial Sequence
  derived and/or modified sequence
atggagctgagcgccgtgggcgagagagtgttcgccgccgagagcatcatcaagagaagaatcagaaagggcagaatcgagtacctggtgaagtggaagggctgggccatcaagtacagcacctgggagcccgaggagaacatcctggacagcagactgatcgccgccttcgagcagaaggagagagagagagagctgtacggccccaagaagagaggccccaagcccaagaccttcctgctgaagcccagcgccagcgccagcagccccaagctgcacagcagcgccgccgtgcacagactgaagaaggacatcagaagatgccacagaatgagcagaagacccctgcccagacccgacccccagggcggcagccccggcctgagaccccccatcagccccttcagcgagaccgtgagaatcatcaacagaaaggtgaagcccagagagcccaagagaaacagaatcatcctgaacctgaaggtgatcgacaagggcgccggcggcggcggcgccggccagggcgccggcgccctggccagacccaaggtgcccagcagaaacagagtgatcggcaagagcaagaagttcagcgagagcgtgctgagaacccagatcagacacatgaagttcggcgccttcgccctgtacaagcccccccccgcccccctggtggcccccagccccggcaaggccgaggccagcgcccccggccccggcctgctgctggccgcccccgccgccccctacgacgccagaagcagcggcagcagcggctgccccagccccaccccccagagcagcgaccccgacgacaccccccccaagctgctgcccgagaccgtgagccccagcgcccccagctggagagagcccgaggtgctggacctgagcctgccccccgagagcgccgccaccagcaagagagccccccccgaggtgaccgccgccgccggccccgccccccccaccgcccccgagcccgccggcgccagcagcgagcccgaggccggcgactggagacccgagatgagcccctgcagcaacgtggtggtgaccgacgtgaccagcaacctgctgaccgtgaccatcaaggagttctgcaaccccgaggacttcgagaaggtggccgccggcgtggccggcgccgccggcggcggcggcagcatcggcgccagcaagtag

SEQ ID NO: 115398 - DNA, 1185 bp, Artificial Sequence
  derived and/or modified sequence
atggaactgagcgcagtgggagagagggttttcgccgccgaatctattataaaaaggcgtattagaaaaggaaggatagagtacctggttaagtggaagggatgggcgattaagtactccacctgggagcctgaggagaatatcttagatagtaggcttatcgctgcatttgagcagaaggaacgtgagagagaattgtacgggccaaagaaaagagggccaaaacctaagacatttctgctcaaaccctccgcgagtgccagtagtcctaagctgcacagcagtgccgcggtgcataggctcaagaaagacattcggaggtgtcatcgcatgtcaaggcgtccactgccaaggcccgaccctcaggggggtagcccagggttgcgaccacccatctctccattttcagagaccgtccgcattattaataggaaggtgaagcctagagagccaaaaaggaaccgcatcatacttaacctgaaagtgatcgacaagggtgctggtggcggcggcgccggacaaggtgccggagctctcgcaaggcccaaggtgccgtctagaaacagagtaattggcaagtccaagaagtttagcgagtcagtcctccgaacccaaatccgtcacatgaagtttggcgctttcgcgctctataagcctccccctgcaccgttagtggccccctccccagggaaggcagaggccagcgcacccgggcccggcctgctactggctgcccccgccgccccttacgacgctcggtcttccggttccagtgggtgcccgtcaccaactccacagtcgtcagaccccgatgacactcctccaaagcttctacccgaaactgtatcacctagcgcgccttcatggagggagcctgaagtgctcgatctttctctccctcccgagtcggccgcaacttctaaaagggcaccccccgaagttactgccgcggccggtcctgctcccccaaccgctccagagcccgcaggagccagtagcgaacctgaagctggggattggcgaccagaaatgagcccatgtagcaacgtagtcgttactgatgtcacatctaacttacttaccgtgacgatcaaagagttctgtaaccccgaggatttcgagaaggtggctgccggtgttgctggcgcagcagggggcggaggtagcattggtgcttctaaatag

SEQ ID NO: 115399 - DNA, 1185 bp, Artificial Sequence
  derived and/or modified sequence
atggagctgtctgctgtgggggagcgggtgtttgctgctgagagcatcatcaagaggcgcatcaggaagggccgcatcgagtacctggtgaagtggaagggctgggccatcaagtacagcacctgggagcctgaggagaacatcctggacagccggctgattgctgcctttgagcagaaggagcgggagcgggagctgtatggccccaagaagaggggccccaagcccaagaccttcctgctgaagcccagcgccagcgccagcagccccaagctgcacagcagcgctgctgtgcaccggctgaagaaggacatccgccgctgccacaggatgagcagaagacccctgcccaggccagacccccagggcggcagccctggcctgcggccccccatcagccccttcagcgagaccgtgcgcatcatcaacaggaaggtgaagccccgggagcccaagaggaaccgcatcatcctgaacctgaaggtgattgacaagggagctgggggcggcggggccggccagggcgctggggccctggcccggcccaaggtgcccagcaggaacagagtgattggcaagagcaagaagttcagcgagagcgtgctgcggacccagatccgccacatgaagtttggagcctttgccctgtacaagcccccaccagcccccctggtggcccccagccctgggaaggccgaggccagcgcccctggccctggcctgctgctggccgccccagctgccccctatgatgcccggagcagcggcagcagcggctgccccagccccaccccccagagcagtgaccctgatgacaccccacccaagctgctgcctgagaccgtgagccccagcgcccccagctggagggagcctgaggtgctggacctgagcctgcccccagagagcgctgccaccagcaagagggcccctcctgaggtgacagctgctgctggccctgccccacccacagcccctgagcctgctggggccagcagcgagcctgaggccggggactggaggcctgagatgagcccctgcagcaatgtggtggtgacagatgtgaccagcaacctgctgactgtgaccatcaaggagttctgcaacccagaagattttgagaaggtggccgccggcgtggccggggccgccggcggcggcggcagcatcggggccagcaagtag

SEQ ID NO: 115400 - DNA, 1185 bp, Artificial Sequence
  derived and/or modified sequence
atggagctgagcgccgtgggcgagcgggtgttcgccgccgagagcattatcaaacgccgcatcaggaagggcagaatcgagtacctggtgaaatggaaggggtgggccattaaatattcgacctgggaaccggaggaaaatatcctggattctaggttaatagccgcttttgaacagaaggaaagagagcgggagctgtatgggccgaagaagcgcgggcctaaacctaagacctttttgctgaaaccatctgcttccgcctcctcccccaagctccattcaagcgctgctgtgcatcgactcaagaaagatatccggagatgtcatcgcatgtctcgccgacctctgcccaggcctgaccctcaggggggctctccaggtctgagacccccgattagcccctttagcgagaccgttagaattatcaatcggaaggtgaagccgagagagcctaagagaaatcgaattattttgaatctgaaggtaattgataaaggcgctggcggcgggggagccggacagggcgctggggctctcgctaggcccaaggtgcccagcaggaatagggtaatagggaaatcgaagaagttctcggaatcggtactcagaacacagattcgtcatatgaaattcggcgcattcgctttgtataaaccaccaccggctcctttggtggcccccagccctggtaaggctgaagcgtctgccccaggacccggcctgctcctggctgcccctgcggccccttacgacgctagatccagcggttcatcaggctgcccttcccccacgccccagagtagcgatcccgacgacacgcctcccaagctgctacctgagaccgtgtccccctcagctccttcgtggcgagagcctgaggtgctagatcttagcctacctcctgagtccgccgccacaagcaagcgagccccccctgaggttacagctgccgcaggtcctgctcctccaactgcacccgagccagcaggagcgtcttcggaacctgaagccggggactggagacctgagatgtccccatgttccaacgtggtggtcacagacgtgacttctaatctgttgaccgtgaccattaaagagttttgcaatccagaggattttgaaaaagtcgccgcgggagttgctggggccgcaggcggcgggggcagcatcggagcttcaaaatag

SEQ ID NO: 115401 - DNA, 1185 bp, Artificial Sequence
  derived and/or modified sequence
atggaactctcagccgtgggggaacgggtctttgccgcagagagcattattaaacgaagaatacggaaaggtcggatcgaatacctggtgaagtggaagggatgggctattaaatattcaacttgggaacccgaagaaaacatcttggattcccggctgatcgccgctttcgaacagaaggaacgcgaaagggagctctacgggccaaagaagcggggtccaaaacccaagacattcttgctcaagcctagcgcttcagcctcctcgcccaagttacatagctcagctgcagtgcatagactaaagaaggacatccgtaggtgccataggatgtcccgacgccctcttcctagacctgatccacagggaggttcacctgggttacgtccaccaatttctccattttcagaaaccgtgcgcattattaataggaaagtcaaaccgagagagccaaagaggaaccggattattctgaacttaaaggtaattgataaaggcgcaggaggaggtggagcaggacagggcgctggagctctggcacgtcctaaagtccccagccggaatcgggtgatcggaaaaagtaagaaattttctgagagtgtgctgcgcacccagataagacacatgaagtttggggcattcgccctatacaagcctcccccagctcctctcgtggccccaagccctgggaaagcggaagcaagcgcccctgggccaggtcttctcttggctgcccctgcagccccatacgatgctcggtcaagcggatctagcggatgtccgtcccccacccctcagtcatccgacccggacgatactccaccaaaactgcttcctgaaactgtgagcccatcagcgccatcttggcgcgagcccgaggtgctcgacctctcactaccaccagagtcagctgccacatctaagcgagcccctcctgaggtgacagctgccgctggccctgcaccgccaaccgcccctgagcccgcaggtgccagcagcgaacccgaggccggtgattggaggcctgaaatgagcccctgctctaacgtcgtggtgacagacgtgacatctaacctacttacagtaaccatcaaagagttctgtaatcccgaagactttgaaaaggtggcagccggagtagccggagccgcaggtgggggaggaagcatcggagcgtcaaagtag

SEQ ID NO: 115402 - DNA, 3191 bp, Artificial Sequence
  derived and/or modified sequence
atgggctgtgggtgccgctgagcaagatggagctgtctgcagtgggcgagcgggtcttcgcggccgaatccatcatcaaacggcggatccgaaagggacgcatcgagtacctggtgaaatggaaggggtgggcgatcaagtacagcacttgggagcccgaggagaacatcctggactcgcggctcattgcagccttcgaacaaaaggagagggagcgtgagctgtatgggcccaagaagaggggacccaaacccaaaactttcctcctgaagccgagcgccagtgcctcctcgcccaagctgcactccagcgcagccgtgcaccggctcaagaaggacatccgccgctgccaccgtatgtcccgccgtcccctgccccgcccggacccgcaggggggcagccccggactgcgcccgcccatttcgcccttctcggagacggtgcgcatcatcaaccgcaaggtgaagccgcgggagcccaagcggaaccgcatcatcctgaacctgaaggtgatcgacaagggcgctggcggcgggggcgccgggcagggggccggggcgctggcccgccccaaagtcccctcgcggaaccgcgttataggcaagagcaagaagttcagcgagagcgtcctgcgtacacagatccgccacatgaagttcggcgcctttgcgctgtacaagcctccgcccgcccccctggtagccccgtcccccggcaaggctgaggcctcagccccgggccctgggctacttctggccgcccccgccgccccctacgacgcccgcagctctggctcctccggctgcccctcgcctacaccacagtcctctgaccccgacgacacgccccccaagctcctccccgagaccgtgagcccatccgcccccagctggcgcgagccggaggtgctcgacctgtccctccctcccgagtcggcagccaccagcaagcgggcaccgcctgaggtcacagctgctgccggcccggcacctcccacggcccctgagcccgccggtgcctcctccgagcccgaggctggggactggcgccccgagatgtcaccctgctccaatgtggtcgtcaccgatgtcaccagcaacctcctgacggtcacaatcaaggaattctgcaaccctgaggatttcgagaaggtggctgctggggtagcaggcgccgctgggggcggtggcagcattggggcgagcaagtgagggggctccaccaaggaggggggcttgggggggccctcctgcccgaagtcatactcttgctcccaccccacccttgcccccagccctctctccctgtgctttgcttgtctcaaatggctcggtgttgacccagggatggggctgggtagttggggtcccagaaagccgggggtaggggccaccctggaatggggcaggggaagggcacaccccctgcccatgcatggtagcccactgggtggtttctggaaagccctagaaactagggttcctctgccccttccacatcccacctgtctctctagcttgcttcctgctctcctgtgcggcgtctgatttctcggtgctaacctggcagctgtggggcccttaggagccccccaccgagggtggacacagtccctttccttcctgcagatgcctaggcaggaggagggcttcctgcctgtttggcaaagtcccaggcagaggccaaggatgaggcctgactcggctcctccctccacatcagccagggcatcagaagttgggccagggcggggtcttccctgctcgattttggacgaggcctaagtagaccccctatgccctgccccagccctggctctttcctaaccccctcaacggtgggaggaactggcagagggtgcgcctggccacagcctccccgcatctaaaggccccttcagttcttgaccaaaggtgctacgagaacctgccgtggaaacttccagttgtgcgtctgccccactcgctgtgtttgtccgtgggttcatacatgcattgggtgctaggccccaggctgccgggtggcaccctttacagttcctttgaacaggggcattgaaggcctggactgcctctcgcctcagtaggcctggggaccaggcttgggtctggaggtttgctgtggaagtcaccaggcctcccctcctggcccaggtgtgctgggggcaccgtgccccccacccccctgccctcctcagggtggtcagcccaacctgtcggaccttcacttcacatcatggtggggaccgagatagagagggagaccccattccaagctccctcttcctccgggtgtttggggaggatgctgaagaatccattcccgagggcctcccggcttgtcccagcccctcttttgcttctgaccacggaggctttctcacagcccagcctgcctgaagcaaaggaggctcccgtgtcctgggcagcttctgtttccctctgctgcctgggagctgaggcacccgtgccagtggcagaggccacagccccagccttaggccaggccctgggagggcaggcaggcaaaggggagaccagagggtctgtgttctccaggagaatgagggtgttggtcccagaattgggaccggggccccgctggccagccctgggccacttcccgggtctccattgtgcgtgggtggcgtgttccaggcgtggctggagctggcttcctggctgtgctgccatgggcccctccctcagaagcacgttggcaggaggccgatcagaaccctagcgcctttggtcctaagaatgggaggctgccttccttcccaatctccctgccagggcccacagcgtggccctagccctcccctccccgggatgtagaacggggaccctcgcagggttggggcgggggctgatactcctcggcccctccctaccctgccctgtgtgttggctttgtggccgtccaagtgccaattggcttttcgcccaaataagggctggtatttctcctctgtccttggaggtgatttccccctgaccccctcccccaggtgagtgaccacctgggtgccagttacaggtgtttccagagaccatagaaatgtgttttcctgagagttcgtgtcattcgtgacttttttgtaaagaagttgtgttttcagaggtgattttatgacaggaaagtgaaagaattagttttgcaaaaaaacaaaaacaaaaaaagaggaaaaa

SEQ ID NO: 115403 - DNA, 375 bp, Artificial Sequence
  derived and/or modified sequence
atgactcctaatgagcaccctgcgtttaaacatttattcaataaagcccacctggctccaccactaatccacctcacactgtctgggcactccacatgcttcagagaacatagggtcgggggaaaagtcactgatcagcaggatcccaaagccgaggaattctttctagttcagaacaagatgaaatccctgccatgccttctcctatccacccagaccaggcagccctctgatttttcgattttttctcccccttttttgcctttctattccaccaagccccctttaagctcctggcccgttctcaacgaactgctaggcaccccacccaggcgcggtggaggcagagccgagggcttactgacatcccagtag

SEQ ID NO: 115404 - protein, 1584 aa, Artificial Sequence
  derived and/or modified sequence
MSKQVSLPEMIKDWTKEHVKKWVNEDLKINEQYGQILLSEEVTGLVLQELTEKDLVEMGLPWGPALLIKRSYNKLNSKSPESDNHDPGQLDNSKPSKTEHQKNPKHTKKEEENSMSSNIDYDPREIRDIKQEESILMKENVLDEVANAKHKKKGKLKPEQLTCMPYPFDQFHDSHRYIEHYTLQPETGALNLIDPIHEFKALTNTETATEVDIKMKFSNEVFRFASACMNSRTNGTIHFGVKDKPHGEIVGVKITSKAAFIDHFNVMIKKYFEESEINEAKKCIREPRFVEVLLQNNTPSDRFVIEVDTIPKHSICNDKYFYIQMQICKDKIWKQNQNLSLFVREGASSRDILANSKQRDVDFKAFLQNLKSLVASRKEAEEEYGMKAMKKESEGLKLVKLLIGNRDSLDNSYYDWYILVTNKCHPNQIKHLDFLKEIKWFAVLEFDPESMINGVVKAYKESRVANLHFPNQYEDKTTNMWEKISTLNLYQQPSWIFCNGRSDLKSETYKPLEPHLWQRERASEVRKLILFLTDENIMTRGKFLVVFLLLSSVESPGDPLIETFWAFYQALKGMENMLCISVNSHIYQRWKDLLQTRMKMEDELTNHSISTLNIELVNSTILKLKSVTRSSRRFLPARGSSSVILEKKKEDVLTALEILCENECTETDIEKDKSKFLEFKKSKEEHFYRGGKVSWWNFYFSSENYSSDFVKRDSYEKLKDLIHCWAESPKPIFAKIINLYHHPGCGGTTLAMHVLWDLKKNFRCAVLKNKTTDFAEIAEQVINLVTYRAKSHQDYIPVLLLVDDFEEQENVYFLQNAIHSVLAEKDLRYEKTLVIILNCMRSRNPDESAKLADSIALNYQLSSKEQRAFGAKLKEIEKQHKNCENFYSFMIMKSNFDETYIENVVRNILKGQDVDSKEAQLISFLALLSSYVTDSTISVSQCEIFLGIIYTSTPWEPESLEDKMGTYSTLLIKTEVAEYGRYTGVRIIHPLIALYCLKELERSYHLDKCQIALNILEENLFYDSGIGRDKFQHDVQTLLLTRQRKVYGDETDTLFSPLMEALQNKDIEKVLSAGSRRFPQNAFICQALARHFYIKEKDFNTALDWARQAKMKAPKNSYISDTLGQVYKSEIKWWLDGNKNCRSITVNDLTHLLEAAEKASRAFKESQRQTDSKNYETENWSPQKSQRRYDMYNTACFLGEIEVGLYTIQILQLTPFFHKENELSKKHMVQFLSGKWTIPPDPRNECYLALSKFTSHLKNLQSDLKRCFDFFIDYMVLLKMRYTQKEIAEIMLSKKVSRCFRKYTELFCHLDPCLLQSKESQLLQEENCRKKLEALRADRFAGLLEYLNPNYKDATTMESIVNEYAFLLQQNSKKPMTNEKQNSILANIILSCLKPNSKLIQPLTTLKKQLREVLQFVGLSHQYPGPYFLACLLFWPENQELDQDSKLIEKYVSSLNRSFRGQYKRMCRSKQASTLFYLGKRKGLNSIVHKAKIEQYFDKAQNTNSLWHSGDVWKKNEVKDLLRRLTGQAEGKLISVEYGTEEKIKIPVISVYSGPLRSGRNIERVSFYLGFSIEGPLAYDIEVI

SEQ ID NO: 115405 - protein, 406 aa, Artificial Sequence
  derived and/or modified sequence
MSKQVSLPEMIKDWTKEHVKKWVNEDLKINEQYGQILLSEEVTGLVLQELTEKDLVEMGLPWGPALLIKRSYNKLNSKSPESDNHDPGQLDNSKPSKTEHQKNPKHTKKEEENSMSSNIDYDPREIRDIKQEESILMKENVLDEVANAKHKKKLEALRADRFAGLLEYLNPNYKDATTMESIVNEYAFLLQQNSKKPMTNEKQNSILANIILSCLKPNSKLIQPLTTLKKQLREVLQFVGLSHQYPGPYFLACLLFWPENQELDQDSKLIEKYVSSLNRSFRGQYKRMCRSKQASTLFYLGKRKGLNSIVHKAKIEQYFDKAQNTNSLWHSGDVWKKNEVKDLLRRLTGQAEGKLISVEYGTEEKIKIPVISVYSGPLRSGRNIERVSFYLGFSIEGPLAYDIEVI

SEQ ID NO: 115406 - protein, 70 aa, Artificial Sequence
  derived and/or modified sequence
MSKQVSLPEMIKDWTKEHVKKWVNEDLKINEQYGQILLSEEVTGLVLQELTEKDLVEMGLPWGPALLIKR

SEQ ID NO: 115407 - DNA, 4755 bp, Artificial Sequence
  derived and/or modified sequence
atgagcaagcaggtgagcctgcccgagatgatcaaggactggaccaaggagcacgtgaagaagtgggtgaacgaggacctgaagatcaacgagcagtacggccagatcctgctgagcgaggaggtgaccggcctggtgctgcaggagctgaccgagaaggacctggtggagatgggcctgccctggggccccgccctgctgatcaagagaagctacaacaagctgaacagcaagagccccgagagcgacaaccacgaccccggccagctggacaacagcaagcccagcaagaccgagcaccagaagaaccccaagcacaccaagaaggaggaggagaacagcatgagcagcaacatcgactacgaccccagagagatcagagacatcaagcaggaggagagcatcctgatgaaggagaacgtgctggacgaggtggccaacgccaagcacaagaagaagggcaagctgaagcccgagcagctgacctgcatgccctaccccttcgaccagttccacgacagccacagatacatcgagcactacaccctgcagcccgagaccggcgccctgaacctgatcgaccccatccacgagttcaaggccctgaccaacaccgagaccgccaccgaggtggacatcaagatgaagttcagcaacgaggtgttcagattcgccagcgcctgcatgaacagcagaaccaacggcaccatccacttcggcgtgaaggacaagccccacggcgagatcgtgggcgtgaagatcaccagcaaggccgccttcatcgaccacttcaacgtgatgatcaagaagtacttcgaggagagcgagatcaacgaggccaagaagtgcatcagagagcccagattcgtggaggtgctgctgcagaacaacacccccagcgacagattcgtgatcgaggtggacaccatccccaagcacagcatctgcaacgacaagtacttctacatccagatgcagatctgcaaggacaagatctggaagcagaaccagaacctgagcctgttcgtgagagagggcgccagcagcagagacatcctggccaacagcaagcagagagacgtggacttcaaggccttcctgcagaacctgaagagcctggtggccagcagaaaggaggccgaggaggagtacggcatgaaggccatgaagaaggagagcgagggcctgaagctggtgaagctgctgatcggcaacagagacagcctggacaacagctactacgactggtacatcctggtgaccaacaagtgccaccccaaccagatcaagcacctggacttcctgaaggagatcaagtggttcgccgtgctggagttcgaccccgagagcatgatcaacggcgtggtgaaggcctacaaggagagcagagtggccaacctgcacttccccaaccagtacgaggacaagaccaccaacatgtgggagaagatcagcaccctgaacctgtaccagcagcccagctggatcttctgcaacggcagaagcgacctgaagagcgagacctacaagcccctggagccccacctgtggcagagagagagagccagcgaggtgagaaagctgatcctgttcctgaccgacgagaacatcatgaccagaggcaagttcctggtggtgttcctgctgctgagcagcgtggagagccccggcgaccccctgatcgagaccttctgggccttctaccaggccctgaagggcatggagaacatgctgtgcatcagcgtgaacagccacatctaccagagatggaaggacctgctgcagaccagaatgaagatggaggacgagctgaccaaccacagcatcagcaccctgaacatcgagctggtgaacagcaccatcctgaagctgaagagcgtgaccagaagcagcagaagattcctgcccgccagaggcagcagcagcgtgatcctggagaagaagaaggaggacgtgctgaccgccctggagatcctgtgcgagaacgagtgcaccgagaccgacatcgagaaggacaagagcaagttcctggagttcaagaagagcaaggaggagcacttctacagaggcggcaaggtgagctggtggaacttctacttcagcagcgagaactacagcagcgacttcgtgaagagagacagctacgagaagctgaaggacctgatccactgctgggccgagagccccaagcccatcttcgccaagatcatcaacctgtaccaccaccccggctgcggcggcaccaccctggccatgcacgtgctgtgggacctgaagaagaacttcagatgcgccgtgctgaagaacaagaccaccgacttcgccgagatcgccgagcaggtgatcaacctggtgacctacagagccaagagccaccaggactacatccccgtgctgctgctggtggacgacttcgaggagcaggagaacgtgtacttcctgcagaacgccatccacagcgtgctggccgagaaggacctgagatacgagaagaccctggtgatcatcctgaactgcatgagaagcagaaaccccgacgagagcgccaagctggccgacagcatcgccctgaactaccagctgagcagcaaggagcagagagccttcggcgccaagctgaaggagatcgagaagcagcacaagaactgcgagaacttctacagcttcatgatcatgaagagcaacttcgacgagacctacatcgagaacgtggtgagaaacatcctgaagggccaggacgtggacagcaaggaggcccagctgatcagcttcctggccctgctgagcagctacgtgaccgacagcaccatcagcgtgagccagtgcgagatcttcctgggcatcatctacaccagcaccccctgggagcccgagagcctggaggacaagatgggcacctacagcaccctgctgatcaagaccgaggtggccgagtacggcagatacaccggcgtgagaatcatccaccccctgatcgccctgtactgcctgaaggagctggagagaagctaccacctggacaagtgccagatcgccctgaacatcctggaggagaacctgttctacgacagcggcatcggcagagacaagttccagcacgacgtgcagaccctgctgctgaccagacagagaaaggtgtacggcgacgagaccgacaccctgttcagccccctgatggaggccctgcagaacaaggacatcgagaaggtgctgagcgccggcagcagaagattcccccagaacgccttcatctgccaggccctggccagacacttctacatcaaggagaaggacttcaacaccgccctggactgggccagacaggccaagatgaaggcccccaagaacagctacatcagcgacaccctgggccaggtgtacaagagcgagatcaagtggtggctggacggcaacaagaactgcagaagcatcaccgtgaacgacctgacccacctgctggaggccgccgagaaggccagcagagccttcaaggagagccagagacagaccgacagcaagaactacgagaccgagaactggagcccccagaagagccagagaagatacgacatgtacaacaccgcctgcttcctgggcgagatcgaggtgggcctgtacaccatccagatcctgcagctgacccccttcttccacaaggagaacgagctgagcaagaagcacatggtgcagttcctgagcggcaagtggaccatcccccccgaccccagaaacgagtgctacctggccctgagcaagttcaccagccacctgaagaacctgcagagcgacctgaagagatgcttcgacttcttcatcgactacatggtgctgctgaagatgagatacacccagaaggagatcgccgagatcatgctgagcaagaaggtgagcagatgcttcagaaagtacaccgagctgttctgccacctggacccctgcctgctgcagagcaaggagagccagctgctgcaggaggagaactgcagaaagaagctggaggccctgagagccgacagattcgccggcctgctggagtacctgaaccccaactacaaggacgccaccaccatggagagcatcgtgaacgagtacgccttcctgctgcagcagaacagcaagaagcccatgaccaacgagaagcagaacagcatcctggccaacatcatcctgagctgcctgaagcccaacagcaagctgatccagcccctgaccaccctgaagaagcagctgagagaggtgctgcagttcgtgggcctgagccaccagtaccccggcccctacttcctggcctgcctgctgttctggcccgagaaccaggagctggaccaggacagcaagctgatcgagaagtacgtgagcagcctgaacagaagcttcagaggccagtacaagagaatgtgcagaagcaagcaggccagcaccctgttctacctgggcaagagaaagggcctgaacagcatcgtgcacaaggccaagatcgagcagtacttcgacaaggcccagaacaccaacagcctgtggcacagcggcgacgtgtggaagaagaacgaggtgaaggacctgctgagaagactgaccggccaggccgagggcaagctgatcagcgtggagtacggcaccgaggagaagatcaagatccccgtgatcagcgtgtacagcggccccctgagaagcggcagaaacatcgagagagtgagcttctacctgggcttcagcatcgagggccccctggcctacgacatcgaggtgatctag

SEQ ID NO: 115408 - DNA, 1221 bp, Artificial Sequence
  derived and/or modified sequence
atgagcaagcaggtgagcctgcccgagatgatcaaggactggaccaaggagcacgtgaagaagtgggtgaacgaggacctgaagatcaacgagcagtacggccagatcctgctgagcgaggaggtgaccggcctggtgctgcaggagctgaccgagaaggacctggtggagatgggcctgccctggggccccgccctgctgatcaagagaagctacaacaagctgaacagcaagagccccgagagcgacaaccacgaccccggccagctggacaacagcaagcccagcaagaccgagcaccagaagaaccccaagcacaccaagaaggaggaggagaacagcatgagcagcaacatcgactacgaccccagagagatcagagacatcaagcaggaggagagcatcctgatgaaggagaacgtgctggacgaggtggccaacgccaagcacaagaagaagctggaggccctgagagccgacagattcgccggcctgctggagtacctgaaccccaactacaaggacgccaccaccatggagagcatcgtgaacgagtacgccttcctgctgcagcagaacagcaagaagcccatgaccaacgagaagcagaacagcatcctggccaacatcatcctgagctgcctgaagcccaacagcaagctgatccagcccctgaccaccctgaagaagcagctgagagaggtgctgcagttcgtgggcctgagccaccagtaccccggcccctacttcctggcctgcctgctgttctggcccgagaaccaggagctggaccaggacagcaagctgatcgagaagtacgtgagcagcctgaacagaagcttcagaggccagtacaagagaatgtgcagaagcaagcaggccagcaccctgttctacctgggcaagagaaagggcctgaacagcatcgtgcacaaggccaagatcgagcagtacttcgacaaggcccagaacaccaacagcctgtggcacagcggcgacgtgtggaagaagaacgaggtgaaggacctgctgagaagactgaccggccaggccgagggcaagctgatcagcgtggagtacggcaccgaggagaagatcaagatccccgtgatcagcgtgtacagcggccccctgagaagcggcagaaacatcgagagagtgagcttctacctgggcttcagcatcgagggccccctggcctacgacatcgaggtgatctag

SEQ ID NO: 115409 - DNA, 213 bp, Artificial Sequence
  derived and/or modified sequence
atgagcaagcaggtgagcctgcccgagatgatcaaggactggaccaaggagcacgtgaagaagtgggtgaacgaggacctgaagatcaacgagcagtacggccagatcctgctgagcgaggaggtgaccggcctggtgctgcaggagctgaccgagaaggacctggtggagatgggcctgccctggggccccgccctgctgatcaagagatag

SEQ ID NO: 115410 - DNA, 4755 bp, Artificial Sequence
  derived and/or modified sequence
atgtctaagcaagtgtctctgccagagatgatcaaggactggacaaaggagcatgttaagaaatgggtgaacgaggatcttaagatcaacgagcagtatggacagattctcttgtcggaggaagtcactggcctggtgcttcaggagctgaccgagaaggaccttgttgagatgggtcttccttgggggcccgcgttgctgatcaagcgctcatataacaaattgaattccaaaagccctgagtccgacaaccacgaccctgggcagttggataattctaagccgtctaagacggagcatcagaagaatcccaagcacactaagaaggaggaggagaatagcatgagtagcaacatcgactacgaccctcgcgaaatccgcgacattaagcaggaagaaagtattctgatgaaggaaaatgtgcttgatgaggtggctaatgccaaacataagaagaagggcaaattaaagcctgaacagctaacctgtatgccctaccctttcgaccagttccacgactctcatcgatacatcgagcactatacactgcaacctgagactggcgcacttaacttaattgatcccattcacgagttcaaggcactcactaatactgaaactgcaaccgaagtggatattaaaatgaaattctccaacgaagtgtttcgcttcgcctcagcttgtatgaatagccgcactaatggtacgatccacttcggtgttaaggataaacctcacggggagatagtgggggtcaagatcacgtcaaaggcggcctttatcgaccattttaacgtgatgatcaaaaagtatttcgaagagagtgagattaacgaggccaaaaaatgtattagggaaccccggttcgttgaagtgctgctccagaacaatactcctagtgatcgatttgtgatcgaagtcgatactatcccaaagcacagtatttgtaacgacaagtatttctatattcagatgcagatttgtaaagataaaatatggaaacaaaaccagaatttgagcctcttcgtcagggagggagcttccagcagggacatactagcgaatagcaaacaaagagacgtggactttaaggcctttctccagaatcttaagagcctcgtggcaagccgcaaggaagcggaggaagaatatggaatgaaagcaatgaaaaaagagtctgagggcctcaagcttgttaagctcctcattggaaatagagattcgctggacaatagctattacgactggtatatcctcgttacaaacaagtgccacccaaaccaaatcaaacacctcgatttcctaaaggaaattaagtggtttgccgtcttggagttcgatcctgaaagtatgatcaatggcgtcgtgaaggcctataaggagagcagggtggccaatctgcactttcccaatcaatacgaagacaaaactaccaacatgtgggagaagatctccactctcaatttgtaccagcagcccagctggatcttctgcaatggtcgcagcgacctgaagtcggaaacttacaaacctctggaacctcatctgtggcaacgggaaagggcgagcgaagttcggaagctgatcctgttcttgaccgatgaaaatattatgacaagaggcaagtttttagtcgttttcctgctccttagttccgtggagtctccaggggaccctctgattgagactttctgggccttttaccaggcgttaaagggaatggagaacatgctttgcatttcagttaattctcacatttaccagcggtggaaagatctgctgcagacccgcatgaagatggaggatgagctcactaaccactccatttctacactgaacatcgagttggttaactccacaattctgaagctaaaaagcgtaaccaggagttcgcgccgatttctgcccgctcgcggcagctcaagtgtgattctcgaaaaaaagaaagaggacgtgttgaccgccctggagatcctctgcgagaacgagtgcactgagactgacattgagaaagataaaagcaaatttctcgaatttaaaaagagtaaggaggagcacttttaccgaggtggcaaggtgagctggtggaacttttacttctcaagtgaaaactactccagcgactttgtcaaacgagattcatacgaaaagctgaaagatttaattcactgttgggcagagagcccaaaacccatattcgcgaagataataaatctgtaccaccatccaggttgcggagggactaccctcgccatgcacgtgctttgggacttgaagaagaactttcgctgcgccgtgctgaagaacaaaaccacagatttcgcagagatcgcagagcaggtgatcaatctggtcacctaccgcgctaaaagccaccaggattatatcccagtcctgctgctggttgacgatttcgaggagcaggaaaacgtgtactttctgcagaatgccattcatagcgtgttggccgaaaaagaccttaggtatgagaagaccttagttatcatcctgaattgtatgaggtcgaggaatcctgacgaatctgccaaactggccgactcaatcgcgttgaactatcagctgagctccaaggaacaacgtgcctttggtgccaagcttaaggagatcgagaaacagcacaagaattgcgagaatttctacagcttcatgattatgaagtccaacttcgatgagacctacatcgagaacgttgtccgcaatatcctcaagggccaggatgtcgactctaaagaagcacagctcatctcctttctggcactgctctcaagctacgtaacagattccacgattagtgtgagtcagtgtgagatctttctgggaattatttacaccagtacaccatgggagccggagtcactggaagacaagatgggaacgtacagtaccttacttattaaaacagaggtcgcagagtacggccgttacacgggagttcgaataattcaccctcttatcgctctgtattgcctgaaagagcttgaaaggtcatatcaccttgataaatgtcagatagcgctgaatatcctcgaggaaaatctgttctacgactccggcatcggccgtgacaagttccagcacgatgtgcaaaccttgctgctcacacgccaacggaaggtttatggcgatgagactgacaccctttttagccctctgatggaggcgctgcagaacaaggacattgaaaaggtcctatctgcgggatccaggcggttcccgcagaatgcattcatctgtcaagccttagctcggcacttctatattaaggagaaagactttaacacagctctggactgggcccgacaggccaagatgaaggccccaaaaaatagctacattagcgatacattgggccaggtatacaagtcagagattaaatggtggctggatggaaacaagaattgtcgtagcatcaccgtgaacgatctgacccacttgctcgaggccgctgagaaggcatccagagcttttaaggagtcccaaaggcagacagatagcaagaactatgaaaccgaaaactggtccccccagaagtcacagagaaggtacgacatgtataacacagcctgtttcttaggagagatcgaagtgggtttgtacacaatccagattctgcagcttacacccttttttcacaaggaaaatgagctttcaaaaaagcatatggtgcagtttctatcaggcaagtggacgattccgcctgatccacgcaacgagtgttatctcgccctcagcaaattcacctcccacctgaagaatctgcagagcgatctgaagagatgttttgactttttcatagattacatggtccttcttaaaatgcgttatacccagaaggagattgcagagattatgctctccaaaaaggtctcacggtgtttcaggaaatacaccgaacttttttgccatctggacccctgtctgctacagagcaaagagtcacagctacttcaggaggagaactgtcgaaagaagctagaagccctgagggccgatcgcttcgctggactgctcgaatacctgaacccaaactacaaggacgccacaacgatggagtctatcgttaacgagtatgccttcctgctgcagcaaaactcaaagaagcctatgacgaacgagaagcaaaatagcattcttgcaaacattatcctcagctgcctgaagccaaattccaaactaattcagcctctgacaactctaaagaagcaactccgagaggtgttacaattcgtggggctttctcaccagtatcccggtccctatttcctggcttgcctcctcttttggccagagaatcaggagctggaccaggatagcaagttaattgagaagtatgttagttctctcaataggagctttagaggccaatacaagagaatgtgcaggagcaagcaagccagcactctgttttaccttggcaaacggaaaggcttgaacagtattgtgcataaggctaagatagagcaatacttcgacaaagcccaaaacaccaactcactctggcattccggggacgtctggaagaagaatgaagtgaaagatctactgaggaggctgacgggacaggcagaaggaaagcttattagcgtcgagtatgggaccgaggaaaagatcaaaatcccagttatcagtgtatatagcggacctctgcggagcggtcgtaacatcgagcgtgtcagcttttacttggggttctctatagaaggaccgcttgcttacgacattgaagttatttag

SEQ ID NO: 115411 - DNA, 1221 bp, Artificial Sequence
  derived and/or modified sequence
atgtcaaagcaggtgtcgcttcctgaaatgatcaaggactggacaaaggaacacgtgaagaagtgggttaatgaggatcttaagattaacgagcagtacggccagattctactgtccgaagaagttaccggtctcgtgcttcaggagctaactgagaaagacctggttgaaatgggcttgccgtggggcccagctctgctcatcaagagatcgtacaacaagctgaactcgaagtcgccagaatcagataatcacgaccctggtcagcttgacaactcgaagccctcaaaaacagagcatcagaagaacccaaaacataccaagaaagaggaggagaatagtatgtcatccaatatcgattatgatcctagagagattagagacattaagcaggaagagtctatcctgatgaaggagaacgtgttagatgaggtcgcaaacgcgaagcacaaaaagaaactggaggccctgcgcgcagatcgtttcgctggattgcttgagtatctaaaccctaactataaggacgccacgacaatggaaagcattgtgaatgaatacgcattccttctacagcaaaacagcaagaaacctatgacaaacgaaaaacaaaattccatcctggcaaacataattctgtcctgcctcaagcccaactcgaagctaattcagcccctgacaacacttaaaaaacaattgcgggaggtgcttcagttcgtaggcttgagtcaccagtaccccggtccatattttcttgcatgcttgctgttctggccggagaaccaggaactagatcaggacagcaaactcattgagaaatatgttagtagtctgaatcgctccttccggggccagtacaaaaggatgtgccgctccaaacaggcctctactctgttttacttgggaaaacggaagggtctgaactctatcgtgcataaggcaaaaattgaacagtactttgacaaagctcagaacactaatagcctgtggcacagtggagacgtgtggaagaagaatgaggtgaaagatcttcttagacggctcacaggccaggccgaaggtaagctgatatctgtggaatatggaacagaagaaaagatcaaaattcccgtgatctccgtgtactccggccctctgcgtagcggccgcaacattgaacgggtctccttctatctgggattctccatagaagggccgttagcatacgacattgaggtcatctag

SEQ ID NO: 115412 - DNA, 4755 bp, Artificial Sequence
  derived and/or modified sequence
atgtccaagcaggtgtccctccctgagatgattaaggactggactaaagagcatgttaaaaagtgggttaacgaagatttgaaaattaatgaacagtacgggcagatcctgctttccgaagaggtcaccggtcttgttctgcaggaacttaccgagaaggacctggtggagatgggtttgccatggggtcccgctctgctaatcaagcgctcttacaacaaattaaactccaagtctcctgagagcgataatcacgaccctgggcaactggacaactccaagccctccaaaacagagcatcagaagaatcctaagcacacgaagaaagaggaagaaaactccatgtcaagcaatatcgattatgacccccgggaaattcgtgacatcaaacaggaagaaagcatcctgatgaaggagaacgttcttgacgaggtcgccaacgccaagcacaagaaaaagggcaagttaaagccagagcagctaacttgcatgccctacccttttgaccagttccatgacagccacagatacattgagcactatacgctgcaacccgagacaggcgccctgaacctcatcgatccaatacacgagtttaaggccctgaccaacacggagactgctactgaggttgatattaagatgaaattcagtaacgaagtctttcggttcgcatctgcatgcatgaactcaaggaccaacgggaccattcactttggggttaaggacaaacctcacggtgagattgtcggggtgaaaattactagtaaagctgcgttcatcgaccactttaatgtcatgattaaaaagtactttgaagaatcggaaattaacgaagctaagaagtgcattcgagagcctcgattcgtagaggtgctcttgcagaacaacactccatcagacaggttcgtgatcgaggtggacactattcctaagcattctatatgcaatgacaaatacttttatattcagatgcagatctgtaaggataaaatctggaagcagaatcaaaatttgtcattgttcgtccgtgaaggcgcatcgtcccgcgatatcctggcgaactcgaagcagcgcgacgttgattttaaggcctttctgcagaacctcaaaagtctcgtagcaagtaggaaggaggccgaggaagagtacggcatgaaggcaatgaagaaagagtcagagggactgaaactggtcaagctgctcatcggcaatagggacagtttggataactcttactacgattggtacatccttgtcacaaacaaatgccacccaaaccagattaaacacctcgacttcttaaaggaaataaaatggtttgcagtgctagagttcgaccctgagagcatgatcaatggagtagtcaaagcatacaaggagagcagggtagctaatcttcacttcccaaatcaatatgaagataagacaaccaacatgtgggaaaagatctccaccctgaacctttaccagcaaccctcatggatcttctgtaatgggcggtccgatctgaagtcagagacatacaaacccctggagccccacttgtggcagcgagaaagggcaagtgaggtacgaaaattaatcctgttcctgaccgacgaaaatattatgacacggggtaagtttcttgtagtgtttctcctgctgagctccgtcgaatccccaggggaccctttaatcgagaccttctgggccttctaccaggcactaaaaggcatggaaaatatgctctgcatttctgttaatagccatatttaccagagatggaaggacctgctacaaacaaggatgaaaatggaggacgagctgaccaaccactctatcagcacactgaatattgaattggttaatagtaccattttgaaactgaaaagcgtcaccaggtccagcagacggttcctgccagcccggggtagctcctccgtcatacttgagaaaaaaaaagaggatgttcttactgccttagagattctctgtgagaatgaatgtacggagacagatatcgaaaaggacaaaagcaaattcctggagttcaagaagtcaaaggaggaacacttctatagaggtggcaaagtgagctggtggaatttttatttcagtagtgagaactattctagcgacttcgtgaaaagggacagttatgaaaaactgaaagacctaatccattgttgggcagagtcgccaaagccaatctttgccaaaattatcaatctgtaccatcaccccggttgtggaggcacgacgctggctatgcatgtattgtgggatctgaaaaaaaactttcggtgtgctgttctgaaaaacaagaccacggactttgctgaaatcgcagaacaggttattaatttagtaacttatcgtgccaaaagtcaccaagactacatccccgtcctgctgctggtagacgactttgaagagcaggagaacgtatacttcctccagaatgccatacactccgtgctggcggagaaggacctgcggtatgaaaaaacactggtgatcatactgaattgcatgcgttcccggaaccccgatgagagtgcaaaacttgcagacagcatcgcactcaattaccaactgtcgtcgaaagaacagcgtgccttcggcgccaagttgaaagagatcgagaagcagcacaaaaattgcgagaacttctatagtttcatgatcatgaagagtaacttcgacgaaacttatatagaaaacgtcgtccgcaacatactgaaggggcaagacgtggatagcaaggaggcacagcttattagcttcctagctctgctgtcttcctacgtcaccgactccacgattagcgtgtcccagtgtgagatttttctcggtatcatctacactagcacaccatgggagccggagtccctggaggacaagatgggaacttattcgacactgctgatcaagaccgaggtagcagagtacgggaggtatactggggtgcggataattcatcctttaatagccctgtactgcctaaaggagctggaacgcagctaccaccttgataaatgtcagatcgccttgaatatcctagaggagaacttattttacgactcgggaataggccgggataagttccagcacgatgtacagactttacttcttaccaggcaaagaaaagtgtacggagatgagacagacactctgttctctccacttatggaggcattacagaataaagacatagagaaagtgctaagcgctggttcccggagatttccccagaatgccttcatttgccaagctctggccagacacttctacatcaaggagaaggattttaataccgcactcgactgggctagacaggctaagatgaaagcaccgaaaaacagctacatttcagatacccttggacaagtgtataaatccgagatcaaatggtggctcgacggcaacaaaaactgcaggtcaattactgtcaatgatctgactcaccttttggaagccgccgagaaggccagtagagcttttaaagaatcccagcgtcagaccgattccaagaattacgaaaccgagaactggtccccgcagaagtcccagcgaagatacgacatgtacaatacagcgtgttttctaggagaaatcgaggtgggactttatactatccagatcctgcagcttactcctttctttcacaaggagaatgagctgagcaaaaagcacatggtgcaatttctgtctgggaagtggactatcccaccagaccctcgtaacgaatgctaccttgccctgagcaaatttacttcacatcttaagaatctccagagtgatttgaagaggtgtttcgacttcttcatcgactatatggtgttgctgaagatgcgctatactcagaaggaaatcgccgagatcatgcttagcaagaaagttagcaggtgttttcgcaagtatacagaacttttctgccacctggacccttgcttactgcagtcaaaggagtctcagttactgcaagaagaaaactgtagaaagaagcttgaggcacttagagccgacaggttcgccggcttgctggaatatttaaacccaaactataaagatgccaccaccatggagtccattgtcaacgaatatgcttttcttctccaacagaacagcaagaagccaatgactaatgagaagcagaacagtattcttgccaatatcatcctgtcttgcctcaagcctaacagcaagcttatccagcccctgaccactctgaagaaacaactccgtgaggtgttgcagtttgtgggcctgagccaccagtacccagggccatactttctggcctgtctgctcttttggcccgaaaaccaggagctcgatcaagacagcaagttgatagaaaaatatgtatcatcactgaaccgctcctttaggggccagtacaagcgtatgtgtaggtcaaagcaggcctccacacttttttatttgggaaagagaaaggggctgaatagcatagttcataaagctaagattgagcagtatttcgacaaggcacagaatactaatagcctctggcattccggtgatgtatggaaaaagaacgaagtgaaagatcttctgcgtcgcctgacgggccaggcggagggcaagcttatctccgttgagtacggcactgaggaaaagatcaagattccggtcatttctgtgtatagcggcccattgaggagcggccgaaacatcgagcgcgtgtcattctatttgggcttctctatcgagggaccactggcatacgacatcgaggttatctag

SEQ ID NO: 115413 - DNA, 213 bp, Artificial Sequence
  derived and/or modified sequence
atgtcgaagcaggtgtctttgcctgaaatgattaaagactggaccaaggaacacgtaaagaaatgggttaacgaagacttgaagattaatgaacagtatggccagattctgctgagcgaggaagttaccggactggttctgcaggaacttacggaaaaggaccttgtggaaatgggactgccttgggggcccgcattactgatcaagcgctag

SEQ ID NO: 115414 - DNA, 4755 bp, Artificial Sequence
  derived and/or modified sequence
atgtccaagcaggtgagcctgccagaaatgattaaggattggaccaaagagcacgtgaagaaatgggttaacgaagacttaaaaataaacgagcagtacggccagattttgctctcggaagaagtaactggtctggtgctgcaggaactaactgagaaggatctggtcgagatgggcctaccctggggtcccgctcttctgattaagaggtcttacaataagttaaactccaaatcccccgaatccgataatcacgatcctggccaattggacaattccaagccgtctaagacggagcaccagaaaaaccccaagcacactaaaaaagaagaggagaatagcatgtcaagcaacatcgactatgatcctagggaaatccgcgacataaaacaagaagaatccatcctcatgaaagaaaacgtgttagatgaggtggccaacgccaagcacaagaagaagggtaagctgaagccagaacagctcacatgcatgccttatcccttcgaccagtttcatgacagccatagatatatcgaacactacacactccagccggagaccggcgcactgaatctgattgacccaattcacgaatttaaggctctgacaaacacagagacagccacggaagtggatatcaaaatgaagttctcaaatgaggtcttccgctttgccagtgcctgcatgaatagccgcacaaatgggaccatccattttggcgtcaaggataagccccacggagaaatcgttggagtcaagatcacctccaaagcggctttcattgatcactttaacgtcatgatcaaaaagtattttgaggaaagcgagatcaacgaagctaaaaagtgtatcagggaaccaagatttgtggaggtcctacttcaaaacaatacgccatccgatcgatttgttattgaggtggataccattcccaaacattccatttgcaatgataagtatttctatatccagatgcagatctgtaaagacaagatatggaaacagaaccaaaacttatctctttttgtgagagagggcgcctcgtcccgagacatccttgccaattcgaagcagcgggacgttgatttcaaagctttcctgcaaaacttaaagtccttggtggccagcagaaaggaagccgaagaggagtatggaatgaaagccatgaagaaagagtccgagggccttaagttggtgaagctcctgattggtaacagggattccctcgacaattcatactatgattggtacatactagtgactaataaatgccatcctaaccaaattaagcacttggatttcctaaaggaaatcaaatggttcgccgtgttggaatttgaccccgaatcaatgatcaatggtgtggtaaaagcttacaaggagagccgagtagcgaacctacacttcccgaaccaatacgaggacaaaaccactaacatgtgggaaaagatttccacgttgaatctgtatcagcagccctcttggattttttgcaacggccgctctgacttgaagtctgaaacctacaaacccctcgaaccacacctatggcagagggaaagagctagcgaggttaggaaattgatcctttttttgactgatgagaacataatgacccgcggcaaattccttgttgtttttctgctgttatcttctgttgaatcacctggagacccactgattgagactttctgggccttctaccaggccctgaagggaatggagaacatgttatgcatatccgtgaattctcatatttaccagcgatggaaagatctcctgcaaacccgcatgaagatggaggatgagttaaccaatcactccatcagcacactgaatatagagctggtgaactccaccatcctgaagcttaaatctgtgacccgctctagccgcagattcttgcctgcccgcggcagttcttccgttatactggaaaagaaaaaggaagacgtcctgaccgcactggagatcctgtgcgagaacgagtgcacggaaaccgacattgaaaaagataagagcaagttcttagagtttaagaaaagcaaggaggaacatttctaccgcggaggaaaggtgagctggtggaatttttacttctctagtgaaaactactcctcagatttcgtaaagcgcgactcttatgaaaagcttaaagatctgatccactgttgggcagagtccccgaaacctatcttcgccaagattatcaacctataccaccatcccggctgtggaggaacaactcttgcgatgcatgtgctctgggatctcaaaaagaatttcagatgcgctgtgctaaagaataaaacgaccgactttgcggaaatcgccgagcaggtcattaacctcgtgacctaccgagccaaatcccaccaggattatatccccgtgctgctgctggtcgatgattttgaagaacaagaaaacgtctacttcctacagaatgctatccattctgtcctggctgaaaaggacctgcgttatgagaagacactggtgatcatcctcaactgcatgcgcagtagaaaccccgacgagtccgcaaagctggcagacagtatcgcactgaattaccagctttcatccaaagaacagcgtgcattcggcgctaaactgaaagaaattgagaaacagcacaagaactgtgagaacttctactcgttcatgatcatgaaatccaactttgacgagacatatatcgagaacgttgttcgcaacattctcaaggggcaggacgtggattctaaagaggcgcaactcatctcctttctggccctcctgtcgtcttacgtgacagacagcacaattagtgtatcgcagtgcgaaatatttctgggcatcatctatacgagtacaccttgggagcccgaaagtcttgaggataagatggggacgtactcaactctcctaattaagacagaagtagcagagtatggccgctacactggggtgaggatcatacatccccttatcgctctatattgtctgaaagaactggagcgaagctaccatctggataagtgtcagatcgccctcaatatccttgaggaaaatttattctacgattccgggatcggcagggataagtttcagcatgacgtgcagacactactgctgaccagacaaagaaaggtgtatggagacgagaccgacactttgttttccccccttatggaagcccttcagaacaaagacatagagaaagtattgtcggcaggaagtagacggtttccacaaaatgcattcatctgccaggctcttgctaggcacttctatattaaggagaaagatttcaacaccgcgcttgattgggctcgccaggcaaagatgaaggctcccaagaactcttatattagcgataccctcggccaggtctacaaaagcgagattaagtggtggcttgatggtaataaaaattgccgatccatcaccgtcaacgacttgactcacctcttggaggcagcagagaaggctagcagagctttcaaggaatctcagcgacagaccgacagtaagaactacgagaccgagaactggtcaccccagaaatcccagcgtagatatgacatgtataacacggcctgcttcctaggagagatcgaagttgggctgtatactattcagatcctgcagctgacaccattttttcacaaggagaatgagctttctaagaagcacatggtgcaattcctcagcggaaagtggaccattccgcctgacccaaggaacgaatgctacctcgcactaagcaaatttacatctcacttaaaaaatctccaatctgacctaaaacggtgtttcgatttcttcatcgactacatggtattactgaagatgcgatatactcagaaagagattgcagaaattatgctttctaagaaagtcagccgctgcttcaggaaatataccgagctcttttgccacttggacccctgcctgctgcagagcaaggagagccaactgctgcaggaagagaattgccgcaaaaagcttgaggccctgagggctgaccgcttcgcgggcctgctcgagtacctgaaccctaactataaggacgctacaacgatggagtccattgtgaacgagtacgccttcctgcttcaacaaaactccaagaagccaatgaccaacgaaaaacagaattctatcctcgccaacattatcctatcctgcctaaagcctaactccaagctgatccagcccctgactacactgaaaaaacaactcagagaggtcctgcagtttgtcggactgtctcatcagtatcctggaccatactttctggcctgcctgctgttttggccagagaatcaggaactcgatcaggatagcaaactgattgagaagtacgtctcttcccttaataggagctttaggggccagtataagagaatgtgccgaagtaagcaggcctccactcttttctaccttggcaaaaggaaaggactaaactctatcgttcacaaagccaaaattgagcaatatttcgacaaggctcagaacactaactcactgtggcacagcggagacgtgtggaaaaagaacgaagttaaggacctgctgcgtaggctgaccgggcaggccgagggcaagctcatttctgtagagtacggaactgaggagaagataaagatccccgtgatttcagtttactccggaccgctcaggagcgggagaaacatagaacgtgtatctttctatctcggattttcaattgaggggcccctggcctatgatatcgaagtaatttag

SEQ ID NO: 115415 - DNA, 213 bp, Artificial Sequence
  derived and/or modified sequence
atgagtaaacaggtgagcttgccagagatgatcaaagattggacgaaggaacatgttaaaaaatgggtgaacgaagacctgaagatcaacgagcaatacggtcaaattctgctgtcagaagaagtgactggactggtattgcaagaactcaccgagaaagacctggtcgaaatgggcctgccctggggtcccgccttacttatcaagaggtag

SEQ ID NO: 115416 - DNA, 213 bp, Artificial Sequence
  derived and/or modified sequence
atgagcaaacaggtctcgctgcctgaaatgatcaaagactggacgaaggaacacgtgaaaaagtgggtgaatgaggacttgaaaattaacgaacagtatgggcagattctcctgtctgaggaggttactggactggttctacaggagttaaccgagaaagatcttgtagagatgggactgccgtggggacctgccctccttattaagcgatag

SEQ ID NO: 115417 - DNA, 213 bp, Artificial Sequence
  derived and/or modified sequence
atgagcaagcaggttagtctgcccgaaatgatcaaggactggaccaaggaacatgtcaaaaaatgggttaacgaagatctgaaaataaatgagcagtatggacaaattctcctgtcagaggaagtcactggactggtgttgcaggagctcaccgaaaaagatctcgtggagatgggcctgccttggggcccagcgctgcttatcaaacgctag

SEQ ID NO: 115418 - DNA, 4755 bp, Artificial Sequence
  derived and/or modified sequence
atgagcaagcaggtgtccctgcctgagatgatcaaggactggaccaaggagcacgtgaagaagtgggtgaatgaagacctgaagatcaatgagcagtatggccagatcctgctgtctgaggaggtgacaggcctggtgctgcaggagctgacagagaaggacctggtggagatgggcctgccctggggccctgccctgctgatcaagaggagctacaacaagctgaacagcaagagccctgagagtgacaaccacgaccccggccagctggacaacagcaagcccagcaagacagagcaccagaagaaccccaagcacaccaagaaggaggaggagaacagcatgagcagcaacattgattatgacccccgggagatccgggacatcaagcaggaggagagcatcctgatgaaggaaaatgtgctggatgaggtggccaatgccaagcacaagaagaagggcaagctgaagccagagcagctgacctgcatgccctacccctttgaccagttccatgacagccaccgctacatcgagcactacaccctgcagcctgagactggagccctgaacctgattgaccccatccacgagttcaaggccctgaccaacacagaaacagccacagaggtggacatcaagatgaagttcagcaatgaggtgttccgctttgccagcgcctgcatgaacagcaggaccaacggcaccatccactttggagtgaaggacaagccccacggggagatcgtgggcgtgaagatcaccagcaaggccgccttcatcgaccacttcaacgtgatgatcaagaagtactttgaggagagcgagatcaatgaggccaagaagtgcatccgggagcccaggtttgtggaggtgctgctgcagaacaacacccccagcgacagatttgtgattgaggtggacaccatccccaagcacagcatctgcaatgacaagtacttctacatccagatgcagatctgcaaggacaagatctggaagcagaaccagaacctgagcctgtttgtgcgggagggcgccagcagccgggacatcctggccaacagcaagcagagagatgtggacttcaaggccttcctgcagaacctgaagagcctggtggccagcaggaaggaggccgaggaggagtatggcatgaaggccatgaagaaggagagcgagggcctgaagctggtgaagctgctgattggcaacagagacagcctggacaacagctactatgactggtacatcctggtgaccaacaagtgccaccccaaccagatcaagcacctggacttcctgaaggagatcaagtggtttgctgtgctggagtttgatcctgagagcatgatcaatggagtggtgaaggcctacaaggagagccgggtggccaacctgcacttccccaaccagtatgaggacaagaccaccaacatgtgggagaagatcagcaccctgaacctgtaccagcagcccagctggatcttctgcaatggccgcagtgacctgaagtctgagacctacaagcccctggagccccacctgtggcagcgggagcgggccagcgaggtgaggaagctgatcctcttcctgacagatgagaacatcatgacccggggcaagttcctggtggtgttcctgctgctgagctctgtggagagccctggggaccccctgattgagaccttctgggccttctaccaggccctgaagggcatggagaacatgctgtgcatctctgtgaacagccacatctaccagcgctggaaggacctgctgcagaccaggatgaagatggaggatgagctgaccaaccacagcatcagcaccctgaacatcgagctggtgaacagcaccatcctgaagctgaagtctgtgaccaggagcagccgccgcttcctgcctgcccggggcagcagcagcgtcatcctggagaagaagaaggaggatgtgctgacagccctggagatcctgtgtgaaaatgaatgtacagaaacagacatcgagaaggacaagagcaagttcctggagttcaagaagagcaaggaggagcacttctaccggggcggcaaggtgtcctggtggaacttctacttcagcagcgagaactacagcagtgactttgtgaagagggacagctatgagaagctgaaggacctgatccactgctgggccgagagccccaagcccatctttgccaagatcatcaacctgtaccaccaccctggctgcggcggcaccaccctggccatgcacgtgctgtgggacctgaagaagaacttccgctgtgctgtgctgaagaacaagaccacagactttgctgagattgctgagcaggtgatcaacctggtgacctaccgggccaagagccaccaggactacatccctgtgctgctgctggtggatgactttgaggagcaggagaatgtgtacttcctgcagaatgccatccacagcgtgctggccgagaaggacctgcgctatgagaagaccctggtgatcatcctgaactgcatgaggagcagaaatccagatgagagcgccaagctggccgacagcatcgccctgaactaccagctgagcagcaaggagcagagggcctttggagccaagctgaaggagattgagaagcagcacaagaactgtgagaacttctacagcttcatgatcatgaagagcaactttgatgagacctacattgaaaatgtggtgaggaacatcctgaagggccaggatgtggacagcaaggaggcccagctgatctccttcctggccctgctgagcagctatgtgacagacagcaccatctctgtgtcccagtgtgagatcttcctgggcatcatctacaccagcaccccctgggagcctgagagcctggaggacaagatgggcacctacagcaccctgctgatcaagacagaggtggccgagtatggccgctacacaggagtgcgcatcatccaccccctcatcgccctgtactgcctgaaggagctggagaggagctaccacctggacaagtgccagatcgccctgaacatcctggaggagaacctcttctatgacagcggcatcggccgggacaagttccagcatgatgtgcagaccctgctgctgacccggcagaggaaggtgtatggagatgaaacagacaccctcttcagccccctgatggaggccctgcagaacaaggacatcgagaaggtgctgtctgctggcagccgccgcttcccccagaatgccttcatctgccaggccctggcccggcacttctacatcaaggagaaggacttcaacacagccctggactgggcccggcaggccaagatgaaggcccccaagaacagctacatcagtgacaccctgggccaggtgtacaagtctgagatcaagtggtggctggatggcaacaagaactgccgcagcatcaccgtgaatgacctgacccacctgctggaggccgctgagaaggccagccgggccttcaaggagagccagaggcagacagacagcaagaactatgaaacagagaactggagcccccagaagagccagaggagatatgacatgtacaacacagcctgcttcctgggggagattgaggtgggcctgtacaccatccagatcctgcagctgacccccttcttccacaaggaaaatgagctgagcaagaagcacatggtgcagttcctgagcggcaagtggaccatccccccagaccccagaaatgaatgctacctggccctgagcaagttcaccagccacctgaagaacctgcagagcgacctgaagcgctgctttgacttcttcatcgactacatggtgctgctgaagatgagatacacccagaaggagattgctgagatcatgctgagcaagaaggtgagccgctgcttcaggaagtacacagagctgttctgccacctggacccctgcctgctgcagagcaaggagagccagctgctgcaggaggagaactgcaggaagaagctggaggccctgcgggctgacagatttgctggcctgctggagtacctgaaccccaactacaaggatgccaccaccatggagagcatcgtgaatgaatatgccttcctgctgcagcagaacagcaagaagcccatgaccaatgagaagcagaacagcatcctggccaacatcatcctgagctgcctgaagcccaacagcaagctgatccagcccctgaccaccctgaagaagcagctgcgggaggtgctgcagtttgtgggcctgagccaccagtacccaggcccctacttcctggcctgcctgctcttctggccagagaaccaggagctggaccaggacagcaagctgattgagaagtatgtgagcagcctgaacagaagcttccggggccagtacaagaggatgtgccgcagcaagcaggccagcaccctcttctacctgggcaagaggaagggcctgaacagcatcgtgcacaaggccaagattgagcagtactttgacaaggcccagaacaccaacagcctgtggcacagcggagatgtgtggaagaagaatgaggtgaaggacctgctgcggcggctgaccggccaggccgagggcaagctgatctctgtggagtatggaacagaggagaagatcaagatccctgtgatctctgtgtacagcggccccctgcggagcggcaggaacatcgagcgggtgtccttctacctgggcttcagcattgagggccccctggcctatgacattgaagtcatctag

SEQ ID NO: 115419 - DNA, 1221 bp, Artificial Sequence
  derived and/or modified sequence
atgagcaagcaggtgtccctgcctgagatgatcaaggactggaccaaggagcacgtgaagaagtgggtgaatgaagacctgaagatcaatgagcagtatggccagatcctgctgtctgaggaggtgacaggcctggtgctgcaggagctgacagagaaggacctggtggagatgggcctgccctggggccctgccctgctgatcaagaggagctacaacaagctgaacagcaagagccctgagagtgacaaccacgaccccggccagctggacaacagcaagcccagcaagacagagcaccagaagaaccccaagcacaccaagaaggaggaggagaacagcatgagcagcaacattgattatgacccccgggagatccgggacatcaagcaggaggagagcatcctgatgaaggaaaatgtgctggatgaggtggccaatgccaagcacaagaagaagctggaggccctgcgggctgacagatttgctggcctgctggagtacctgaaccccaactacaaggatgccaccaccatggagagcatcgtgaatgaatatgccttcctgctgcagcagaacagcaagaagcccatgaccaatgagaagcagaacagcatcctggccaacatcatcctgagctgcctgaagcccaacagcaagctgatccagcccctgaccaccctgaagaagcagctgcgggaggtgctgcagtttgtgggcctgagccaccagtacccaggcccctacttcctggcctgcctgctcttctggccagagaaccaggagctggaccaggacagcaagctgattgagaagtatgtgagcagcctgaacagaagcttccggggccagtacaagaggatgtgccgcagcaagcaggccagcaccctcttctacctgggcaagaggaagggcctgaacagcatcgtgcacaaggccaagattgagcagtactttgacaaggcccagaacaccaacagcctgtggcacagcggagatgtgtggaagaagaatgaggtgaaggacctgctgcggcggctgaccggccaggccgagggcaagctgatctctgtggagtatggaacagaggagaagatcaagatccctgtgatctctgtgtacagcggccccctgcggagcggcaggaacatcgagcgggtgtccttctacctgggcttcagcattgagggccccctggcctatgacattgaagtcatctag

SEQ ID NO: 115420 - DNA, 213 bp, Artificial Sequence
  derived and/or modified sequence
atgagcaagcaggtgtccctgcctgagatgatcaaggactggaccaaggagcacgtgaagaagtgggtgaatgaagacctgaagatcaatgagcagtatggccagatcctgctgtctgaggaggtgacaggcctggtgctgcaggagctgacagagaaggacctggtggagatgggcctgccctggggccctgccctgctgatcaagaggtag

SEQ ID NO: 115421 - DNA, 4755 bp, Artificial Sequence
  derived and/or modified sequence
atgagcaagcaggtgagcctgcccgagatgatcaaggactggaccaaggagcacgtgaagaaatgggtcaatgaggatctcaagatcaacgagcagtacgggcaaatacttctttccgaggaagtgacgggcctggtgctgcaggagctaacagagaaggaccttgtggaaatgggcctgccgtggggccctgccctgctaattaagcggtcatacaacaagctgaactcaaaatctcccgaatcagacaatcacgatcccgggcaattggacaacagcaaacccagcaaaacagaacaccagaagaatccaaaacacaccaagaaagaggaggaaaatagcatgtcaagtaacattgattacgacccaagagagatacgggatattaagcaagaagagagtatcctgatgaaggaaaacgtcctggatgaggtagctaacgctaaacacaaaaaaaaaggcaagctgaaaccggagcagttaacttgtatgccgtatccattcgatcaattccatgactcacatagatacatcgaacattacaccctgcagccagagaccggggcattgaatctcatagatccaatccacgagttcaaagccctcactaataccgagaccgcaacagaagtggacattaagatgaaattcagtaatgaggtgtttaggtttgcaagcgcatgcatgaactctagaacaaatggcacaattcatttcggcgttaaggacaagccccacggggagattgtcggtgtgaagatcacatccaaagctgcgtttatcgaccattttaacgtgatgatcaaaaaatatttcgaagagtccgagatcaatgaggccaagaagtgcataagggagcctcgctttgttgaggtgctcctacaaaataacacacctagcgacagattcgtcattgaggtggatactatacccaagcacagtatttgcaacgacaagtatttctacattcagatgcagatttgtaaagataagatctggaagcagaatcaaaacctctcattgttcgtccgggaaggcgcctccagtcgggacatcttggccaacagtaaacagagggacgtagatttcaaagcctttttacagaaccttaagagtctagtggccagccgaaaggaggcggaggaggaatacggaatgaaagccatgaagaaagagtccgaaggacttaagttggtgaagctcttaatcggtaatcgggacagcttggacaatagctattacgactggtatatcctcgtgaccaacaaatgtcaccccaaccagatcaagcatctggattttctgaaggaaataaagtggttcgccgtgttagagtttgatcctgaatcgatgattaatggtgtcgtgaaggcctataaggagagtagggtcgccaatttgcattttcccaatcagtacgaggataagacgaccaacatgtgggagaaaatttctaccctgaacctctaccagcaaccttcttggattttttgcaacgggcggtcagatctgaagtcagaaacctataagccactggagcctcacttatggcaaagagagagagcatctgaggtccggaaactcattctctttctcactgatgaaaacatcatgactaggggaaagttcctggtggtgttcctgttgctgtctagtgtggagagtccaggtgacccactcattgagactttttgggctttttaccaggcacttaaaggcatggagaacatgctgtgcataagtgtgaacagtcatatctaccagcggtggaaggatctgctacagacgagaatgaagatggaggatgagttaacaaaccacagtatatctaccctaaatatagagcttgtgaactccacgatactgaagctcaaaagtgttaccaggagttctagacgctttcttcctgcacgtggaagctcatcagtgatccttgaaaaaaaaaaagaggacgtgttgactgctctggaaatcttgtgcgagaacgaatgtacagaaacggatatagaaaaggacaagagtaaattcctggagttcaaaaagtccaaggaagagcatttttacaggggtggtaaggtctcctggtggaatttctactttagttccgaaaactacagttctgacttcgttaaacgggattcgtacgagaagcttaaggacctcatccactgttgggctgaaagtccgaaaccaattttcgccaaaatcatcaatttgtaccatcaccctgggtgcggcggcacaacccttgctatgcacgtgctctgggatttgaagaaaaacttcagatgtgcagtattgaagaacaaaacaaccgactttgcggaaatcgccgagcaggttataaacctggtaacctatcgggccaagagtcatcaggattatattccagttttgctgctagtggatgactttgaggaacaagaaaacgtgtattttctccagaacgctatccatagcgtgttggctgagaaggatcttagatacgagaagaccttggtgattatcctcaactgtatgcggtctaggaaccctgatgagagtgctaagctggcagactccattgcactgaactatcaacttagctccaaggagcagcgggcatttggtgctaaactgaaagaaatcgaaaagcagcataaaaactgtgaaaatttttactcatttatgattatgaaatccaacttcgacgagacatacatcgagaacgtggtccgaaacattctgaaaggccaagatgttgactcaaaagaggcccagttaatcagttttctagctttactctcttcttacgttacagatagtactatctctgtgtcccaatgtgagatttttttgggaataatctacacaagcaccccttgggaaccagaatcactcgaagataaaatggggacttactcaacactgctcattaagactgaagtcgccgagtacgggaggtacaccggggttcgcattatccaccctttgattgccttgtattgcctgaaagagctcgagcgttcgtaccacctggataaatgccagattgctcttaacattctggaggaaaatttgttttacgacagtgggatcgggcgcgacaagttccagcacgatgtgcagacattgctgctgactaggcaacgcaaagtgtacggagatgagacagacacgcttttctcacctctcatggaagcactccagaacaaagatatagagaaggtattatccgctgggtcccggagatttccacagaacgcttttatctgccaagctctggctcggcatttctacatcaaggagaaggactttaataccgctctcgactgggcaaggcaggcaaaaatgaaagcacctaaaaatagctacatttctgacacattgggtcaagtctacaaatccgaaatcaagtggtggcttgacggtaacaaaaactgcagatctattaccgttaacgaccttacccaccttctggaagctgctgagaaagccagtagggccttcaaagaatctcagagacagactgatagcaagaactatgagacggaaaactggtctccgcaaaaaagccaaagacgctatgatatgtacaatacagcttgttttttgggcgagattgaggtaggcctgtataccatccagattctccagctgacgccgttctttcacaaggagaatgagctgtccaaaaagcatatggtccagttcctgtcagggaagtggactatacccccagaccctcgcaacgaatgttatttggcattgagcaaatttacatcccacctaaaaaacctccagtcagatctgaaaaggtgctttgacttcttcatcgactacatggtgcttctgaaaatgagatacactcagaaagaaatcgcagagattatgctttctaaaaaggtgtcccgatgttttcgcaaatacacagagctgttttgccatttggatccctgcctgcttcagagcaaggagtcccagctgctccaggaggagaactgccggaagaagctcgaagcattgcgagctgacagattcgctgggttgcttgaatatttgaatcctaactataaggacgctacaaccatggagtccatcgtcaatgagtacgcttttctgctccagcaaaactcaaaaaaacctatgacaaacgagaagcaaaacagtatccttgccaatatcatcctgtcgtgcttaaaacccaactctaagctcatacaacctttgacaacattaaaaaagcagctgcgggaagtactccagtttgtcggcttatcccaccagtatcccgggccttacttcttggcttgtcttctcttctggcctgagaatcaggagctggatcaggacagtaagcttattgagaaatacgtgtccagcctcaatcggagcttcaggggacagtacaagcgtatgtgccggtccaagcaggcatcaaccctgttttacctcgggaaacggaaggggctgaactcgatcgtgcacaaagcaaagattgagcagtactttgataaggcccagaataccaatagcctgtggcactctggtgacgtctggaaaaagaacgaagtcaaagacctgctgcggaggctcactggtcaggctgagggcaagctgatttctgtagagtacggcaccgaagaaaagatcaagattccagtgatttcagtgtattcaggcccccttcggtctggacgcaatatcgaacgcgtgtccttttatctgggcttttcaatcgaggggccccttgcatatgatatcgaggtaatatag

SEQ ID NO: 115422 - DNA, 1221 bp, Artificial Sequence
  derived and/or modified sequence
atgagcaagcaggtgagcctgcccgagatgatcaaggactggaccaaggagcacgttaagaagtgggtgaacgaggacctgaagatcaatgaacagtatggtcaaatcctactgtcggaggaggttacaggcctggtccttcaggaattgactgagaaggatctcgtcgagatgggattgccatggggacccgctctacttattaagcggtcttacaacaagctgaattcgaaaagccccgagtctgacaaccatgaccccggacagctggacaattccaagcccagcaaaactgagcaccagaagaacccaaaacacaccaaaaaggaagaagagaattccatgtcctctaacatcgattatgacccaagggagatacgagatattaaacaggaagagtcaatcttgatgaaagagaacgttctggatgaagtggccaacgctaagcataagaagaagctggaggcgctcagggctgaccggttcgctggccttctggagtaccttaatcctaactataaagatgccacgacaatggagagcatcgttaacgagtacgcttttctgctccagcagaactctaaaaaacctatgactaacgagaaacagaattccatcctggccaatatcatcctctcttgcctgaaaccaaactccaagttaatccagcccttgactacgctcaagaaacagttgcgcgaggtgttgcagttcgtagggcttagccatcagtatcccggaccttatttcctggcttgtcttctgttctggcccgagaatcaggaactggaccaggacagcaaactgattgagaaatatgtgagttctttgaacaggagcttccgggggcagtacaaacggatgtgtagatcaaagcaagcctcgactctgttttatctcggtaaacgcaagggtttgaattcaattgtgcacaaggctaagattgagcaatactttgacaaggcccaaaatacaaacagcctttggcacagtggcgacgtgtggaagaaaaatgaagtgaaagatctcctgcgacggctcactggacaggccgagggcaagctgatcagcgtggaatacggcaccgaggagaaaatcaaaatacctgtgatttcagtctattccgggcccctgagatctgggcggaatatagagagagtgagcttttacctgggatttagcatcgaaggaccgttggcatatgatatcgaggtaatttag

SEQ ID NO: 115423 - DNA, 4755 bp, Artificial Sequence
  derived and/or modified sequence
atgagcaagcaggtgagcctgcccgagatgatcaaggactggaccaaagagcacgtcaagaagtgggtcaatgaggaccttaagattaacgagcagtatggccaaatcctcctgagcgaggaggttacaggcctcgttttgcaggaactgaccgagaaagatttagtcgaaatgggactcccatggggaccagctcttctaatcaaacgtagctataataaactcaattctaaaagccctgaatcggataaccacgatccggggcagctcgacaacagcaagccctctaagactgaacatcaaaagaatccgaaacacactaaaaaggaggaggagaacagcatgagctccaatattgattacgatcccagagaaatacgtgacattaagcaagaggaatcaattctgatgaaggagaatgttctcgatgaagtcgcaaacgcaaagcataagaagaagggaaagcttaagccagaacaacttacctgcatgccatacccatttgaccagtttcacgactctcaccggtatatagagcactacacattacagccagagacaggcgctcttaacctcatagaccctattcacgagttcaaggccctgacaaatactgagaccgctacagaagtggatattaagatgaaattcagcaatgaggtgttccgatttgcatcagcatgtatgaattctcggaccaacggcacaattcacttcggggtgaaagacaagccacatggggagatcgtgggggttaagatcacaagcaaggccgcctttatcgatcactttaatgttatgattaaaaagtactttgaggagtcggaaataaacgaagcaaagaaatgtattagagaacctcgctttgtggaggtattgctgcagaataacactccatctgatcggttcgtgatagaggtggacaccattcctaagcattctatttgcaatgacaagtatttctacatccagatgcaaatatgcaaagataagatttggaagcaaaatcagaatctctcgctgttcgtgagggaaggagctagtagtagggacattcttgccaattctaagcaacgggatgttgactttaaggcattccttcagaacctgaaaagcctggtggcatctcgcaaggaggcagaagaggagtacggcatgaaagccatgaagaaagagagcgaagggcttaagctcgtgaagctcctgattggaaaccgggatagtctggacaactcatattatgattggtacattttggtgaccaacaagtgccaccccaatcagattaaacacttggatttcttgaaagaaattaaatggtttgccgtgttggaatttgatcccgagtctatgataaatggtgttgtgaaggcttacaaggagagtcgtgttgccaacctgcacttccctaaccagtatgaggataaaacaactaacatgtgggaaaaaatttccactcttaatctttatcagcagccttcatggatattctgcaatggacggtctgatctcaaatccgagacctataaacccctggagccacacttgtggcaacgcgaacgagcatctgaggttcggaaactgatcttattcctcacagatgaaaacatcatgacacgggggaagttcttagtagttttccttctgctgagctccgttgagtctcctggcgatccgctgatcgagaccttttgggcgttctatcaggctctcaaggggatggagaatatgctgtgcatctctgtgaacagtcacatctaccagcgatggaaagatcttttacagaccagaatgaagatggaggacgaactaaccaaccactcaatctccactctgaacatcgagctcgtaaactctaccatcctcaagctcaagtcagtcacacgcagttcaagaagattcctgcccgctcgcgggagtagttccgtgattctggagaaaaagaaggaagacgtactgacggcgctggagattctgtgtgaaaacgaatgtactgagaccgacattgagaaggacaagagtaaatttctcgaattcaaaaagagtaaagaggaacatttttacagggggggaaaggtgtcctggtggaacttttatttttccagtgaaaattattcttctgacttcgttaaacgtgattcctatgagaagctaaaagacctgatccactgctgggccgagtccccaaagcccatttttgctaaaataattaacctgtatcaccatccgggctgcggcggtacgacccttgctatgcacgtcctgtgggatctaaaaaagaattttaggtgcgcggtcttgaagaacaagaccactgattttgccgagattgcagagcaggttataaatctggtaacataccgagccaagtctcatcaagactacatccccgtgcttctgttggttgacgactttgaggaacaggaaaatgtgtatttcctgcagaatgcaattcactcagtacttgctgagaaggacctccgctatgagaaaactttggtaatcatattgaactgcatgcgctcgcgcaaccctgacgagtcggcaaagctggcagattcaatcgcactgaactaccagcttagctctaaggaacagagagccttcggcgccaaactgaaggagatcgagaaacagcacaagaactgcgagaacttctactcattcatgatcatgaaatcaaactttgacgaaacatatatcgagaacgttgtaaggaacattctaaaaggccaagatgtggacagtaaagaagcccaactcatatcatttctcgccttgctgagcagttacgtgaccgattccacgataagtgtgagtcagtgtgagatctttttgggcatcatctacactagcacaccctgggaacctgaatcccttgaagataagatggggacctattcgacactgttgatcaagaccgaagtggcagaatacgggcgttacactggcgttagaattatccatcctctgattgcgctgtattgcctgaaggagttggaacggagttaccacctggataagtgccagattgctctcaacatcctggaggagaacctattttacgactctggcatcgggcgtgataagtttcaacacgatgtgcaaaccctcctgctgactcgtcaaaggaaagtttacggcgacgagacagacactctgtttagtcctctgatggaagccctgcagaataaagatatagaaaaagtgctcagcgctggcagtcgacggtttccccagaatgccttcatctgccaggccctggcgaggcacttttacatcaaagagaaagacttcaacaccgcactggattgggcccgccaagcaaagatgaaggcaccaaaaaattcttatatcagtgacacactggggcaggtatacaagtccgaaataaaatggtggctagatggcaataagaattgtcgcagcattactgtgaacgacctgactcatctgttggaggcagccgaaaaggcgtcacgggccttcaaagagagccagcggcaaacggatagtaagaattacgagactgagaactggagcccccaaaaatcccaaaggcgctacgatatgtataacaccgcttgtttcctgggagagattgaggtgggtctgtacacaatacagatcctccaacttacgccattctttcacaaggaaaacgagctgtctaaaaagcacatggtgcagttcctcagtgggaagtggaccattccaccagatcctagaaatgagtgctatctggccctgagcaagttcacttcccatctgaaaaatctccaaagcgacctcaaacgctgtttcgacttcttcatagactatatggtgctgctcaagatgcgatatacccagaaggaaattgccgaaatcatgctgagtaaaaaagtgagccgttgcttcagaaagtatacagagctcttctgtcatctggacccttgtctccttcagagcaaggaaagccaactgctccaggaggagaattgtaggaagaagttggaggcccttcgagcagatcggtttgccggactcttggaatacttaaaccctaactacaaagacgctacaaccatggagtctattgtgaacgagtacgccttccttctgcaacagaactcaaagaagcccatgacgaacgaaaagcagaatagtatcctggccaatattatcctgtcttgcttaaaacccaatagcaaactcattcagcctctgactacccttaaaaagcaactaagggaggtgctacagtttgttggactgagccaccagtacccaggcccctatttcctggcttgtctgttattctggccagagaaccaggagctggatcaggattctaagctaatcgagaaatatgtttcctccctgaatcgatcgttcagaggacagtacaagcggatgtgccggagcaaacaggcttccaccttgttttacctgggcaaacgcaagggcttgaactccattgttcacaaagccaagatcgagcagtacttcgacaaggctcagaacacaaactccctgtggcattccggagatgtgtggaagaagaacgaggttaaggatttgctgaggcgacttaccggacaggccgaaggcaaactcattagtgtcgaatacggcacagaagagaaaattaagatccccgtgatttccgtgtacagcgggccactccgaagcggtaggaatatagagcgcgtcagcttctatctgggattcagtattgagggacccttggcctatgacattgaagtgatctag

SEQ ID NO: 115424 - DNA, 213 bp, Artificial Sequence
  derived and/or modified sequence
atgagcaagcaggtgagcctgcccgagatgatcaaggactggaccaaggagcacgtcaaaaaatgggtgaacgaggatttgaagattaatgagcagtatggccagatccttctgagtgaggaggtcacaggacttgtcctgcaagagctcacagaaaaagatttagttgagatggggctaccctggggccctgctctgctcataaagcgctag

SEQ ID NO: 115425 - DNA, 4755 bp, Artificial Sequence
  derived and/or modified sequence
atgagcaagcaggtgagcctgcccgagatgatcaaggactggaccaaagagcacgtgaaaaagtgggtcaatgaggatctgaagataaatgagcaatatgggcagatccttctgtccgaagaggtcacaggactggtgttacaggagctcaccgagaaggacctggtggaaatgggtctgccttggggcccagcgttgctgatcaagcgcagttataataaacttaattcaaagtctccagagtccgacaatcatgaccctggccagctggataatagcaagccatcaaagacagaacatcagaaaaaccccaaacatacaaaaaaagaagaagaaaattccatgtcttcaaatattgattatgaccccagagagatccgcgacataaagcaggaggagtctatcctgatgaaggagaacgtgctggacgaagtggccaacgctaaacataagaagaaaggcaagctgaagcccgaacagctgacttgtatgccttatccattcgatcagttccacgacagccatagatatatcgagcactacaccctacagcccgaaacaggggcgctcaatttgattgatccgattcatgagtttaaggcacttacgaatacggaaactgccactgaggtcgacatcaagatgaaattttctaacgaagtttttcggtttgctagtgcttgtatgaactcccggaccaacggtactattcactttggtgtcaaagataaaccgcacggggagatcgtaggcgtgaaaatcaccagcaaggctgcattcatcgaccactttaacgtaatgattaaaaaatactttgaggagtcggaaatcaatgaggccaagaaatgcattagagaacctcggttcgtcgaggtgctgctccagaacaacactccaagcgacaggttcgtgattgaagtcgacacaatcccaaaacactcgatctgcaatgataaatacttttacatacagatgcagatctgtaaggacaagatctggaagcagaaccagaaccttagcctctttgtgagggaaggagccagctctcgcgacatcctggctaactctaagcagagggacgttgatttcaaggcatttctgcaaaaccttaaatccctggtggccagccggaaggaggctgaagaagagtacggcatgaaggccatgaaaaaggagagcgaaggcctgaagctggtgaagttactgatcgggaaccgcgattcattagacaacagctactacgactggtacatattggtgaccaataagtgtcatcccaatcagatcaagcacttagacttcttgaaggagataaaatggtttgctgtgctagaattcgaccctgaatcaatgatcaacggagtcgttaaagcctataaagagtctagagtcgccaacctccattttcctaatcaatacgaggacaagaccacgaatatgtgggagaagatctccaccctgaatctctaccagcagccttcgtggatattttgcaacggccgaagcgaccttaagagcgagacatacaaacccttagaaccccatctctggcaacgcgaacgcgcttccgaggtaagaaagctgattctgttccttaccgatgaaaatatcatgaccagaggcaaatttcttgtggtgttcctgcttctcagctccgtggaatctccaggggatcccctgatagagacattttgggcattctaccaggcactcaaggggatggagaacatgctctgcatctcagtaaattcccacatttatcagcgctggaaagacttgctccagactcgaatgaaaatggaggatgagctgacaaaccactccattagtacactgaatattgaacttgtaaattccaccattcttaaattgaagagcgtgactaggtcatcacgacggtttctccctgctcgcggatcctcttcagtcatacttgaaaaaaagaaagaagacgttctgaccgcactggagatattatgcgaaaacgaatgcacagagacagatatcgagaaggacaagagtaaattcctcgaatttaagaagtctaaggaagagcatttctaccgtggaggcaaggtgagctggtggaacttttacttttcttcagagaattattccagcgacttcgttaaacgcgactcctacgaaaagctgaaagacctgatccactgctgggctgagtctcctaagccaatcttcgctaaaattatcaatttataccaccatcccgggtgcggcggcaccaccctcgcaatgcatgtgctttgggatctcaagaagaactttcggtgtgccgtcctgaaaaataagactaccgatttcgccgagatcgccgagcaggtgattaatttagtcacctatcgcgccaagtcccaccaggactacatcccagttttgctgcttgtggatgactttgaagaacaggagaacgtctactttctgcagaatgccatccattctgtgctcgcagaaaaagatctgcgctatgaaaagacattggtcattattctcaattgcatgcgatctcgaaatccagatgagtcagctaagttggctgactccattgccctgaactaccagttgagcagtaaagagcagagagcatttggtgccaagctgaaggagatcgaaaaacaacataaaaactgtgagaatttttatagcttcatgatcatgaagagcaactttgacgaaacatacatagagaatgttgtgcggaacatcctgaagggtcaggacgtcgacagcaaagaggcccagttgatctcctttctcgccttgttatcctcttatgtgacggatagcacgataagcgtgtcccagtgtgagattttcctcggcatcatttacactagtaccccttgggagcctgaatccctcgaggataaaatgggtacctacagtaccctgctgatcaagacggaagtggccgaatatggtaggtatacaggagtgaggatcatccacccgctgatagccttatactgcctcaaggagctggaaagatcttatcacttggacaaatgtcaaattgccctgaatatactcgaggagaacttgttctacgattctggtatcggaagagacaagttccagcatgatgtgcagaccctactgcttaccaggcagagaaaagtgtacggggatgaaactgacactctgttttctccacttatggaagccctgcagaacaaggatatcgagaaagtactttcagccgggtctaggcgcttcccccagaatgctttcatttgtcaagctttggctagacacttttacataaaggagaaggacttcaatactgccttggactgggctcggcaggccaaaatgaaggctcccaagaactcttacatatccgatacgttagggcaggtctataagtccgagattaaatggtggctggatgggaataaaaattgtcgctccatcaccgtgaacgatctgacccacctcctggaggcagctgagaaggcttctagggcgttcaaggagagccaaagacagaccgacagcaaaaactatgagaccgagaactggtcgccccagaagtcccaacggagatatgacatgtataatactgcatgctttctgggagagatagaagtgggcctgtatactattcagatccttcagctgactccgttttttcataaggaaaatgagttgagtaaaaaacacatggtccagttcttgtcaggtaagtggaccataccaccggaccctcggaatgaatgctatctggccttgtcgaagtttacgtcacatctgaaaaacctccagtctgacctaaaaagatgctttgactttttcatcgactatatggttctgctcaaaatgcggtatactcagaaagagatcgccgaaataatgttgtccaaaaaggtatcacggtgttttagaaagtacacggaattgttttgccacctcgacccttgccttctccagagcaaggagagtcaacttcttcaggaagaaaactgccgcaagaagctcgaggcgctcagggcagacaggttcgcaggtcttttggagtacctcaacccgaactacaaggacgccaccaccatggagagcattgtgaacgagtacgcttttctactgcaacagaacagcaagaagcctatgactaatgagaaacagaattccatattggcaaatatcatcttatcctgcttaaaaccaaacagtaaactcatccaacccctcacaacactgaagaagcaacttcgggaagtgctccaattcgtgggcctgagtcaccagtaccctggtccatacttcttggcctgtctgctgttttggcccgagaatcaagagctggaccaggattcaaaacttatcgagaagtatgtgtcctcattgaatcgaagctttcgtggccagtacaagcgcatgtgtagatcaaaacaggcctcgacactgttctacctaggaaagcggaaaggtctcaatagcattgtgcataaggcaaagatcgagcagtacttcgacaaggcgcagaacactaattcactgtggcactctggagatgtgtggaagaagaacgaggtgaaagatctattgagacgtctgaccgggcaggcagagggaaagcttatctccgtggagtatggaacagaggaaaaaattaagattccagtaatcagcgtatattctggccccctcagatctggccggaacatagagcgggtttctttctacctcggcttcagcattgagggaccattggcctatgacatcgaggtcatatag

SEQ ID NO: 115426 - DNA, 213 bp, Artificial Sequence
  derived and/or modified sequence
atgagcaagcaggtgagcctgcccgagatgatcaaggactggaccaaggaacacgtgaagaaatgggttaacgaggacctcaaaataaatgaacagtacggccagattctcctcagcgaggaggtaactggactcgtgctgcaggagttgacagaaaaggatctggtggaaatgggcctaccttgggggccggcgctcctgattaagcgatag

SEQ ID NO: 115427 - DNA, 213 bp, Artificial Sequence
  derived and/or modified sequence
atgagcaagcaggtgagcctgcccgagatgatcaaggactggaccaaagaacatgttaaaaaatgggtgaacgaggacctgaagataaatgagcagtacgggcaaatcctcctgagcgaggaagtaacgggcttggtgcttcaagagctcactgaaaaggatttggtggaaatgggccttccgtgggggccagctctcttgatcaaacgctag

SEQ ID NO: 115428 - DNA, 213 bp, Artificial Sequence
  derived and/or modified sequence
atgagcaagcaggtgagcctgcccgagatgatcaaggactggaccaaggagcacgttaagaagtgggtaaacgaggatctgaagattaacgagcaatacggtcagatcctgcttagcgaggaggtcactggattggtcctccaagaactcacagagaaagacctggtagaaatgggccttccttgggggcctgccctactcattaagcgatag

SEQ ID NO: 115429 - DNA, 4755 bp, Artificial Sequence
  derived and/or modified sequence
atgagtaagcaggtttctctgcctgaaatgatcaaagattggaccaaggagcatgtcaagaaatgggtgaacgaggaccttaagattaatgagcagtacggtcaaatcctcctgtcggaggaagtgaccggcctggtgctgcaggagctgaccgaaaaggacttggttgagatgggcctgccttgggggcctgcgctgctcataaagcgcagctataacaagttgaactccaagtcacctgagtccgacaaccacgaccccggtcagctggataatagcaagccctctaagacagaacatcagaagaatcccaagcacaccaaaaaagaggaggagaactccatgagcagcaacattgactatgaccctcgggaaattcgtgatattaagcaagaggagtctattttgatgaaagagaacgtgctcgatgaggtcgcaaacgctaagcacaaaaaaaagggcaaactgaaaccagagcagctaacctgtatgccttatccttttgatcagtttcacgatagccaccgttacattgagcactacacactacagcccgagaccggagcgctgaatttaattgaccctatccacgaattcaaggcactcactaacaccgagaccgcgaccgaggtggatataaaaatgaagttttcgaacgaggtctttaggttcgcctccgcctgcatgaactctcgtacaaatgggacaatacatttcggcgtcaaagacaagccccacggggagattgtcggcgtgaagatcacttccaaggctgcattcatagatcattttaacgtcatgatcaaaaaatatttcgaggaaagtgagattaatgaagcgaagaagtgtataagggagcctcgcttcgtagaggtgctgctacaaaacaacacccctagcgatagatttgtgatcgaagtagatactatcccgaaacatagcatttgtaacgataaatatttctacatccaaatgcaaatatgcaaggacaaaatctggaagcaaaatcagaatctgtcactgttcgttcgcgaaggagcatcatcgagagatattttggccaactccaaacagcgagatgtcgattttaaggcctttctgcaaaatctgaagtcgctcgtcgccagtcgcaaagaggccgaagaggagtacggcatgaaagccatgaagaaggaaagtgagggtctgaaattagtaaagctgctcatcggaaatcgtgattccttggacaacagttactacgactggtacatccttgtgacaaacaagtgtcacccgaaccagatcaagcacctggatttcctaaaagagatcaaatggtttgccgtgctggaattcgaccctgagtcgatgattaacggggtggtgaaggcttacaaagagagtagagtggctaacctgcattttcccaatcagtacgaagacaagaccacgaacatgtgggagaagatctccactctaaatctgtatcagcagccctcgtggatattctgtaacggcaggagcgaccttaagagtgagacctataagccactcgagcctcacctgtggcagagagagcgcgcaagcgaagtgcggaagctgatattgtttctgactgatgaaaatataatgacaagggggaagttcttggtcgtcttcctgttgctgagttctgttgaaagccccggtgaccctctcattgagactttctgggctttctaccaggctctgaagggtatggagaatatgctttgtatctctgtcaatagccacatatatcagaggtggaaagatctcttgcagactcgcatgaaaatggaagatgaactgacaaatcacagcatttccactctgaacatcgaactggtgaacagcacaatcctcaagctgaagtctgtcacgcggagtagtaggcggtttctacccgctcgcggttcatccagtgtcatcctcgaaaaaaagaaggaggatgtacttaccgccctggaaattttgtgcgagaatgagtgtacagagaccgacattgaaaaggataagtctaagttcctcgaattcaagaagtcaaaggaagaacatttctatcgtggtgggaaagtgtcctggtggaatttctatttctccagcgaaaactattcatctgattttgtgaaaagggattcatacgagaagctgaaggacctgatacactgttgggcagaaagcccaaaacccattttcgcaaaaattatcaatctctaccaccaccctggctgtggcggaacgaccctggccatgcatgttctctgggacctgaagaagaattttcgctgtgcggtcctcaaaaataagaccacagattttgctgagatcgccgaacaagtgattaatctggttacataccgggctaagtctcatcaggattacatccctgttttattgctggtggacgattttgaagaacaagaaaacgtgtactttctgcagaacgcgatccattccgttcttgccgagaaggatctcagatacgagaagacgctggtgatcatcctgaattgtatgagatcacgcaacccagacgaatcagctaaactagcagattccattgccctcaattatcaactgagctctaaggaacagcgggctttcggcgcaaaactcaaagagatcgagaagcagcataagaattgtgagaatttttatagtttcatgataatgaagagcaacttcgatgagacctacatcgaaaatgttgtgagaaacatcctgaaaggccaggatgtggattctaaggaggcacagttgatatccttcctggcattattatcgagttacgttaccgactccaccatatctgttagccagtgtgaaatttttctgggtattatttacacttctactccctgggagcctgagagcctcgaagataaaatggggacctatagcaccctgctgattaagaccgaggtggcagaatacggacgttacacaggagtcagaatcattcaccccctcattgctctgtactgtctgaaggaacttgagaggagctatcatcttgataagtgtcagattgccctcaatatcttggaggaaaacttgttctatgattccggtataggaagagataagtttcaacatgacgtgcagacgctcctgttaaccagacaaagaaaggtctacggtgacgagacagatacgctgttctcccctctcatggaggctctccagaacaaagatattgagaaggtattgtctgcgggatccagaagatttccacagaacgcctttatctgccaggccctggcgaggcacttctacattaaagagaaggactttaacaccgctcttgactgggccagacaggcaaaaatgaaggcccctaagaacagttacatcagcgatacacttggccaagtctacaaaagcgaaattaaatggtggttagacggaaataaaaattgtcgctccatcactgtgaacgacttgacacacctacttgaagccgcagaaaaggcttcacgagcctttaaggagagccagcggcagactgatagtaagaactacgagactgagaattggagccctcaaaaatcccagcgccgttatgacatgtacaatacggcgtgctttcttggcgagatcgaggtgggattatatacgatccaaattctccagctgaccccattttttcacaaggagaacgagttgagcaaaaagcacatggtacagttcctttccggaaagtggactatcccacccgaccccagaaacgagtgttatcttgcccttagtaagttcacctctcacctgaagaatctccagtctgatcttaagcgatgctttgactttttcatcgattatatggtgctgctgaaaatgcgctacacccagaaggagatagctgagatcatgcttagtaaaaaggtttctcgatgttttcggaagtacaccgaattattttgccacctggacccatgcctcctgcagtcgaaggagagtcagctgcttcaagaagaaaattgtcgcaaaaagctagaggcacttagagccgatagattcgccggattgctcgaatacctgaaccccaattataaagacgcgaccactatggaatctattgtcaacgagtacgctttcctgctgcagcagaactctaaaaaacccatgacaaatgaaaaacaaaatagtattctggccaatattatcctgtcatgtttaaagcccaacagtaagctcatccagcctctcactaccctgaaaaagcagctgagagaagtgcttcagtttgtgggcctatcacaccagtacccgggtccatacttcttggcatgcctgttgttttggccagagaatcaggagttggaccaagattctaaattaattgagaaatatgtcagctctctgaaccgcagctttaggggtcagtacaagcgaatgtgtcggagcaaacaagcgtcgaccctgttctatctgggaaagcgcaagggtctgaacagtatagtgcacaaagctaaaattgaacagtactttgataaggcgcagaacacaaattccctctggcattccggcgatgtctggaagaaaaatgaagtaaaagatttgctgcggagactgaccggccaggccgagggaaagctaatcagtgttgaatacggaactgaagagaaaatcaaaatccccgtgattagcgtgtacagcgggccactgaggtctggcagaaacattgaaagagtttctttctatttaggcttcagcattgaaggccctctggcatatgacattgaggtgatctag

SEQ ID NO: 115430 - DNA, 1221 bp, Artificial Sequence
  derived and/or modified sequence
atgtcaaaacaggtgtccctgccagaaatgataaaggattggaccaaggagcatgttaaaaagtgggtgaacgaagatttgaaaataaatgaacagtacggacaaattcttctgtctgaagaagtgaccggcctcgtgctgcaggaactcacagaaaaggacctcgtggaaatggggctcccatggggtcctgctctgctgatcaaacggagctacaataagctgaactcaaaatcgccagagtccgacaaccacgatccagggcagctcgacaactctaaaccctccaagacagagcaccagaaaaaccctaagcataccaagaaagaggaagagaattctatgtcttcaaatatcgattacgacccacgggaaatccgagacattaaacaggaggaatcaatccttatgaaggaaaacgttttggacgaagtagccaacgccaagcacaagaagaagctggaggccctgagggccgatcgcttcgccggtttactcgaatacctcaatccaaactataaggacgccactacaatggagtcaattgtcaacgagtacgccttcctgcttcagcagaactccaaaaagccaatgacaaatgaaaagcagaattccattctagcaaacatcatcctgtcatgtctcaagcccaattcaaagttaattcagcctcttactaccctgaaaaaacagctgcgtgaggtcctccagtttgtcggattgagccaccaatacccaggaccatactttttagcttgtttgctgttttggccagagaaccaggaactggaccaggacagtaagctgattgagaagtacgtatcgtcactgaatagatcattcagggggcagtataaacgcatgtgcaggagtaagcaggcgagcactctcttttatcttggcaagcgaaagggtctgaatagtatcgtgcataaagcaaagattgagcaatattttgacaaagcgcaaaacaccaactctctgtggcacagcggggacgtgtggaagaaaaatgaagttaaggacctccttagacggcttactgggcaggcagaggggaagctcatatccgtggaatacgggacagaggaaaaaattaagataccggtgatttctgtctacagcggccctctccgaagcgggcgtaatatagaaagggtctcattctacctgggattttcaatcgagggcccactggcctatgacatcgaggtcatatag

SEQ ID NO: 115431 - DNA, 4755 bp, Artificial Sequence
  derived and/or modified sequence
atgagtaagcaggtttcattgccagagatgatcaaagattggactaaggaacacgttaagaagtgggtaaacgaagatcttaagattaatgagcagtatggccagattttattgagcgaggaggttacaggcctggtcctacaggagttaacggaaaaagaccttgtggagatgggacttccatgggggccagctctgctcattaagcggtcctacaataaactgaattctaagtcgcccgagagtgataaccatgatccgggacagctggacaacagcaaaccatctaaaaccgaacatcagaaaaaccctaagcacaccaagaaagaagaggagaacagtatgtcttctaacatcgattacgaccctcgagagatcagagatatcaaacaggaggagagcatcttgatgaaagagaatgttcttgacgaggtggcgaacgcaaaacacaagaaaaaggggaagcttaaacctgagcaattgacatgcatgccttaccccttcgatcagttccacgactcacatcggtatattgagcattatactttgcaacccgagactggggctctgaaccttatagacccaatccatgagttcaaggcgctgaccaacaccgagactgccaccgaagtggacattaaaatgaaattcagcaacgaagtcttccggttcgcctctgcctgtatgaatagcagaaccaatggaacgatacacttcggcgtcaaggataagccccatggcgaaatcgtaggcgtgaagatcacctccaaagcagcctttattgaccattttaatgtaatgatcaaaaagtactttgaggaaagcgaaatcaatgaggctaagaaatgcatccgcgaacctcgcttcgtcgaagtcctgttacagaataacacaccctccgaccggtttgtcattgaagtagacacaattcctaaacattccatatgcaacgacaaatacttctatatacagatgcagatctgcaaagacaagatttggaagcaaaaccaaaacttgtcactgttcgtgcgggaaggcgcatcaagtcgcgacatcttagcgaactcaaagcaacgcgatgtcgacttcaaagcttttcttcagaacctcaagtctctggtagcttctagaaaggaggccgaagaggagtatgggatgaaagcaatgaagaaggaatccgagggcctaaagctcgtcaagttactgataggaaatcgggactccctggataatagttattatgattggtacatcctggtcaccaacaaatgccatcccaaccagatcaagcacctggactttctgaaagaaataaagtggtttgccgtgctggaattcgatcctgagagtatgattaacggcgtggtcaaagcatacaaggagtcccgcgttgcaaacttacacttccctaaccagtacgaagataagactactaacatgtgggaaaagatctccacgttgaatctgtatcaacagccgtcatggatattctgcaatggtagaagcgatttgaaaagcgagacctacaaaccattggagcctcacttgtggcaacgcgagagggcctccgaagtcaggaagctgatactgttcctgaccgacgagaacatcatgacccggggaaaatttctcgtggtttttttgttactgagttccgtggagtccccgggtgatcctctgatcgaaacattttgggcgttctatcaagcccttaaggggatggagaatatgttatgcatcagcgtcaactctcacatctatcagcgctggaaggacctgctacagacacgtatgaagatggaagatgaactgacaaatcacagcatctcaactttgaatatcgaactcgtcaactcaaccatcctcaaactcaaaagtgtcaccaggagttctcgaagatttctgcccgcaagaggctcctcctctgtgatactggagaagaagaaggaggatgtattgaccgcgctagagatcctttgcgagaacgaatgtacagagacagacatcgaaaaggataagtccaagtttctcgaatttaaaaagtctaaagaagagcacttttatcgcggtggcaaagtgagctggtggaacttctacttttcgtcagagaactactccagcgatttcgtgaaacgggactcctatgagaaactcaaggatctgatccattgttgggctgaaagtccaaagccaatttttgcaaagataataaacctgtaccaccaccccggttgcggtggtaccaccttagcaatgcacgtgttgtgggatctcaagaagaattttaggtgcgccgtgctgaagaacaaaactacagattttgccgaaatcgcagagcaggtcataaacctggtaacttacagagctaagtcacaccaggattacattccagtgctgcttctggtcgacgattttgaggaacaggagaacgtgtacttcttgcagaacgcaatacactcagttttggccgagaaggacctgaggtatgagaagaccttggtcatcatactgaattgtatgaggagccggaatccggatgagagcgctaaacttgccgactccatagcgctgaactatcaactcagcagtaaagagcagagagcattcggcgctaagctgaaggagatcgagaaacaacataagaattgcgagaatttctattctttcatgataatgaaatctaactttgatgaaacatatattgagaatgtggtccgaaatattctgaagggacaggacgtggacagcaaggaagcacagctgatctcctttctggccctgctgtcttcatatgtgacggactctaccatctcggtttcccaatgcgagattttcctggggattatctatactagcacaccctgggagcctgaatccctcgaggataaaatggggacctacagtactttgctgattaagaccgaagtggccgagtacggcaggtacactggcgtcaggatcatccacccactcattgcgctgtactgcttgaaagaactggaacggtcctatcacctggacaagtgccagattgctcttaacattctggaagagaacctcttctacgactcaggaatcggcagggataagttccagcacgacgtgcagaccttgttgctaacccgccaacgcaaagtatacggggacgaaaccgacaccttgttcagccccctgatggaagctctgcagaacaaagatatcgaaaaggttctgtccgccggtagtaggaggtttcctcagaacgcctttatttgccaagcccttgctagacacttttacataaaagaaaaagactttaatacagccctggactgggcgagacaggctaagatgaaagccccaaaaaactcttacatcagcgatactctgggacaagtctacaaatccgagataaaatggtggcttgacgggaataagaactgccggtccataacggtcaatgacctgactcacctgctagaggctgctgaaaaggctagccgggcttttaaggaaagtcagcgacagacagacagcaaaaactatgaaaccgagaattggtcaccacagaaatcgcagcggcgatatgatatgtacaacacagcatgcttccttggagagattgaggtggggctctataccatccaaatcctgcagttgacaccttttttccacaaagagaatgaacttagcaagaagcacatggtacagttcttatctggcaaatggacaattcccccagaccctcggaacgaatgttatctcgccctctctaagttcacctctcacctcaagaacctacagagcgatcttaaaaggtgttttgacttcttcatcgactacatggtacttctaaaaatgaggtatacgcagaaagagatcgctgagatcatgctctctaagaaagtgtctagatgttttaggaaatacacggaactattttgccatctggatccttgcctgcttcagagcaaagaatctcagctcctccaagaagagaattgccgcaagaaactggaggccttgcgcgctgatagattcgccggactcctggagtacttgaaccctaactataaggacgccaccacgatggaatccattgtgaatgaatatgccttccttttgcagcaaaattcaaaaaagccgatgaccaacgagaagcagaactcgatccttgctaatattattctttcctgtctgaagccaaactcaaaactgattcagcctctgacaactctgaaaaagcagctaagagaggttctccagtttgttggactgtcacaccagtaccctggtccttactttctagcctgccttttattctggccggagaaccaagagctggaccaagactccaaactgatcgagaagtacgtgagttcgctaaatcgctcatttcggggacaatataagaggatgtgcaggagcaagcaggcatcaaccctcttttatcttgggaagcgcaaaggtttgaactctattgtgcacaaggcaaagattgagcaatacttcgataaggcacagaacaccaactcactgtggcactcaggagacgtgtggaagaaaaacgaagtgaaggacctacttaggagattgacaggtcaggctgagggtaagttgatttcagtggagtatggcaccgaggagaagatcaagattcctgtgatatccgtctattccggaccactgcgatccggtagaaacatcgagcgcgtgtccttctacctgggtttttcgattgaagggcctctggcatacgacatagaggtgatatag

SEQ ID NO: 115432 - DNA, 213 bp, Artificial Sequence
  derived and/or modified sequence
atgtctaagcaggtctccctcccggagatgatcaaggattggaccaaggagcacgtgaagaagtgggttaatgaggacctgaaaatcaacgaacagtacggacagatactcctgtccgaagaggtgaccggactggtcctgcaggaactaacagagaaagacctggtcgaaatgggactgccatgggggcctgcactcctgatcaagcggtag

SEQ ID NO: 115433 - DNA, 4755 bp, Artificial Sequence
  derived and/or modified sequence
atgtccaagcaagtctccttaccagaaatgataaaggattggaccaaggaacacgtcaagaaatgggtgaatgaggatctgaagataaatgagcagtacggacaaatccttctgtccgaggaagtgacaggcctcgtcctccaggagctgactgagaaggatctagtagagatgggcttgccctggggacccgcactgctgataaagaggtcttataataagctgaattctaaatctccagagagcgacaatcatgaccctggacaattggataattccaagccttctaagaccgaacatcaaaaaaatcctaaacacacaaagaaggaagaggaaaactcaatgtcaagtaacattgactatgaccccagggaaattcgggacataaagcaggaagagtccatccttatgaaggagaacgttctcgatgaagtggccaatgccaaacataagaagaagggtaaattgaagcccgagcagctcacctgcatgccatatcccttcgaccaattccacgactcccaccgctacatcgagcattatacactgcagccggagacgggcgctctgaacctcatcgacccaattcacgaattcaaagccctaaccaatacagagacggccacagaagttgatatcaaaatgaagttttcaaacgaagtgtttagatttgccagcgcctgcatgaattcacggaccaacggtacgattcattttggcgtgaaggataaaccccacggcgaaatagttggggtgaagattacatccaaggctgccttcatcgaccattttaacgttatgatcaagaaatacttcgaagagagcgagataaatgaggccaagaaatgcattcgggagccaagatttgttgaggtccttctccaaaataacacgccttccgatcgcttcgtgattgaggttgacaccataccgaagcacagcatatgcaacgataaatacttctatattcagatgcagatttgcaaggataagatttggaagcaaaaccagaacttgtccctctttgtccgggaaggagcctccagtagggacattcttgccaatagcaagcagagagatgttgattttaaggcctttctccagaacttaaaatctctggttgcctcccgcaaagaggcagaggaagagtacggcatgaaggctatgaagaaggagagtgagggtcttaagctcgtgaagctattaattggcaatcgcgattccctcgataattcttactatgactggtatatcctcgtaacaaataaatgccaccctaatcaaattaagcatctcgatttccttaaggaaattaagtggttcgctgtcctggaattcgatcccgagagtatgatcaatggcgtggtgaaagcctataaagagtcaagagtcgccaatctgcactttcccaatcagtatgaagataaaaccacaaacatgtgggagaaaatatctacactaaatctgtatcaacagccaagctggattttctgcaacggacggagtgatcttaaatcagagacttataaaccccttgaaccacacctgtggcagcgggaacgcgcatccgaggtcaggaagttgatattatttcttacagatgaaaacattatgacacgcggtaagtttctggttgttttcttgctgctttcatctgtcgagtcccccggagacccattaatcgagaccttttgggctttttatcaagccctgaaaggtatggaaaatatgttgtgcatatcggtgaatagccacatctatcaacggtggaaagatctgttgcaaacaagaatgaaaatggaggatgagctgactaatcattccatcagcaccctgaacatcgagctggtgaatagtacaattctaaaactcaagagcgtaaccagatcgtcccgacgcttcttgcccgctagaggatcctcatctgtcattcttgaaaagaagaaagaggatgtccttaccgccctcgaaatcctctgcgaaaacgagtgtacagagacagatatcgaaaaggacaagtccaaattcctggagtttaaaaagagtaaggaggagcacttttacaggggtggaaaggtatcatggtggaacttctacttttcaagtgaaaactatagcagcgatttcgtgaagagagactcttacgaaaagctaaaggatctgatccactgttgggcagagagtcctaagcccatcttcgccaaaatcattaatctctatcatcaccccggttgcggcggtacgaccctggctatgcatgtgctgtgggacctaaaaaagaattttaggtgtgccgtactcaaaaacaagactacagacttcgcagagatcgccgagcaggtgattaacttagtgacttaccgggcaaagtcacaccaggattatatccccgtcctgttgctggtcgatgattttgaggagcaggagaacgtctacttccttcagaacgctattcatagcgtgcttgccgagaaagacctgcggtacgagaagactctggttatcattctgaactgcatgcgctctcgtaatccggatgagagtgcgaaattggccgacagcattgccctgaactatcaactgtcaagtaaagagcagcgagctttcggcgctaagctgaaggagattgaaaaacagcacaagaactgcgaaaatttctacagcttcatgatcatgaaaagcaacttcgacgaaacatacatagagaatgtagtgagaaacatccttaagggccaggacgtggactccaaagaggcccaacttatttcttttctcgctctgttatcctcttatgtgaccgactcaaccatctcggtgtcccaatgcgaaattttcctggggataatatatacttctacaccctgggaaccagaaagtctcgaggacaagatgggcacctatagtacgctgttgatcaagaccgaggttgccgagtacggcaggtacacaggcgtgcgaattatacaccccctcatcgctctgtattgtcttaaggagctggagcgcagctatcacttggataagtgccagattgccttgaacatcctcgaggagaaccttttttatgattccggtatcggacgcgacaaattccagcatgatgtacagaccttgcttttaaccagacaaaggaaggtgtacggtgatgagaccgataccttattcagcccacttatggaggccctgcagaacaaagatattgagaaagtgctctccgcgggttcgaggcgcttccctcaaaacgcctttatctgccaggcattggcacggcacttttatatcaaagagaaggactttaacaccgctctagattgggccaggcaggctaaaatgaaggccccaaaaaatagctacatctccgataccctcgggcaggtctataagtccgaaatcaaatggtggctagatggcaacaaaaattgtcgctctattacagtcaacgatctgactcatctgttggaagccgcagaaaaggcttctagagcgtttaaagagtcccaaagacaaacggactctaaaaattacgaaaccgaaaattggagtccacaaaagtcccagaggcgctatgacatgtacaatacagcctgtttcctgggagaaattgaagtcggcctgtatactattcagattctgcagttaactccgtttttccacaaggagaatgagctcagcaagaagcatatggtccagtttttaagtggtaagtggacaattccacctgacccccgaaacgagtgctatctggccctgagcaaattcactagtcatctaaaaaacctgcaatccgacctgaagaggtgtttcgatttctttattgattatatggtgctgctcaagatgcggtatacccagaaggaaatcgccgaaatcatgctgtccaaaaaggtgagtcgatgtttccggaagtacactgaactgttctgtcacctggacccctgcctgctgcagagtaaggagagccagctgttgcaggaagagaactgcagaaagaagctggaggccctcagggccgaccgcttcgctggactcctggaatatttgaacccaaactacaaggacgcgacgacgatggagtccattgtaaacgagtacgcctttctcctccagcagaacagtaaaaagcccatgactaacgaaaagcaaaacagcatcctggccaacatcatactgagctgcctcaaacccaattccaagcttatccagccacttactactttaaagaagcagctcagagaagtgctgcagttcgtgggcctttcccaccagtacccgggaccatacttcctggcatgtctcctgttctggccagagaaccaagagctcgaccaggattctaaactaatcgaaaaatacgtatcctccctgaatcgctccttccggggtcagtacaagcgtatgtgccgcagcaaacaggcaagcacgcttttctatctggggaaaaggaagggacttaactccattgtccataaagctaaaattgagcagtattttgataaggcccagaacacaaacagcttatggcacagcggcgatgtctggaaaaaaaatgaagttaaggatctgcttcggcgactcactgggcaggccgaaggtaaattgatcagcgtggagtacggtacggaagaaaagattaagattcctgtgatctcagtatatagtggaccactccggtcaggccgtaatattgaacgggtctccttttatctcggcttcagcattgaaggaccactcgcgtacgatatcgaggttatttag

SEQ ID NO: 115434 - DNA, 213 bp, Artificial Sequence
  derived and/or modified sequence
atgtccaaacaggtgagccttccggaaatgataaaggactggacaaaagagcacgtgaagaagtgggtaaacgaggacctgaagatcaacgagcagtacgggcagatcctactttctgaggaggtgacaggcttggtgctgcaggagttgacggaaaaggacctggtcgagatggggttgccatggggtcccgctctcctgattaaacgctag

SEQ ID NO: 115435 - DNA, 213 bp, Artificial Sequence
  derived and/or modified sequence
atgagcaaacaggtgtcactcccggaaatgataaaggactggactaaggaacacgtgaagaaatgggtgaacgaggacctgaagattaacgagcaatacggtcaaatccttctgtcggaggaagttactgggctggtgctgcaagaactgacagagaaagacttagtggagatggggctgccctggggcccagcccttctaataaaaaggtag

SEQ ID NO: 115436 - DNA, 213 bp, Artificial Sequence
  derived and/or modified sequence
atgagcaagcaggtatcactgcctgaaatgattaaggactggacgaaagaacatgtaaagaaatgggtgaacgaggacctgaagatcaatgaacagtatggccagatcctcctgtcagaggaagtgacaggactcgtgcttcaggaattgactgagaaagatctggtcgagatgggtctgccatgggggccagcattattaatcaagcggtag

SEQ ID NO: 115437 - DNA, 7134 bp, Artificial Sequence
  derived and/or modified sequence
gaaagtcagagtactgggagaacagaagacttcacaatttaatgcctcagtttttaaaaaaggatccttacacttcatgtctcctagccatcagaagaggaatgagacagcaaaagttcaaatggcctgtttcaagtttctgatataaaacgatgacattttcaggaaaatcctgcatttccagagagagactggctggttaaatttctgaaagaggacaccagctaaaagaaggtattgcatctcacccgagcagactgtgtctgtggaaagtgtaagccccttgccagaagagcagcttcccagcaaaggcagagggtgaaaacagcaaaggtcttaagacactggggacctagagtcaaaagggacctcctccagggaaaacgctgtgtgagaaatggcctcattcggtgactgtgagtgacacagcagaaagttgggtcattccggctgcttttttgagaagtccctgaagagatcaataacagcaagagggaacctggcaaggaagctattcctataatccaggaaagagatgaggaaggcttggaccaggtggtagtggtgtcaggtagtcaaatgctgggtatattttgaagatacaccccataggatttgctccacattgaatgtggaatgctggaagagagataaagtgtacctgtcacatactttttgagttttatttattttcttagaagtaagtacacaaagagatgctacctaggagaagggtattcttttcactattctttcaaattttctgtatgttcaaacattttcatagtagaaagttggggggaaaatctgtttcataaacatttcctcagcagcagtccagtctattgcattttaattggttgtgatatcattgttttatgcaatacgttctcaacaagtatatcctccggcaaactgaacaaggaccaagtctgttctgcctacagctctgcttcctcatagctgctttccagaacgtgactcttgcaaattatcaagaaaggggaactaatctaagggatccagatcaaacagcctcatgaagacttattttatgtttctaatataaagatagaagttttcagaaaagccctgctacacagaggatcagagcaggggtgggcctgctgggctgcagctgggattctgagcatcctttcccggaggcacggaaagtgagtgagtgagcccagtgaggaagaagttgaagctttgatatgagtaaacaagtatctctacctgaaatgattaaagactggaccaaagagcatgtgaaaaaatgggtaaatgaagaccttaagattaatgagcaatacgggcaaattctgctcagtgaagaagtaacaggattagtcctgcaggaattaactgagaaggaccttgtagaaatggggctaccatggggtccagcacttttgataaaacgttcatacaacaaattgaatagtaagtcccctgaaagtgacaatcatgatccgggacaattagataattcaaaaccgtccaaaacagaacaccagaaaaatccaaaacacaccaaaaaggaagaagaaaattcaatgtcatctaatattgattatgatcccagagagatcagagatatcaaacaagaagaatcaattcttatgaaagaaaatgtgttagatgaagtagcaaatgctaaacacaagaaaaagggtaagctaaaacctgaacaattgacttgtatgccatatccttttgatcagttccatgacagccatcgctacatagaacattatactctacaacctgaaacaggagcactcaatctcattgatccaatacatgagttcaaagctctcacaaacacagaaacagccacggaagtggacattaagatgaaattcagcaatgaagtcttccgatttgcatcagcttgtatgaattcacgcaccaatggcaccatccattttggagtcaaggacaaaccccatggagaaattgttggtgtgaaaatcaccagtaaggctgccttcattgaccacttcaatgtaatgatcaaaaagtattttgaagaaagtgagatcaatgaagccaagaagtgtattcgggagccaaggtttgtggaagtccttctgcagaacaatacaccatctgacagatttgtcattgaagttgatactattccaaaacactctatatgtaatgataagtatttctacattcagatgcaaatttgtaaagataaaatatggaaacaaaaccaaaatctttcactgtttgtaagagaaggggctagctctagggatatcctggccaattccaagcaacgggatgtagatttcaaggcatttttacaaaatttaaagtcactggtagcatctagaaaagaggctgaagaagagtatggaatgaaggcaatgaagaaggagagtgaaggactaaagctggttaaacttctcataggaaaccgagactcactggataattcatactatgactggtacattcttgtaacaaataaatgccatccaaaccaaataaagcacttagattttttaaaagaaattaaatggtttgctgtgttggagtttgatcctgaatctatgatcaatggagtggtcaaagcttacaaagaaagtcgggtggcaaaccttcactttccaaatcaatatgaagacaagacaactaacatgtgggagaagatttctactcttaatctttaccaacagcccagctggattttctgcaacggcagatcagacctgaaaagcgagacatataaacctctagaaccacatttatggcagagagaaagagcttcagaagtcaggaaactaattttatttctcacagatgaaaatataatgacaagaggaaaatttttggtagtgtttctattactctcttcagtggaaagcccaggagatccactcattgaaactttctgggctttctatcaagctctcaaaggaatggaaaatatgttgtgtatctctgtaaactcacatatttatcaacgatggaaagatctactacaaacaagaatgaagatggaagatgaactaacaaaccacagtatttccactttaaatatagaactggtaaacagcactatccttaaactaaaatcggtgactcggtcatcaagaaggtttttgcccgcccgtggatcttcttcagttatcctagagaaaaagaaagaggatgtcttgactgcactggaaatcctctgtgaaaatgagtgtacagagacagacatcgagaaagacaaatctaaattcctggagtttaagaaatcaaaagaagaacacttttatcgaggtggcaaagtatcctggtggaacttctatttttcttctgaaaactattcttcagattttgttaaaagggacagttatgaaaagcttaaagatttaatacactgctgggcagagtctcctaaaccaatatttgcaaaaatcatcaatctttatcatcatccaggctgtggaggtaccacactggctatgcatgttctctgggacttaaagaaaaacttcagatgtgctgtgttaaaaaacaagacaactgattttgcagaaattgcagagcaagtgatcaatctggtcacctatagggcaaagagccatcaggattacattcctgtgcttctccttgtggatgattttgaagaacaagaaaatgtctactttctacaaaatgccatccattccgttttagcagaaaaggatttgcgatatgaaaaaacattggtaattatcttaaactgcatgagatcccggaatccagatgaaagtgcaaaattggcagacagtattgcactaaattaccaactttcttccaaggaacaaagagcttttggtgccaaactgaaggaaattgaaaagcagcacaagaactgtgaaaacttttattccttcatgatcatgaaaagcaattttgatgaaacatatatagaaaatgtagtcaggaatatcctaaaaggacaggatgttgacagcaaggaagcacaactcatttccttcctggctttactcagctcttatgttactgactctacaatttcagtttcacagtgtgaaatatttttgggaatcatatacactagtacaccctgggaacctgaaagcttagaagacaagatgggaacttattctacacttctaataaaaacagaagttgcagaatatgggagatacacaggtgtgcgtatcattcaccctctgattgccctgtactgtctaaaagaactggaaagaagctatcacttggataaatgtcaaattgcattgaatatattagaagagaatttattctatgattctggaataggaagagacaaatttcaacatgatgttcaaactcttctgcttacaagacagcgcaaggtgtatggagatgaaacagacactctgttttccccattaatggaagctttacagaataaagacattgaaaaggtcttgagtgcaggaagtagacgattcccacaaaatgcattcatttgtcaagccttagcaagacatttctacattaaagagaaggactttaacacagctctggactgggcacgtcaggccaaaatgaaagcacctaaaaattcctatatttcagatacactaggtcaagtctacaaaagtgaaatcaaatggtggttggatgggaacaaaaactgtaggagcattactgttaatgacctaacacatctcctagaagctgcggaaaaagcctcaagagctttcaaagaatcccaaaggcaaactgatagtaaaaactatgaaaccgagaactggtcaccacagaagtcccagagacgatatgacatgtataacacagcttgtttcttgggtgaaatagaagttggtctttacactatccagattcttcagctcactccctttttccacaaagaaaatgaattatccaaaaaacatatggtgcaatttttatcaggaaagtggaccattcctcctgatcccagaaatgaatgttatttggctcttagcaagttcacatcccacctaaaaaatttacaatcagatctgaaaaggtgctttgacttttttattgattatatggttcttctgaaaatgaggtatacccaaaaagaaattgcagaaatcatgttaagcaagaaagtcagtcgttgtttcaggaaatacacagaacttttctgtcatttggatccatgtctattacaaagtaaagagagtcaattactccaggaggagaattgcaggaaaaagctagaagctctgagagcagataggtttgctggactcttggaatatcttaatccaaactacaaagatgctaccaccatggaaagtatagtgaatgaatatgccttcctactgcagcaaaactcaaaaaagcccatgacaaatgagaaacaaaattccattttggccaacattattctgagttgtctaaagcccaactccaagttaattcaaccacttaccacgctaaaaaaacaactccgagaggtcttgcaatttgtaggactaagtcatcaatatccaggtccttatttcttggcctgcctcctgttctggccagaaaatcaagagctagatcaagattccaaactaatagaaaagtatgtttcatccttaaatagatccttcaggggacagtacaagcgcatgtgcaggtccaagcaggcaagcacacttttctatctgggcaaaaggaagggtctaaacagtattgttcacaaggccaaaatagagcagtactttgataaagcacaaaatacaaattccctctggcacagtggggatgtgtggaaaaaaaatgaagtcaaagacctcctgcgtcgtctaactggtcaggctgaaggcaagctaatctctgtagaatatggaacagaggaaaaaataaaaataccagtaatatctgtttattcaggtccactcagaagtggtaggaacatagaaagagtgtctttctacctaggattttccattgaaggccctctggcatatgatatagaagtaatttaagacaatacatcacctgtagttcaaatacgtttatttatatctttatgattttattctctctctctattctcatggcactttcataacattatggctaacctctaattacagattttgcttttgcctccctgaatgaattacaagcctttttaagatatgaaatatgcctacccgcagagcttggcacaaagtggagtcaatcttttaatgttttaaatatgcattttcagactcaaataattaagaagtttcattgatatccactggtcacatcataactgtctatagggcaataaaatctgtgttaaactcaattgcttttataagttttctaaattatttcttcactgtgacagcaaagatttaaataagatgaatgtaaaagagaaagcttattggactcaaacccacagatccacaccagagttctatttacctcatcttggtatcaataaaaacttatgtggaaggtaaatatattgttccccatccaccacataacactctccccaacacacacacacacacacacacacacacacacacacacacacactccttgtaccccttgcccttctcccagctcattgctccaggagagagaagagttcaaaaaataaagtaatcataaacttgaactctctccattctcttgttcccatttacaggtgaatctcttcctttaagccatttttgtctcctgtgaatacagccttatctccacctgtttcttagatcccatctcccctggcttattttttccattcattaccctctttgttccctttacttctcaacctgtgctatatacatgctgttctctctgttgagattgccttatttccatctaacattctctctcctgctattctgatttgtcattcacaactgatttcaagagtcaccttcaccaggaagtcttccttgaccaccatcattcctgcctgattagagggcttcctcatggtaatatgtgttctcaagttttcagtgtcaaggaatgccatcccagaagctcattctcagatgcacaacagccagaacagtctcaagcagcattctagagcttggaatttaagaactacgcattgcctataaagtgaaacataggctaatatagattaaattgaatattgaataaaaaatatatttatttatccac

SEQ ID NO: 115438 - DNA, 1221 bp, Artificial Sequence
  derived and/or modified sequence
atgagtaaacaagtatctctacctgaaatgattaaagactggaccaaagagcatgtgaaaaaatgggtaaatgaagaccttaagattaatgagcaatacgggcaaattctgctcagtgaagaagtaacaggattagtcctgcaggaattaactgagaaggaccttgtagaaatggggctaccatggggtccagcacttttgataaaacgttcatacaacaaattgaatagtaagtcccctgaaagtgacaatcatgatccgggacaattagataattcaaaaccgtccaaaacagaacaccagaaaaatccaaaacacaccaaaaaggaagaagaaaattcaatgtcatctaatattgattatgatcccagagagatcagagatatcaaacaagaagaatcaattcttatgaaagaaaatgtgttagatgaagtagcaaatgctaaacacaagaaaaagctagaagctctgagagcagataggtttgctggactcttggaatatcttaatccaaactacaaagatgctaccaccatggaaagtatagtgaatgaatatgccttcctactgcagcaaaactcaaaaaagcccatgacaaatgagaaacaaaattccattttggccaacattattctgagttgtctaaagcccaactccaagttaattcaaccacttaccacgctaaaaaaacaactccgagaggtcttgcaatttgtaggactaagtcatcaatatccaggtccttatttcttggcctgcctcctgttctggccagaaaatcaagagctagatcaagattccaaactaatagaaaagtatgtttcatccttaaatagatccttcaggggacagtacaagcgcatgtgcaggtccaagcaggcaagcacacttttctatctgggcaaaaggaagggtctaaacagtattgttcacaaggccaaaatagagcagtactttgataaagcacaaaatacaaattccctctggcacagtggggatgtgtggaaaaaaaatgaagtcaaagacctcctgcgtcgtctaactggtcaggctgaaggcaagctaatctctgtagaatatggaacagaggaaaaaataaaaataccagtaatatctgtttattcaggtccactcagaagtggtaggaacatagaaagagtgtctttctacctaggattttccattgaaggccctctggcatatgatatagaagtaatttaa

SEQ ID NO: 115439 - DNA, 5831 bp, Artificial Sequence
  derived and/or modified sequence
tgggagaacagaagacttcacaatttaatgcctcagtttttaaaaaaggatccttacacttcatgtctcctagccatcagaagaggaatgagacagcaaaagttcaaatggcctgtttcaagtttctgatataaaacgatgacattttcaggaaaatcctgcatttccagagagagactggctggttaaatttctgaaagaggacaccagctaaaagaagggtcattccggctgcttttttgagaagtccctgaagagatcaataacagcaagagggaacctggcaaggaagctattcctataatccaggaaagagatgaggaaggcttggaccaggtggtagtggtgtcagctctgcttcctcatagctgctttccagaacgtgactcttgcaaattatcaagaaaggggaactaatctaagggatccagatcaaacagcctcatgaagacttattttatgtttctaatataaagatagaagttttcagaaaagccctgctacacagaggatcagagcaggggtgggcctgctgggctgcagctgggattctgagcatcctttcccggaggcacggaaagtgagtgagtgagcccagtgaggaagaagttgaagctttgatatgagtaaacaagtatctctacctgaaatgattaaagactggaccaaagagcatgtgaaaaaatgggtaaatgaagaccttaagattaatgagcaatacgggcaaattctgctcagtgaagaagtaacaggattagtcctgcaggaattaactgagaaggaccttgtagaaatggggctaccatggggtccagcacttttgataaaacgttcatacaacaaattgaatagtaagtcccctgaaagtgacaatcatgatccgggacaattagataattcaaaaccgtccaaaacagaacaccagaaaaatccaaaacacaccaaaaaggaagaagaaaattcaatgtcatctaatattgattatgatcccagagagatcagagatatcaaacaagaagaatcaattcttatgaaagaaaatgtgttagatgaagtagcaaatgctaaacacaagaaaaagggtaagctaaaacctgaacaattgacttgtatgccatatccttttgatcagttccatgacagccatcgctacatagaacattatactctacaacctgaaacaggagcactcaatctcattgatccaatacatgagttcaaagctctcacaaacacagaaacagccacggaagtggacattaagatgaaattcagcaatgaagtcttccgatttgcatcagcttgtatgaattcacgcaccaatggcaccatccattttggagtcaaggacaaaccccatggagaaattgttggtgtgaaaatcaccagtaaggctgccttcattgaccacttcaatgtaatgatcaaaaagtattttgaagaaagtgagatcaatgaagccaagaagtgtattcgggagccaaggtttgtggaagtccttctgcagaacaatacaccatctgacagatttgtcattgaagttgatactattccaaaacactctatatgtaatgataagtatttctacattcagatgcaaatttgtaaagataaaatatggaaacaaaaccaaaatctttcactgtttgtaagagaaggggctagctctagggatatcctggccaattccaagcaacgggatgtagatttcaaggcatttttacaaaatttaaagtcactggtagcatctagaaaagaggctgaagaagagtatggaatgaaggcaatgaagaaggagagtgaaggactaaagctggttaaacttctcataggaaaccgagactcactggataattcatactatgactggtacattcttgtaacaaataaatgccatccaaaccaaataaagcacttagattttttaaaagaaattaaatggtttgctgtgttggagtttgatcctgaatctatgatcaatggagtggtcaaagcttacaaagaaagtcgggtggcaaaccttcactttccaaatcaatatgaagacaagacaactaacatgtgggagaagatttctactcttaatctttaccaacagcccagctggattttctgcaacggcagatcagacctgaaaagcgagacatataaacctctagaaccacatttatggcagagagaaagagcttcagaagtcaggaaactaattttatttctcacagatgaaaatataatgacaagaggaaaatttttggtagtgtttctattactctcttcagtggaaagcccaggagatccactcattgaaactttctgggctttctatcaagctctcaaaggaatggaaaatatgttgtgtatctctgtaaactcacatatttatcaacgatggaaagatctactacaaacaagaatgaagatggaagatgaactaacaaaccacagtatttccactttaaatatagaactggtaaacagcactatccttaaactaaaatcggtgactcggtcatcaagaaggtttttgcccgcccgtggatcttcttcagttatcctagagaaaaagaaagaggatgtcttgactgcactggaaatcctctgtgaaaatgagtgtacagagacagacatcgagaaagacaaatctaaattcctggagtttaagaaatcaaaagaagaacacttttatcgaggtggcaaagtatcctggtggaacttctatttttcttctgaaaactattcttcagattttgttaaaagggacagttatgaaaagcttaaagatttaatacactgctgggcagagtctcctaaaccaatatttgcaaaaatcatcaatctttatcatcatccaggctgtggaggtaccacactggctatgcatgttctctgggacttaaagaaaaacttcagatgtgctgtgttaaaaaacaagacaactgattttgcagaaattgcagagcaagtgatcaatctggtcacctatagggcaaagagccatcaggattacattcctgtgcttctccttgtggatgattttgaagaacaagaaaatgtctactttctacaaaatgccatccattccgttttagcagaaaaggatttgcgatatgaaaaaacattggtaattatcttaaactgcatgagatcccggaatccagatgaaagtgcaaaattggcagacagtattgcactaaattaccaactttcttccaaggaacaaagagcttttggtgccaaactgaaggaaattgaaaagcagcacaagaactgtgaaaacttttattccttcatgatcatgaaaagcaattttgatgaaacatatatagaaaatgtagtcaggaatatcctaaaaggacaggatgttgacagcaaggaagcacaactcatttccttcctggctttactcagctcttatgttactgactctacaatttcagtttcacagtgtgaaatatttttgggaatcatatacactagtacaccctgggaacctgaaagcttagaagacaagatgggaacttattctacacttctaataaaaacagaagttgcagaatatgggagatacacaggtgtgcgtatcattcaccctctgattgccctgtactgtctaaaagaactggaaagaagctatcacttggataaatgtcaaattgcattgaatatattagaagagaatttattctatgattctggaataggaagagacaaatttcaacatgatgttcaaactcttctgcttacaagacagcgcaaggtgtatggagatgaaacagacactctgttttccccattaatggaagctttacagaataaagacattgaaaaggtcttgagtgcaggaagtagacgattcccacaaaatgcattcatttgtcaagccttagcaagacatttctacattaaagagaaggactttaacacagctctggactgggcacgtcaggccaaaatgaaagcacctaaaaattcctatatttcagatacactaggtcaagtctacaaaagtgaaatcaaatggtggttggatgggaacaaaaactgtaggagcattactgttaatgacctaacacatctcctagaagctgcggaaaaagcctcaagagctttcaaagaatcccaaaggcaaactgatagtaaaaactatgaaaccgagaactggtcaccacagaagtcccagagacgatatgacatgtataacacagcttgtttcttgggtgaaatagaagttggtctttacactatccagattcttcagctcactccctttttccacaaagaaaatgaattatccaaaaaacatatggtgcaatttttatcaggaaagtggaccattcctcctgatcccagaaatgaatgttatttggctcttagcaagttcacatcccacctaaaaaatttacaatcagatctgaaaaggtgctttgacttttttattgattatatggttcttctgaaaatgaggtatacccaaaaagaaattgcagaaatcatgttaagcaagaaagtcagtcgttgtttcaggaaatacacagaacttttctgtcatttggatccatgtctattacaaagtaaagagagtcaattactccaggaggagaattgcaggaaaaagctagaagctctgagagcagataggtttgctggactcttggaatatcttaatccaaactacaaagatgctaccaccatggaaagtatagtgaatgaatatgccttcctactgcagcaaaactcaaaaaagcccatgacaaatgagaaacaaaattccattttggccaacattattctgagttgtctaaagcccaactccaagttaattcaaccacttaccacgctaaaaaaacaactccgagaggtcttgcaatttgtaggactaagtcatcaatatccaggtccttatttcttggcctgcctcctgttctggccagaaaatcaagagctagatcaagattccaaactaatagaaaagtatgtttcatccttaaatagatccttcaggggacagtacaagcgcatgtgcaggtccaagcaggcaagcacacttttctatctgggcaaaaggaagggtctaaacagtattgttcacaaggccaaaatagagcagtactttgataaagcacaaaatacaaattccctctggcacagtggggatgtgtggaaaaaaaatgaagtcaaagacctcctgcgtcgtctaactggtcaggctgaaggcaagctaatctctgtagaatatggaacagaggaaaaaataaaaataccagtaatatctgtttattcaggtccactcagaagtggtaggaacatagaaagagtgtctttctacctaggattttccattgaaggccctctggcatatgatatagaagtaatttaagacaatacatcacctgtagttcaaatacgtttatttatatctttatgattttattctctctctctattctcatggcactttcataacattatggctaacctctaattacagattttgcttttgcctccctgaatgaattacaagcctttttaagatatgaaatatgcctacccgcagagcttggcacaaagtggagtcaatcttttaatgttttaaatatgcattttcagactcaaataattaagaagtttcattgatatccactggtcacatcataactgtctatagggcaataaaatctgtgttaaactcaattgcttttataagttttctaaattatttcttcactgtgacagcaaagatttaaataagatgaatgtaaaagagaaagcttattggactcaaacccacagatccacaccagagttctatttacctcatcttggtatcaata

SEQ ID NO: 115440 - DNA, 381 bp, Artificial Sequence
  derived and/or modified sequence
agaagacttcacaatttaatgcctcagtttttaaaaaaggatccttacacttcatgtctcctagccatcagaagaggaatgagacagcaaaagttcaaatggcctgtttcaagtttctgatataaaacgatgacattttcaggaaaatcctggaagaagttgaagctttgatatgagtaaacaagtatctctacctgaaatgattaaagactggaccaaagagcatgtgaaaaaatgggtaaatgaagaccttaagattaatgagcaatacgggcaaattctgctcagtgaagaagtaacaggattagtcctgcaggaattaactgagaaggaccttgtagaaatggggctaccatggggtccagcacttttgataaaacg

SEQ ID NO: 115441 - DNA, 5757 bp, Artificial Sequence
  derived and/or modified sequence
agaagacttcacaatttaatgcctcagtttttaaaaaaggatccttacacttcatgtctcctagccatcagaagaggaatgagacagcaaaagttcaaatggcctgtttcaagtttctgatataaaacgatgacattttcaggaaaatcctgcatttccagagagagactggctggttaaatttctgaaagaggacaccagctaaaagaaggtattgcatctcacccgagcagactgtgtctgtggaaagtgtaagccccttgccagaagagcagcttcccagcaaaggcagagggtgaaaacagcaaaggtcttaagacactggggacctagagtcaaaagggacctcctccagggaaaacgctgtgtgagaaatggcctcattcggtgactgtgagtgacacagcagaaagttgggtcattccggctgcttttttgagaagtccctgaagagatcaataacagcaagagggaacctggcaaggaagctattcctataatccaggaaagagatgaggaaggcttggaccaggtggtagtggtgtcagctctgcttcctcatagctgctttccagaacgtgactcttgcaaattatcaagaaaggggaactaatctaagggatccagatcaaacagcctcatgaagacttattttatgtttctaatataaagatagaagttttcagaaaagccctgctacacagaggatcagagcaggggtgggcctgctgggctgcagctgggattctgagcatcctttcccggaggcacggaaagtgagtgagtgagcccagtgaggaagaagttgaagctttgatatgagtaaacaagtatctctacctgaaatgattaaagactggaccaaagagcatgtgaaaaaatgggtaaatgaagaccttaagattaatgagcaatacgggcaaattctgctcagtgaagaagtaacaggattagtcctgcaggaattaactgagaaggaccttgtagaaatggggctaccatggggtccagcacttttgataaaacgttcatacaacaaattgaatagtaagtcccctgaaagtgacaatcatgatccgggacaattagataattcaaaaccgtccaaaacagaacaccagaaaaatccaaaacacaccaaaaaggaagaagaaaattcaatgtcatctaatattgattatgatcccagagagatcagagatatcaaacaagaagaatcaattcttatgaaagaaaatgtgttagatgaagtagcaaatgctaaacacaagaaaaagggtaagctaaaacctgaacaattgacttgtatgccatatccttttgatcagttccatgacagccatcgctacatagaacattatactctacaacctgaaacaggagcactcaatctcattgatccaatacatgagttcaaagctctcacaaacacagaaacagccacggaagtggacattaagatgaaattcagcaatgaagtcttccgatttgcatcagcttgtatgaattcacgcaccaatggcaccatccattttggagtcaaggacaaaccccatggagaaattgttggtgtgaaaatcaccagtaaggctgccttcattgaccacttcaatgtaatgatcaaaaagtattttgaagaaagtgagatcaatgaagccaagaagtgtattcgggagccaaggtttgtggaagtccttctgcagaacaatacaccatctgacagatttgtcattgaagttgatactattccaaaacactctatatgtaatgataagtatttctacattcagatgcaaatttgtaaagataaaatatggaaacaaaaccaaaatctttcactgtttgtaagagaaggggctagctctagggatatcctggccaattccaagcaacgggatgtagatttcaaggcatttttacaaaatttaaagtcactggtagcatctagaaaagaggctgaagaagagtatggaatgaaggcaatgaagaaggagagtgaaggactaaagctggttaaacttctcataggaaaccgagactcactggataattcatactatgactggtacattcttgtaacaaataaatgccatccaaaccaaataaagcacttagattttttaaaagaaattaaatggtttgctgtgttggagtttgatcctgaatctatgatcaatggagtggtcaaagcttacaaagaaagtcgggtggcaaaccttcactttccaaatcaatatgaagacaagacaactaacatgtgggagaagatttctactcttaatctttaccaacagcccagctggattttctgcaacggcagatcagacctgaaaagcgagacatataaacctctagaaccacatttatggcagagagaaagagcttcagaagtcaggaaactaattttatttctcacagatgaaaatataatgacaagaggaaaatttttggtagtgtttctattactctcttcagtggaaagcccaggagatccactcattgaaactttctgggctttctatcaagctctcaaaggaatggaaaatatgttgtgtatctctgtaaactcacatatttatcaacgatggaaagatctactacaaacaagaatgaagatggaagatgaactaacaaaccacagtatttccactttaaatatagaactggtaaacagcactatccttaaactaaaatcggtgactcggtcatcaagaaggtttttgcccgcccgtggatcttcttcagttatcctagagaaaaagaaagaggatgtcttgactgcactggaaatcctctgtgaaaatgagtgtacagagacagacatcgagaaagacaaatctaaattcctggagtttaagaaatcaaaagaagaacacttttatcgaggtggcaaagtatcctggtggaacttctatttttcttctgaaaactattcttcagattttgttaaaagggacagttatgaaaagcttaaagatttaatacactgctgggcagagtctcctaaaccaatatttgcaaaaatcatcaatctttatcatcatccaggctgtggaggtaccacactggctatgcatgttctctgggacttaaagaaaaacttcagatgtgctgtgttaaaaaacaagacaactgattttgcagaaattgcagagcaagtgatcaatctggtcacctatagggcaaagagccatcaggattacattcctgtgcttctccttgtggatgattttgaagaacaagaaaatgtctactttctacaaaatgccatccattccgttttagcagaaaaggatttgcgatatgaaaaaacattggtaattatcttaaactgcatgagatcccggaatccagatgaaagtgcaaaattggcagacagtattgcactaaattaccaactttcttccaaggaacaaagagcttttggtgccaaactgaaggaaattgaaaagcagcacaagaactgtgaaaacttttattccttcatgatcatgaaaagcaattttgatgaaacatatatagaaaatgtagtcaggaatatcctaaaaggacaggatgttgacagcaaggaagcacaactcatttccttcctggctttactcagctcttatgttactgactctacaatttcagtttcacagtgtgaaatatttttgggaatcatatacactagtacaccctgggaacctgaaagcttagaagacaagatgggaacttattctacacttctaataaaaacagaagttgcagaatatgggagatacacaggtgtgcgtatcattcaccctctgattgccctgtactgtctaaaagaactggaaagaagctatcacttggataaatgtcaaattgcattgaatatattagaagagaatttattctatgattctggaataggaagagacaaatttcaacatgatgttcaaactcttctgcttacaagacagcgcaaggtgtatggagatgaaacagacactctgttttccccattaatggaagctttacagaataaagacattgaaaaggtcttgagtgcaggaagtagacgattcccacaaaatgcattcatttgtcaagccttagcaagacatttctacattaaagagaaggactttaacacagctctggactgggcacgtcaggccaaaatgaaagcacctaaaaattcctatatttcagatacactaggtcaagtctacaaaagtgaaatcaaatggtggttggatgggaacaaaaactgtaggagcattactgttaatgacctaacacatctcctagaagctgcggaaaaagcctcaagagctttcaaagaatcccaaaggcaaactgatagtaaaaactatgaaaccgagaactggtcaccacagaagtcccagagacgatatgacatgtataacacagcttgtttcttgggtgaaatagaagttggtctttacactatccagattcttcagctcactccctttttccacaaagaaaatgaattatccaaaaaacatatggtgcaatttttatcaggaaagtggaccattcctcctgatcccagaaatgaatgttatttggctcttagcaagttcacatcccacctaaaaaatttacaatcagatctgaaaaggtgctttgacttttttattgattatatggttcttctgaaaatgaggtatacccaaaaagaaattgcagaaatcatgttaagcaagaaagtcagtcgttgtttcaggaaatacacagaacttttctgtcatttggatccatgtctattacaaagtaaagagagtcaattactccaggaggagaattgcaggaaaaagctagaagctctgagagcagataggtttgctggactcttggaatatcttaatccaaactacaaagatgctaccaccatggaaagtatagtgaatgaatatgccttcctactgcagcaaaactcaaaaaagcccatgacaaatgagaaacaaaattccattttggccaacattattctgagttgtctaaagcccaactccaagttaattcaaccacttaccacgctaaaaaaacaactccgagaggtcttgcaatttgtaggactaagtcatcaatatccaggtccttatttcttggcctgcctcctgttctggccagaaaatcaagagctagatcaagattccaaactaatagaaaagtatgtttcatccttaaatagatccttcaggggacagtacaagcgcatgtgcaggtccaagcaggcaagcacacttttctatctgggcaaaaggaagggtctaaacagtattgttcacaaggccaaaatagagcagtactttgataaagcacaaaatacaaattccctctggcacagtggggatgtgtggaaaaaaaatgaagtcaaagacctcctgcgtcgtctaactggtcaggctgaaggcaagctaatctctgtagaatatggaacagaggaaaaaataaaaataccagtaatatctgtttattcaggtccactcagaagtggtaggaacatagaaagagtgtctttctacctaggattttccattgaaggccctctggcatatgatatagaagtaatttaagacaatacatcacctgtagttcaaatacgtttatttatatctttatgattttattctctctctctattctcatggcactttcataacattatggctaacctctaattacagattttgcttttgcctccctgaatgaattacaagcctttttaagatatgaaatatgcctacccgcagagcttgg

SEQ ID NO: 115442 - DNA, 631 bp, Artificial Sequence
  derived and/or modified sequence
agaagacttcacaatttaatgcctcagtttttaaaaaaggatccttacacttcatgtctcctagccatcagaagaggaatgagacagcaaaagttcaaatggcctgtttcaagtttctgatataaaacgatgacattttcaggaaaatcctgctctgcttcctcatagctgctttccagaacgtgactcttgcaaattatcaagaaaggggaactaatctaagggatccagatcaaacagcctcatgaagacttattttatgtttctaatataaagatagaagttttcagaaaagccctgctacacagaggatcagagcaggggtgggcctgctgggctgcagctgggattctgagcatcctttcccggaggcacggaaagtgagtgagtgagcccagtgaggaagaagttgaagctttgatatgagtaaacaagtatctctacctgaaatgattaaagactggaccaaagagcatgtgaaaaaatgggtaaatgaagaccttaagattaatgagcaatacgggcaaattctgctcagtgaagaagtaacaggattagtcctgcaggaattaactgagaaggaccttgtagaaatggggctaccatggggtccagcacttttgataaaacg

SEQ ID NO: 115443 - DNA, 1198 bp, Artificial Sequence
  derived and/or modified sequence
agaagacttcacaatttaatgcctcagtttttaaaaaaggatccttacacttcatgtctcctagccatcagaagaggaatgagacagcaaaagttcaaatggcctgtttcaagtttctgatataaaacgatgacattttcaggaaaatcctgcatttccagagagagactggctggttaaatttctgaaagaggacaccagctaaaagaagggtcattccggctgcttttttgagaagtccctgaagagatcaataacagcaagagggaacctggcaaggaagctattcctataatccaggaaagagatgaggaaggcttggaccaggtggtagtggtgtcaggtagtcaaatgctgggtatattttgaagatacaccccataggatttgctccacattgaatgtggaatgctggaagagagataaagtgtacctgtcacatactttttgagttttatttattttcttagaagtaagtacacaaagagatgctacctaggagaagggtattcttttcactattctttcaaattttctgtatgttcaaacattttcatagtagaaagttggggggaaaatctgtttcataaacatttcctcagcagcagtccagtctattgcattttaattggttgtgatatcattgttttatgcaatacgttctcaacaagtatatcctccggcaaactgaacaaggaccaagtctgttctgcctacagctctgcttcctcatagctgctttccagaacgtgactcttgcaaattatcaagaaaggggaactaatctaagggatccagatcaaacagcctcatgaagacttattttatgtttctaatataaagatagaagttttcagaaaagccctgctacacagaggatcagagcaggggtgggcctgctgggctgcagctgggattctgagcatcctttcccggaggcacggaaagtgagtgagtgagcccagtgaggaagaagttgaagctttgatatgagtaaacaagtatctctacctgaaatgattaaagactggaccaaagagcatgtgaaaaaatgggtaaatgaagaccttaagattaatgagcaatacgggcaaattctgctcagtgaagaagtaacaggattagtcctgcaggaattaactgagaaggaccttgtagaaatggggctaccatggggtccagcacttttgataaaacg

SEQ ID NO: 115444 - DNA, 763 bp, Artificial Sequence
  derived and/or modified sequence
agaagacttcacaatttaatgcctcagtttttaaaaaaggatccttacacttcatgtctcctagccatcagaagaggaatgagacagcaaaagttcaaatggcctgtttcaagtttctgatataaaacgatgacattttcaggaaaatcctgggtcattccggctgcttttttgagaagtccctgaagagatcaataacagcaagagggaacctggcaaggaagctattcctataatccaggaaagagatgaggaaggcttggaccaggtggtagtggtgtcagctctgcttcctcatagctgctttccagaacgtgactcttgcaaattatcaagaaaggggaactaatctaagggatccagatcaaacagcctcatgaagacttattttatgtttctaatataaagatagaagttttcagaaaagccctgctacacagaggatcagagcaggggtgggcctgctgggctgcagctgggattctgagcatcctttcccggaggcacggaaagtgagtgagtgagcccagtgaggaagaagttgaagctttgatatgagtaaacaagtatctctacctgaaatgattaaagactggaccaaagagcatgtgaaaaaatgggtaaatgaagaccttaagattaatgagcaatacgggcaaattctgctcagtgaagaagtaacaggattagtcctgcaggaattaactgagaaggaccttgtagaaatggggctaccatggggtccagcacttttgataaaacg

SEQ ID NO: 115445 - protein, 245 aa, Artificial Sequence
  derived and/or modified sequence
MCAEVGPALCRGMERNSLGCCEAPKKLSLSFSIEAILKRPARRSDMDRPEGPGEEGPGEAAASGSGLEKPPKDQPQEGRKSKRRVRTTFTTEQLHELEKIFHFTHYPDVHIRSQLAARINLPEARVQIWFQNQRAKWRKQEKIGNLGAPQQLSEASVALPTNLDVAGPTWTSTALRRLAPPTSCCPSAQDQLASAWFPAWITLLPAHPWETQPVPGLPIHQTCIPVLCILPPPHPKWGSICATST

SEQ ID NO: 115446 - DNA, 3403 bp, Artificial Sequence
  derived and/or modified sequence
tgatcaacaactgtcagctcccagtcagagagaaagggcctcttcagtctgtctcaggagactgggagaaacagcataaaggaccccacaaggaagggagaggtaccctgggtcaggcgcttgtggagagagggcttcgcatgtaaagtgacgtcagggaaaatagaacagaaaaaaagccagggccagcccagaggcacctgagaagaatcagacccacagctcagcccagccctggcacagagaagagacaggcctggcagcacccagggaccccctttcctcagcctccacctgcaggacagcaggagcactgatgcgctgaaggtacgttctggagtctggaagcagcagaactgaaggaagtaaacacgggtgtctgggaagacccctcaagctgcagtaaagcccaggactgaattggccacctgaggccaagggtggcactccaacctcctcctaaaggctggctagagccacaggaaagggccagaagccagagaaagggcaaaggtggacccctgcctccaaacctcctctggagactgacctcctctttcctgtgccttattgtttctccctcttctctttgttcgccactgggcggtgacctcagggatcctggcctaacctggtgattgtgcaggcaactgtgtccgagaagacccttctctggaagattgaaccccaattcagccatggtgactcctttgatgtcaaactggtaagggctgagccgtgggcacaggataccactccttccagctcttctgctgtgacctgcccatggaagtccctgtggacacgaaatcctgtttggatcatctaactggaggctctctgttcttcacctccacgcgccctcttgaccccaggaggttcaggggaggaagtacgccactctccactggcaccctccttggcctacacagagtcacccctgagcccctcaatgtgtgctgaggtgggccctgctctctgcaggggtatggagagaaatagcttggggtgctgtgaggccccgaagaagctgggcctgtccttctccatcgaggcgatcctaaagaggcctgccaggaggagtgatatggacagaccagaagggccaggtgaagagggccccggagaagctgcggcctcaggctctgggctagaaaagcctccaaaggaccagccccaggaaggaaggaagagcaagcggagggttcgtaccaccttcaccactgagcagctgcatgagctggagaagatcttccactttacccactacccagacgttcacatccgcagccagctggcagccaggatcaacctcccagaagctcgggtgcagatctggttccagaatcagcgagccaagtggcggaagcaggagaagattggcaacctgggggctccacagcagctgagtgaagccagtgtggtcctgcccacaaatctggatgtggctgggcccacgtggacatccactgctctgcgcaggctggctcctcccacgagctgttgtccatcggctcaagatcagctggcctctgcctggttccctgcctggatcaccctcctcccagcgcacccatgggaaacacagcctgtcccaggtcttcccatccatcaaacttgcatccctgtgctatgcatccttccacctccacaccccaaatggggcagcatctgtgctacttcaacatagagattggacatgctctccccaaatgagccactttcctctccaggtgaaggcaggtagcagatgtgccctgggcctctggggaaatcgatctcacaatccaaaaatggcccacagcccaggaagctaccctgaacatgccagttggaaggctgcaccagactcaaaagcaaactaaacaataaaggacagctctcttctctcctggctaaagctgctctcctggttcagaagacaggctggatgagatctcaggccgagctctgaaatagggaggtaatcctccagcacctgtgtttcctctaacttgctgtgtgacctccagccggtcactcaccctctctggacctcatctgtaagaggagccagctggataagatgatttctgaagacgcttccatggtgggcactgaggcacagaggaggccaaggagaggttgtttgttcatgcatgcattcatccgtgacacatgagtacctactgaggactccataaacagaacgggatacagagataaacaatttgggttctgtccacgtttgtcaaaaggtggtgctggcccacctctgaaagcagaacacttgctcaacaaccttgctgttggcccaagtctaacacattctttatgactgtgagcatctcagagtgagagaaaaatgtagaaagttttttaaattctaaacaggatttagtgtctttagttatcttgctggatgggaaagggatgttgtcatttctggcacaaatgaaaagtaggacggaaagctcctttcattcagtttatctttccaggatatatgaaaagggaccagctggaagactagcctcactctgtcctcgaaagcctgagctttcattcaactccctatttccatgcaaagacgctgggcaaaccacatgttctgtctgagcctcagttttcctatccataaaatgaaggtagccaggcctgcctcaaagagcattcaggaggctctgagaggacatgagagtattttgcaaagtgagggcaaggcccagtgtggagtgatattgttattccaagattccactgcaaaagtggctgctttggatgccagcccaggatgagtagttcctgttctcagggaggtcatccgctgagcatcccttctgcacagatgtctctgattcttgtccttgcaggtggaggacagggcctgctcccctaagctgggaagcctggaatgacctcttgcacaagcctaaattccaggaatcttccccaaatcccagatcctctgcaatctacctgcacccctgacccacccaggagttggaccgggagttgggaagcctaggtcttagtcctacactccttctaatttgctgtgtaaccttaccattaatctctctgggtctcagttttctcatctgtattggaggtagcagtgctagctctgccttcaggcatgcaatatgccagaactacagacaacagcccacaggatgcaaaagtgctttgccatcttaaaaatgccagatcactcagagcctatgaatgtggatatcaacaccaggtctctagcaccgctggatgaaaggagaaggctagaggctgagggaggaaagagcagttaacaaacaaaggcagtagctcatcacttgggtagcaggtacccattttaggaccctacactcaaatgtgcaaaataaaatttctatcattttgctataaaaaaaaaaaaaaaaaaaaa

SEQ ID NO: 115447 - DNA, 738 bp, Artificial Sequence
  derived and/or modified sequence
atgtgtgccgaggtcggcccagccctgtgcagaggcatggaacgtaattctctgggctgctgtgaggccccaaaaaaactttctctgagtttttctatagaggccatcctgaaacggccagctcgaagaagcgatatggatcgacccgaaggccctggagaagaaggacctggtgaggcagcagcctctgggagcggcttagagaagccaccaaaggatcaaccacaggaagggcgcaaatcaaagaggcgcgtccgaaccacattcactactgagcagctccacgaactcgagaagatcttccatttcacccattacccagatgtacacatcagaagccagctggcagcccgcatcaatttgcctgaggcccgagtgcaaatttggttccagaaccagcgcgccaagtggcgaaagcaggagaagatcggcaatctaggcgccccgcaacagctgtctgaggcttcagtagcccttccaacaaacctagacgtcgccggacccacctggacctctactgctctgcgacgactcgctccccctacatcatgctgcccatccgcacaggaccagcttgcttcagcttggtttccggcatggataacactactgccagcacatccctgggagacccagcccgttcctgggctgcccattcatcagacctgcatccctgtcctttgtatcctgccacccccacacccaaagtgggggtctatctgcgctacatccacgtag

SEQ ID NO: 115448 - DNA, 738 bp, Artificial Sequence
  derived and/or modified sequence
atgtgtgccgaagtcggccccgcattgtgccgcgggatggagcgtaactcactggggtgctgcgaagcacccaaaaaactatccctgtctttcagcattgaagctattctcaagcgcccagccagacgatctgacatggataggccagaggggcccggagaggaaggccccggtgaggctgctgctagcggatctgggctagagaagcctcctaaggatcagccccaggagggacgtaaaagcaagcgccgagtcagaactacctttacaactgagcagcttcacgaactggaaaaaatattccactttacccactatcccgacgtgcacattaggagccagctcgctgcgcgaataaatctgcccgaggcgcgggtacagatctggttccagaatcagagggccaaatggcggaaacaggagaaaatcggcaatctgggggcgccccaacagctgtcagaggcaagtgtggctctccctaccaacctggacgtagccggccccacatggacctcgacggccctgcggagactggccccgcccacatcgtgctgcccctctgcccaggatcagttagcctccgcatggttcccggcttggatcactctgctacccgcccatccctgggaaacccaaccagttcctggcctgcctatccatcaaacttgcatccctgtgctgtgcatcttacctccaccacacccaaagtggggcagtatatgcgcaacttcaacctag

SEQ ID NO: 115449 - DNA, 3384 bp, Artificial Sequence
  derived and/or modified sequence
agatcaacaactgtcagctcccagtcagagagaaagggcctcttcagtctgtctcaggagactgggagaaacagcataaaggaccccacaaggaagggagaggtaccctgggtcaggcgcttgtggagagagggcttcgcatgtaaagtgacgtcagggaaaatagaacagaaaaaaagccagggccagcccagaggcacctgagaagaatcagacccacagctcagcccagccctggcacagagaagagacaggcctggcagcacccagggaccccctttcctcagcctccacctgcaggacagcaggagcactgatgcgctgaaggtacgttctggagtctggaagcagcagaactgaaggaagtaaacacgggtgtctgggaagacccctcaagctgcagtaaagcccaggactgaattggccacctgaggccaagggtggcactccaacctcctcctaaaggctggctagagccacaggaaagggccagaagccagagaaagggcaaaggtggacccctgcctccaaacctcctctggagactgacctcctctttcctgtgccttattgtttctccctcttctctttgttcgccactgggcggtgacctcagggatcctggcctaacctggtgattgtgcaggcaactgtgtccgagaagacccttctctggaagattgaaccccaattcagccatggtgactcctttgatgtcaaactggtaagggctgagccgtgggcacaggataccactccttccagctcttctgctgtgacctgcccatggaagtccctgtggacacgaaatcctgtttggatcatctaactggaggctctctgttcttcacctccacgcgccctcttgaccccaggaggttcaggggaggaagtacgccactctccactggcaccctccttggcctacacagagtcacccctgagcccctcaatgtgtgctgaggtgggccctgctctctgcaggggtatggagagaaatagcttggggtgctgtgaggccccgaagaagctgagcctgtccttctccattgaggcgatcctaaagaggcctgccaggaggagtgatatggacagaccagaagggccaggtgaagagggccccggagaagctgcggcctcaggctctgggctagaaaagcctccaaaggaccagccccaggaaggaaggaagagcaagcggagggttcgtaccaccttcaccactgagcagctgcatgagctggagaagatcttccactttacccactacccagacgttcacatccgcagccagctggcagccaggatcaacctcccagaagctcgggtgcagatctggttccagaatcagcgagccaagtggcggaagcaggagaagattggcaacctgggggctccacagcagctgagtgaagccagtgtggccctgcccacaaatctggatgtggctgggcccacgtggacatccactgctctgcgcaggctggctcctcccacgagctgttgtccatcggctcaagatcagctggcctctgcctggttccctgcctggatcaccctcctcccagcgcacccatgggaaacacagcctgtcccaggtcttcccatccatcaaacttgcatccctgtgctatgcatccttccacctccacaccccaaatggggcagcatctgtgctacttcaacatagagattggacatgctctccccaaatgagccactttcctctccaggtgaaggcaggtagcagatgtgccctgggcctctggggaaatcgatttcacaatccaaaaatggcccacagcccaggaagctaccctgaacatgccagttggaaggctgcaccagactcaaaagcaaactaaacaataaaggacagctctcttctctcctggctaaagctgctctcctggttcagaagacaggctggatgagatctcaggccgagctctgaaatagggaggtaatcctccagcacctgtgtttcctctaacttgctgtgtgacctccagccggtcactcaccctctctggacctcatctgtaagaggagccagctggataagatgatttctgaagacgcttccatggtgggcactgaggcacagaggaggccaaggagaggttgtttgttcatgcatgcattcatccgtgacacatgagtacctactgaggactccataaacagaacgggatacagagataaacaatttgggttctgtccacgtttgtcaaaaggtggtgctggcccacctctgaaagcagaacacttgctcaacaaccttgctgttggcccaagtctaacacattctttatgactgtgagcatctcagagtgagagaaaaatgtagaaagttttttaaattctaaacaggatttagtgtctttagttatcttgctggatgggaaagggatgttgtcatttctggcacaaatgaaaagtaggacggaaagctcctttcattcagtttatctttccaggatatatgaaaagggaccagctggaagactagcctcactctgtcctcgaaagcctgagctttcattcaactccctatttccatgcaaagacgctgggcaaaccacatgttctgtctgagcctcagttttcctatccataaaatgaaggtagccaggcctgcctcaaagagcattcaggaggctctgagaggacatgagagtattttgcaaagtgagggcaaggcccagtgtggagtgatattgttattccaagattccactgcaaaagtggctgctttggatgccagcccaggatgagtagttcctgttctcagggaggtcatccgctgagcatcccttctgcacagatgtctctgattcttgtccttgcaggtggaggacagggcctgctcccctaagctgggaagcctggaatgacctcttgcacaagcctaaattccaggaatcttccccaaatcccagatcctctgcaatctacctgcacccctgacccacccaggagttggaccgggagttgggaagcctaggtcttagtcctacactccttctaatttgctgtgtaaccttaccattaatctctctgggtctcagttttctcatctgtattggaggtagcagtgctagctctgccttcaggcatgcaatatgccagaactacagacaacagcccacaggatgcaaaagtgctttgccatcttaaaaatgccagatcactcagagcctatgaatgtggatatcaacaccaggtctctagcaccgctggatgaaaggagaaggctagaggctgagggaggaaagagcagttaacaaacaaaggcagtagctcatcacttgggtagcaggtacccattttaggaccctacactcaaatgtgcaaaataaaatttctatcattttgctataa

SEQ ID NO: 115450 - DNA, 5745 bp, Artificial Sequence
  derived and/or modified sequence
agatcaacaactgtcagctcccagtcagagagaaagggcctcttcagtctgtctcaggagactgggagaaacagcataaaggaccccacaaggaagggagaggtaccctgggtcaggcgcttgtggagagagggcttcgcatgtaaagtgacgtcagggaaaatagaacagaaaaaaagccagggccagcccagaggcacctgagaagaatcagacccacagctcagcccagccctggcacagagaagagacaggcctggcagcacccagggaccccctttcctcagcctccacctgcaggacagcaggagcactgatgcgctgaagggatcctggcctaacctggtgattgtgcaggcaactgtgtccgagaagacccttctctggaagattgaaccccaattcagccatggtgactcctttgatgtcaaactggtaagggctgagccgtgggcacaggataccactccttccagctcttctgctgtgacctgcccatggaagtccctgtggacacgaaatcctgtttggatcatctaactggaggctctctgttcttcacctccacgcgccctcttgaccccaggaggttcaggggaggaagtacgccactctccactggcaccctccttggcctacacagagtcacccctgagcccctcaatgtgtgctgaggtgggccctgctctctgcaggggtatggagagaaatagcttggggtgctgtgaggccccgaagaagctgagcctgtccttctccattgaggcgatcctaaagaggcctgccaggaggagtgatatggacagaccagaagggccaggtgaagagggccccggagaagctgcggcctcaggctctgggctagaaaagcctccaaaggaccagccccaggaaggaaggaagagcaagcggagggttcgtaccaccttcaccactgagcagctgcatgagctggagaagatcttccactttacccactacccagacgttcacatccgcagccagctggcagccaggatcaacctcccagaagctcgggtgcagatctggttccagaatcagcgagccaagtggcggaagcaggagaagattggcaacctgggggctccacagcagctgagtgaagccagtgtggccctgcccacaaatctggatgtggctgggcccacgtggacatccactgctctgcgcaggctggctcctcccacgagctgttgtccatcggctcaagatcagctggcctctgcctggttccctgcctggatcaccctcctcccagcgcacccatgggaaacacagcctgtcccaggtcttcccatccatcaaacttgcatccctgtgctatgcatccttccacctccacaccccaaatggggcagcatctgtgctacttcaacatagagattggacatgctctccccaaatgagccactttcctctccaggtgaaggcaggtagcagatgtgccctgggcctctggggaaatcgatttcacaatccaaaaatggcccacagcccaggaagctaccctgaacatgccagttggaaggctgcaccagactcaaaagcaaactaaacaataaaggacagctctcttctctcctggctaaagctgctctcctggttcagaagacaggctggatgagatctcaggccgagctctgaaatagggaggtaatcctccagcacctgtgtttcctctaacttgctgtgtgacctccagccggtcactcaccctctctggacctcatctgtaagaggagccagctggataagatgatttctgaagacgcttccatggtgggcactgaggcacagaggaggccaaggagaggttgtttgttcatgcatgcattcatccgtgacacatgagtacctactgaggactccataaacagaacgggatacagagataaacaatttgggttctgtccacgtttgtcaaaaggtggtgctggcccacctctgaaagcagaacacttgctcaacaaccttgctgttggcccaagtctaacacattctttatgactgtgagcatctcagagtgagagaaaaatgtagaaagttttttaaattctaaacaggatttagtgtctttagttatcttgctggatgggaaagggatgttgtcatttctggcacaaatgaaaagtaggacggaaagctcctttcattcagtttatctttccaggatatatgaaaagggaccagctggaagactagcctcactctgtcctcgaaagcctgagctttcattcaactccctatttccatgcaaagacgctgggcaaaccacatgttctgtctgagcctcagttttcctatccataaaatgaaggtagccaggcctgcctcaaagagcattcaggaggctctgagaggacatgagagtattttgcaaagtgagggcaaggcccagtgtggagtgatattgttattccaagattccactgcaaaagtggctgctttggatgccagcccaggatgagtagttcctgttctcagggaggtcatccgctgagcatcccttctgcacagatgtctctgattcttgtccttgcaggtggaggacagggcctgctcccctaagctgggaagcctggaatgacctcttgcacaagcctaaattccaggaatcttccccaaatcccagatcctctgcaatctacctgcacccctgacccacccaggagttggaccgggagttgggaagcctaggtcttagtcctacactccttctaatttgctgtgtaaccttaccattaatctctctgggtctcagttttctcatctgtattggaggtagcagtgctagctctgccttcaggcatgcaatatgccagaactacagacaacagcccacaggatgcaaaagtgctttgccatcttaaaaatgccagatcactcagagcctatgaatgtggatatcaacaccaggtctctagcaccgctggatgaaaggagaaggctagaggctgagggaggaaagagcagttaacaaacaaaggcagtagctcatcacttgggtagcaggtacccattttaggaccctacactcaaatgtgcaaaataaaatttctatcattttgctataactggatttactttctatgttgtttgcaggaaatgtattctggtaacttctaggttactgatgcctcaggcacttcaggtttaaaggcagtcacttgagatcgttgccctctgttccccttcttcccacaggggtctttgctaggctgaggggcagggttggagaagtgtttatgcaaatgccacctccagcctcccagaggggatgtttgcttcccagctttctcagtctcctactagtgtcttatctagcctggccttgggcatgacccctctgccctagagatgtatcaccccattcaactccctattgggggttcactccacatcctccgctgtagcctctcaccacagttgtgaatcctcgctggcttcctctctttctcatgagcaagaggaaaagctgacaactatcccacacacttctagggccatgggagccctgggccaggcagcaggtctcattcattctagacctcctacagccatttctcatgccctggtgataggaaggtcatggatgagacttgcagatctccaaacttgtaagaggaatggaaaagatgcaggtcccctctgctctggggtcccactcccctttctcagcaacatactccttccccaggctcctcttgaaacaggattttctcaaccatagagattcagatgatcagatgtctcagcttcactactgaggtaaacattgattttgtgaggccacttctttccccccaggaattttctccccaataactatttttattccctttaccttatgtgtgtgggataaaggaatcactttagaactcttgccaggtgtgtgaccttgggcaagtggcatgtcccctctctgtacctgttccctggataacaacaatttcttgcctcttagagtttctgtgacaattaaatgagttaatacattttggcacatggtggacactcaagccatattaagaaaaactcattttcccaaatacaccttctacctctttctacttctgagcttgagcatccattctgatctcaagctctattccaggagttcttaaaccagtctccaggaagtcaaggagctcccaagagactatgcaaaattgtgtgtatctgtgtgtttattttttctagggaaagggttcattgctttcatcagcttttcaaagagctctggggcataaaaaataataataataaagaatctctgtcagacatatctgagtcagatcttgacagcttcatattctagctgtgaggactacagacttgagagaagatgaaggataactattttagaaaggtaaaataaaaaaatattgctatggtttgaatgtgtcccccaaaaaatgtgtgtcagaaacctaatcaccgttgtaacagtgttaagaggtagaacttttaagaggtgattaggccatgagtctctgtccttatgaatggattaatgttgttattaccagaatgtgttccttataaaaggataagttcagaatctctctctctccaccccccaacccccggcaccttctctccccttctctcctccactcctccaccattttccttccaccatggtatgacacaccttgacagcaagaaggccctcaccagatgccagtcccttgttcttggacttcccagcctccagaaccatgagccaataaatttcttttcatatattaattacccaagctgtggtatgctgtaatagcagcacaaaatgaactaaggaaaatagaaaatgaacaaatgcccaagttttatttagctcattaattaatgagagaactgctaagatgtcataaccagctcaaaggtgaacatgcacacatattaaaggaacagacaagcatacaggcaatcaggaatgctgaaatgaattacaaataaagaaaaacaagagtcaatagccatagggaaacaatcaatttcatctccaccaagcatgacttatttgcatttctagtgacaagaatcactttcatttctaaccattctctactcattgaagttgaaaaatagctcaaagataataaagatgcagatattctgaaagaatgtgctagacaaaataccctgtaatctttatgggcccttttcaaaatctttcaaaaatttgtacccgcataaagttactttgtctatctgaatctcactttcctcatccattaaatggggatgaccacctgcctcagaagattgccatgaagattatattagatgatgtgcgtatagtttgtgcgaataaaacactttgagtgtaggaaatctttattgcttttcaagctcctctagaactcaagtttaaaagcccatatctgtaaagtgttttgaactacagtaatatttctttaatatccatccaccttttatagttcaatttcttaaaaggctaacccagaggccaagttgggtggatcacgaggtcaggagatcgagaccatcctggctaacatggtgaaaccccgtctctactaaaaatacaaaaaattagccgggcgtggtggtgggtgcctgtagtctcagctactagggaggctgaggcaggagaatggcataaacccagaaggcggagcttgcagtgagccaagatcatgccactgcactccagcctgcgcgacagagcaagactccatctgaaaaaaaaaaaaaaaa

SEQ ID NO: 115451 - DNA, 738 bp, Artificial Sequence
  derived and/or modified sequence
atgtgtgccgaggtgggccctgccctgtgccggggcatggagaggaacagcctgggctgctgtgaggcccccaagaagctgagcctgtccttcagcattgaggccatcctgaagaggcctgcccggcggagtgacatggacaggcctgagggccctggagaggagggccctggagaggccgccgccagcggcagcggcctggagaagccacccaaggaccagccccaggagggcaggaagagcaagagaagagtgaggaccaccttcaccacagagcagctgcacgagctggagaagatcttccacttcacccactacccagatgtgcacatccgcagccagctggccgcccgcatcaacctgcctgaggcccgggtgcagatctggttccagaaccagagggccaagtggaggaagcaggagaagattggcaacctgggcgccccccagcagctgtctgaggcctctgtggccctgcccaccaacctggatgtggccggccccacctggaccagcacagccctgcggcggctggccccacccaccagctgctgccccagcgcccaggaccagctggccagcgcctggttccctgcctggatcaccctgctgcctgcccacccctgggagacccagcctgtgcccggcctgcccatccaccagacctgcatccctgtgctgtgcatcctgcccccaccccaccccaagtggggcagcatctgtgccaccagcacctag

SEQ ID NO: 115452 - DNA, 738 bp, Artificial Sequence
  derived and/or modified sequence
atgtgcgccgaggtgggccccgccctgtgccggggcatggagcggaacagtctcggatgttgtgaggcacccaaaaaattgtccctgagtttcagcatcgaagctatcctgaaaaggccggcgcgtcgatctgatatggacagacctgagggcccaggagaggaggggcctggcgaggccgctgctagcggctccggactcgaaaaacctcctaaggaccagcctcaggagggcagaaagtcaaaacgaagagtacgcactacttttactaccgagcagctccatgaactggaaaaaatttttcacttcacccactaccctgatgtgcatatccgatctcaactcgctgccaggattaatctcccggaagctagagtacagatctggttccagaatcagagagctaagtggagaaagcaggaaaagatcggcaacctaggggccccccaacaactcagcgaagcatccgtggcgctgcctactaacctagatgtggccggcccgacttggaccagtaccgctttgagaaggctggctccgcctacctcatgttgcccatcagctcaagaccaactggcctcagcctggttccccgcatggatcaccctgctgcccgcccatccttgggagacacaacctgtgccgggtctgccgatccatcagacgtgcatcccggttctgtgcattctgcccccgccgcatcccaagtggggatccatctgtgcaaccagcacgtag

SEQ ID NO: 115453 - DNA, 738 bp, Artificial Sequence
  derived and/or modified sequence
atgtgcgccgaggtgggccccgccctgtgccggggcatggagcggaacagcctgggttgttgcgaggctcccaaaaagttgagtctttccttttctatcgaggcgattctaaaacggcctgcccgccgctccgacatggatcgccccgaggggccaggcgaagagggccccggagaagccgcagcctctggttctggtctggagaagccaccaaaggaccagccacaagagggccgcaaaagtaagcggcgtgtgaggactacatttacaaccgagcagttgcacgaactcgagaagatcttccacttcacccattatccggatgtccacattcgatctcagctggccgcccgaatcaacctccctgaggcccgagtacaaatctggtttcagaatcagcgagcaaaatggagaaagcaggaaaaaatcggaaacttgggggctccccagcagctttcggaggctagcgtggccctgccaacaaacctggacgtagctggccccacttggaccagcaccgccttgcgcaggcttgctccccctactagctgttgcccctcagcgcaggatcaactggcttcagcttggtttcccgcctggatcaccctgctgcctgcacacccatgggaaacccagccagttcctggcctcccgatccatcagacatgtatcccagtgctttgcattcttccgcccccccatcccaaatgggggagtatatgcgctacatccacctag

SEQ ID NO: 115454 - DNA, 738 bp, Artificial Sequence
  derived and/or modified sequence
atgtgtgcagaggtaggccctgcactgtgccgcggtatggagcgaaattctcttggctgttgcgaagcgccaaagaagttgagcctatccttttctattgaagctatcttaaagagaccagccagacggagtgacatggacagacccgaaggtcccggtgaagagggacctggggaggccgcagccagcggttccggcctcgagaagccaccgaaggatcagccgcaggagggccgtaagagcaaacgacgagtaagaacaacatttactacggaacagcttcatgagctggagaaaattttccatttcacacattaccccgacgtgcacatcaggagtcagctcgccgcacgcatcaacctgccagaggcacgagttcaaatttggtttcagaaccagagagccaagtggaggaagcaagagaaaattggaaaccttggagctccccagcagctttccgaggcctctgtggccctacccacaaatcttgacgtggcaggaccgacctggacttctaccgctctgcgccgactcgcgccaccaacctcatgttgcccaagcgctcaggatcagcttgcgtccgcctggtttcctgcatggatcaccctgcttccagctcacccttgggaaacccaaccagttccaggacttcctatccaccaaacttgtatccccgtcctttgtatcttgccgcctccacacccgaaatgggggagcatctgcgctacctcaacctag

SEQ ID NO: 115455 - DNA, 738 bp, Artificial Sequence
  derived and/or modified sequence
atgtgtgctgaagtagggccagcgctctgcaggggtatggaacgaaatagtctgggttgctgtgaggctcccaagaagttatccctcagcttctcaatcgaggctatactcaaacgcccagcaagaagatccgacatggatcgccctgaagggccaggggaggaagggccaggagaggcagctgcgtccgggagtgggttggaaaagcctcccaaggaccaaccgcaggagggcaggaagtctaagagacgagtgcggactactttcaccactgaacagcttcacgaactggaaaagatattccactttacccactacccagacgtccatatccggagtcagcttgcagccaggattaaccttcctgaagccagggtgcagatctggtttcagaaccaaagagccaagtggcggaagcaggagaagattgggaacctcggagcaccccagcagctttccgaggcatctgtggcccttcctacaaacttagatgtggctggccctacttggaccagtaccgccctacggcgtctggcacccccaacctcatgttgtccatctgcacaggaccagttggcaagtgcctggttccctgcatggataacactcctgccggctcacccctgggaaacccagccagttcccggactgcctattcaccagacctgtattccagtgctgtgtattctgccccctccgcaccccaaatggggatccatttgtgctacttctacctag

SEQ ID NO: 115456 - DNA, 738 bp, Artificial Sequence
  derived and/or modified sequence
atgtgcgccgaggtgggccccgccctgtgcagaggcatggagagaaacagcctgggctgctgcgaggcccccaagaagctgagcctgagcttcagcatcgaggccatcctgaagagacccgccagaagaagcgacatggacagacccgagggccccggcgaggagggccccggcgaggccgccgccagcggcagcggcctggagaagccccccaaggaccagccccaggagggcagaaagagcaagagaagagtgagaaccaccttcaccaccgagcagctgcacgagctggagaagatcttccacttcacccactaccccgacgtgcacatcagaagccagctggccgccagaatcaacctgcccgaggccagagtgcagatctggttccagaaccagagagccaagtggagaaagcaggagaagatcggcaacctgggcgccccccagcagctgagcgaggccagcgtggccctgcccaccaacctggacgtggccggccccacctggaccagcaccgccctgagaagactggccccccccaccagctgctgccccagcgcccaggaccagctggccagcgcctggttccccgcctggatcaccctgctgcccgcccacccctgggagacccagcccgtgcccggcctgcccatccaccagacctgcatccccgtgctgtgcatcctgccccccccccaccccaagtggggcagcatctgcgccaccagcacctag

SEQ ID NO: 115457 - protein, 694 aa, Artificial Sequence
  derived and/or modified sequence
MALGKLRPPTPPMVILEPYVLSELPPISHEYYDPAEFMEGGPQEADRLDELEYEEVELYKSSHRDKLGLMVCYRTDDEEDLGIYVGEVNPNSIAAKDGRIREGDRIIQINGVDVQNREEAVAILSQEENTNISLLVARPESQLAKRWKDSDRDDFLDDFGSENEGELRARKLKSPPAQQPGNEEEKGAPDAGPGLSNSQELDSGVGRTDESTRNEESSEHDLLGDEPPSSTNTPGSLRKFGLQGDALQSRDFHFSMDSLLAEGAGLGGGDVPGLTDEEYERYRELLEIKCHLENGNQLGLLFPRASGGNSALDVNRNESLGHEMAMLEEELRHLEFKCRNILRAQKMQQLRERCMKAWLLEEESLYDLAASEPKKHELSDISELPEKSDKDSTSAYNTGESCRSTPLLVEPLPESPLRRAMAGNSNLNRTPPGPAVATPAKAAPPPGSPAKFRSLSRDPEAGRRQHAEERGRRNPKTGLTLERVGPESSPYLSRRHRGQGQEGEHYHSCVQLAPTRGLEELGHGPLSLAGGPRVGGVAAAATEAPRMEWKVKVRSDGTRYVAKRPVRDRLLKARALKIREERSGMTTDDDAVSEMKMGRYWSKEERKQHLIRAREQRKRREFMMQSRLECLREQQNGDSKPELNIIALSHRKTMKKRNKKILDNWITIQEMLAHGARSADGKRVYNPLLSVTTV

SEQ ID NO: 115458 - DNA, 2085 bp, Artificial Sequence
  derived and/or modified sequence
atggctcttggcaagttgaggcctcctacaccacccatggtcattctggaaccatacgtattgagcgaattgcccccgatcagccacgaatactatgacccagctgagtttatggaaggcggtccgcaggaggccgatcggctcgacgaattagagtacgaggaagttgaactgtataagagcagccaccgagacaaactaggactgatggtatgttaccggacggatgacgaagaagacttaggaatctatgtcggagaggtgaacccgaacagcatcgccgcaaaagatgggcggatccgagagggagatcggatcatacagatcaacggggtggatgtgcagaaccgagaagaggcagtggccattctgtctcaggaagaaaatacaaacatctcgttactggtggctcgacccgagtctcaactggcaaagagatggaaggatagcgatagggacgacttcctggacgattttgggagtgagaatgagggagaactaagagcccggaagctgaaatcccctccagcccagcagcccggcaacgaggaggagaaaggagcacccgatgccggtcctgggctgagcaacagtcaggagctggactccggcgtgggaaggaccgatgagagtacccggaacgaagagagtagcgagcacgatttgctgggtgacgaaccaccctcgagcaccaataccccaggatccctgcgaaagttcggcctgcaaggtgacgccctgcagagccgcgatttccatttcagtatggattccctactggcagaaggggccgggctaggcggcggtgacgttcccgggctgaccgatgaggaatatgaaaggtatcgtgagcttctagaaattaagtgccatctggagaacggcaatcaacttgggctgctgtttccgagagctagcggtggcaattccgccctggacgtaaataggaatgaatctcttggccacgagatggccatgcttgaggaggaactaaggcatctcgagtttaagtgtcggaacatcctgcgcgcccagaaaatgcaacaacttcgagagcgatgtatgaaggcctggcttttggaagaagaaagtctgtacgacttggcagctagtgaacctaaaaagcatgagctgagtgacatctcagaactgccggagaaatccgacaaagactccacatcagcatacaatactggcgaatcatgtcgctctactcccctgttggttgagcccctccctgagtctcctctccgccgggctatggccggtaatagcaatcttaatcgcacaccgccaggcccggccgtcgccactcctgctaaggccgcaccgcctccaggcagtccagcgaagttccgctctctgtcacgtgatcccgaagcaggccgaagacagcacgctgaagagagaggaaggagaaatcctaagacaggcttgacactggagagggtgggacctgagtcatcaccctacctttctcggcgtcaccgcggtcagggtcaggagggcgagcactaccacagctgcgtccagctggctcccacacggggtctggaagaacttgggcacggccccttgtcattagctggggggcctcgtgtggggggcgttgccgccgctgcaaccgaagcaccaaggatggagtggaaggtgaaggtgcggtcagacggaacaagatatgtggcgaaacgcccggtgcgtgaccggctactgaaagctagggccctgaagattcgcgaggagagatccggcatgaccaccgacgatgatgctgtcagcgagatgaaaatgggccggtactggagtaaagaggaacgcaaacagcatctgattcgcgctcgggagcagagaaagcggagggaatttatgatgcagagtagacttgaatgcctccgcgaacaacaaaatggcgattccaagccggaactcaacattattgcactcagccatcgtaagaccatgaagaaaagaaacaaaaaaattctagacaattggattacaatccaggaaatgcttgcacacggtgccagatcggctgatggaaaacgcgtttacaatccacttctatctgtgacgacagtatag

SEQ ID NO: 115459 - DNA, 2085 bp, Artificial Sequence
  derived and/or modified sequence
atggccctgggcaagctgcggccccccaccccacccatggtgatcctggagccctacgtgctgtctgagctgccccccatcagccatgagtactatgaccctgctgagttcatggagggcggcccccaggaggccgaccggctggatgagctggagtatgaggaggtggagctgtacaagagcagccaccgggacaagctgggcctgatggtgtgctacagaacagatgatgaggaggacctgggcatctacgtgggggaggtgaaccccaacagcattgctgccaaggatggccgcatccgggagggggaccgcatcatccagatcaacggggtggatgtgcagaaccgggaggaggccgtggccatcctgagccaggaggagaacaccaacatcagcctgctggtggcccggcctgagagccagctggccaagcgctggaaggacagcgacagagatgacttcctggatgactttggaagtgaaaatgaaggagagctgcgggccaggaagctgaagagccccccagcccagcagcctggaaatgaggaggagaagggggccccagatgctggccctggcctgagcaacagccaggagctggacagcggcgtgggccgcacagatgagagcaccagaaatgaggagagcagcgagcatgacctgctgggagatgagccccccagcagcaccaacaccccaggcagcctgaggaagtttggcctgcagggagatgccctgcagagccgggacttccacttctccatggacagcctgctggccgagggcgccggcctgggcggcggagatgtgcccggcctgacagatgaggagtatgagcgctaccgggagctgctggagatcaagtgccacctggagaatggaaaccagctgggcctgctcttcccccgggccagcggcggcaacagcgccctggatgtgaacagaaatgaaagcctgggccacgagatggccatgctggaggaggagctgcggcacctggagttcaagtgcaggaacatcctgcgggcccagaagatgcagcagctgcgggagcgctgcatgaaggcctggctgctggaggaggagagcctgtatgacctggccgccagcgagcccaagaagcatgagctgagtgacatcagcgagctgcctgagaagagtgacaaggacagcaccagcgcctacaacacaggagagagctgccgcagcacccccctgctggtggagcccctgcctgagagccccctgcggcgggccatggccggcaacagcaacctgaacagaacacctcctggccctgctgtggccaccccagccaaggccgcccctcctcctggcagccctgccaagttccgcagcctgagccgggaccctgaggccggccggcggcagcacgccgaggagcggggcagaagaaaccccaagacaggcctgaccctggagcgggtgggccctgagagcagcccctacctgagccgccgccaccggggccagggccaggagggggagcactaccacagctgtgtgcagctggcccccacccggggcctggaggagctgggccacggccccctgagcctggccggcggcccccgggtgggcggcgtggccgccgccgccacagaggcccccaggatggagtggaaggtgaaggtgcggagtgatggcacccgctacgtggccaagaggcctgtgcgggaccggctgctgaaggcccgggccctgaagatccgggaggagaggagcggcatgaccacagatgatgatgctgtgtctgagatgaagatgggccgctactggagcaaggaggagaggaagcagcacctgatccgggcccgggagcagaggaagagaagagagttcatgatgcagagccggctggagtgcctgcgggagcagcagaatggagacagcaagccagagctgaacatcatcgccctgagccacaggaagaccatgaagaagaggaacaagaagatcctggacaactggatcaccatccaggagatgctggcccacggggcccggtctgcagatggcaagagggtgtacaaccccctgctgtctgtgaccaccgtgtag

SEQ ID NO: 115460 - DNA, 2085 bp, Artificial Sequence
  derived and/or modified sequence
atggccctgggcaagctgcggccccccaccccccccatggtgatcctcgaaccctacgtgctttccgaactgcctcctatatctcacgagtattatgatccggccgagttcatggagggtggaccacaggaagccgatcggcttgacgagcttgaatacgaggaagtcgagctgtataagtccagccatcgggataagctgggcctgatggtctgctatcgcaccgacgatgaggaggacctgggaatctacgtcggcgaggtcaaccccaattccatagccgccaaggacggccggattagagagggtgacagaatcatccaaattaatggtgtagacgtgcaaaaccgggaggaggctgtggctatcttgagtcaggaagaaaatactaacatctctttgctcgtcgcccgccccgaatcacagctggcaaagagatggaaggattcagatagagatgactttctggatgattttggttctgagaacgaaggcgaactccgggccaggaaactcaaaagcccccccgcccagcagccagggaacgaagaggagaaaggggcaccagacgcaggccctggcttaagcaactcccaggaactcgatagtggcgtcgggcgcaccgacgaaagcactcggaatgaagaatcatcagagcacgaccttttgggggacgagccccccagctccacgaacacgccagggagtctccggaaatttggcctccagggcgatgccctgcagtctcgggatttccatttcagcatggactccctgctcgcagagggagccggtctcggcggcggtgatgtgcctgggctcacagacgaggaatacgagcgataccgggaactcctagaaatcaagtgtcacctcgagaacggcaaccagcttggattgctgttccctcgtgcctctggcggtaactcagccttagacgtgaacagaaacgagtctctgggccatgagatggcaatgctcgaagaagaactgcggcacttagaattcaagtgtagaaacatcctgcgggcacagaagatgcagcagctgcgggaacgatgtatgaaagcttggttactggaggaggagtcactgtacgatctggctgcgtctgagcctaaaaagcatgaactgtctgatatcagcgagctgcccgagaaaagcgacaaagacagtacatccgcatacaacaccggcgagagctgccgcagcaccccactgctagttgaaccactcccagagtccccactccgacgcgccatggcgggaaactccaacctgaataggacaccacccggtcctgccgtcgcaacccctgccaaagccgcacctccaccaggaagtcctgctaagttcagatctttgtcccgcgatcctgaagccggccgaaggcagcatgcggaagaacgggggcgtcgcaaccctaagaccggattgactcttgaacgtgtggggcctgaatcctcgccatacttaagcaggaggcacaggggccagggccaggagggcgaacattatcatagctgcgtgcagttggcgcctaccagaggcctggaggaactcggacacggaccattatcattagccggcggtccacgggtagggggcgtggccgctgcggctaccgaggcaccacggatggaatggaaagttaaagttcggtctgacggaacacgatatgtcgctaagaggccagtgcgtgatcgccttctgaaggcgcgtgcactgaagattagggaggagcgctctggcatgaccaccgacgatgacgccgtgtctgaaatgaagatgggcagatattggtcgaaggaagagcggaagcaacacctaatacgagcccgcgagcagagaaagcggagggaattcatgatgcagagccgactggagtgtctgcgcgagcagcagaacggagacagcaaacctgagttgaacattattgccctttcccatcgaaaaactatgaaaaagagaaataagaaaattctggacaactggatcaccatccaggaaatgctggctcatggcgcccgctctgctgacggaaaacgagtgtacaaccccctgctgtcagtgacaactgtctag

SEQ ID NO: 115461 - DNA, 3617 bp, Artificial Sequence
  derived and/or modified sequence
gtgcggggggcgccgaatctagatcccggcgggcctggagcgtgggagtgcgtgggcgtccccgggcgcggtccaagtccgtccgggggctgggtgcccaccccgacacccactcccgcctggccctgcccgaacgatgggctcccgggccttaggcgtctcgggtgaacgggaaggagctctccaagctgtctcaggagcaaactctgcaggccctgcgctcctccaaggagcccctggtgatccaggtgctgagacgcagcccccgcctccggggggacagctcctgtcacgacctgcagctggtggacagtggcactcagaccgacatcaccttcgagcatatcatggcgctgggcaagctgcgtccgcccaccccgcccatggtcatcctggagccgtacgtcctctctgagctccccccaatcagccatgagtattatgacccggcggagtttatggagggcggcccgcaggaggcagaccgcttggatgagctggagtatgaggaggtggagctgtataaaagcagccaccgggacaagctgggcctgatggtttgctaccgcacggacgacgaggaggacctgggcatttatgtcggagaggtaaatcccaacagcattgcagccaaagacggccggatccgtgagggagaccgcatcatccagattaacggtgtagacgtccagaaccgggaagaggcggtggccatcctgagccaggaagagaacaccaacatctccctgctggtggcccgacctgagagtcagctggcgaaaaggtggaaggacagcgaccgggatgacttcctggatgactttggctctgagaatgagggggagctgcgtgctcgtaaactgaaatcaccccctgcccagcagcccggaaacgaagaggagaagggggctcccgatgccggcccaggcctgagcaacagccaggagctggacagcggggtgggccggactgacgagagcacccggaacgaagagagctctgagcacgacctgctgggggacgaacccccgagctccaccaacaccccgggaagcctgcgcaagtttggcctgcaaggggacgccctgcagagccgggacttccatttcagcatggactctctgctggccgagggggcggggctgggagggggcgacgtcccgggcctcacggatgaggagtatgagcgctaccgtgagctcctggagatcaagtgccacctggagaacggcaaccagctgggcctcctctttccccgggcctccggaggcaacagcgccctggacgtcaaccgcaacgagagcctgggccacgagatggccatgctggaggaggagctaaggcacctggaattcaagtgccgcaacatactgcgggcgcagaagatgcagcagctgcgtgagcgctgcatgaaggcctggctgctggaggaggagagcctctacgacctggcggccagcgagcccaagaagcacgagctgtccgacatctccgagctgcccgagaagtcggacaaggacagcaccagcgcctacaacactggggagagctgccgcagcaccccgctgcttgtggagcccctgcccgagagccccctgcggcgggccatggccggcaactccaacttgaaccggacccctcccggccccgctgttgccacccccgccaaggcagctcctccaccggggagccccgccaagttccggtccctctcccgggatcctgaggccggccggaggcagcacgcggaggagcgcggccgccgcaaccccaagacggggttgaccctggagcgtgtgggccctgaaagcagcccttacctctcgcggcgccaccgcggccagggccaggagggcgagcactaccacagctgcgtgcagctggccccgacgcgaggcctggaggagctgggccacggccccctgagcttggccggtggccctcgggtgggcggggtggcggccgcggccactgaagcaccgcgcatggagtggaaagtgaaggtgcgcagcgacggaacccgctacgtggccaagcggcccgtgcgagatcggctgctgaaagcccgtgccctgaagatccgggaggagcgcagcggtatgacgaccgacgacgacgcggtgagcgagatgaagatgggccgctactggagcaaggaggagcggaagcagcacctgatccgggcccgtgagcagcggaagcggcgcgagttcatgatgcagagccggctggagtgcctgcgggagcagcagaatggcgacagcaagcccgagctcaacatcattgccctgagccaccgcaaaaccatgaagaagcggaacaagaagatcctggacaactggatcaccatccaggagatgctggcccacggcgcgcgctccgccgatggcaagcgggtctacaaccctcttctctcagtcaccaccgtgtgagctgcccgggcgggtacacggcccaggcccagggaaccccctggggccccggccctcactctcctatagagattgtgtgtgtgtgtgtgtgcgcgcgcgcgtgctcgctgtgcgcacgcacacatctcctcgtctgggtgtgcgcacagggctttgttagcagagagaagcccctgaggagaagggacgcttttcttccttctgcccaagtaaagtgaccatgccagtggccagcactgggggcacacctgtgatgggcaccccttcagctgtgcgtgtgcattccccatcccccatgctcttgcgtgtgcttgcacgtgcacgcacacacacacccagtgctctctccacccgacccgtgtacttgcagacagggaagctgagctgaaaggagcacaagagagtgtccggcttcgctgctgagcgcggcctctccccgccgctgcgcactgcagttatttgtagacaaaggcacccctgatttttgtggtttttctccctttctgtgcttgccaatagttgttttgttttgtggacctgccctgggggctggcagctccttcaggcagcctggcagaagtggaactcccctctccactgatggctgggaagggagttggggaggaagagtgggagggagggctggggatggatgggagggaaggggagggaaaggtgggaggaatgggaagcagctgttctggtggcttccactctgaggtgtgggaacggggagcctctggggggcacctgtttccccagtgactcagagagagcaagactgcaggaacggaggggtcctgcagggtgtccaccaagaagtcacagagcccgttctgcgccccacaccatctggagcaggggcttctcttctgagtgaactgaggaaggtgcttagatggtgagggctctagaaaccaagccccatgagcagcagtggaagacctcgggccatgcggcctggggaggacttggtggcgatccgcaacctggaccccagtgagaggcggtgggctgactgggaaggagaggcccccaacctcctcaggatttgcacgtgtgaactaggctgcctgtggggtgccccttaggcttggagagccccagattggaggcagacagactgcaccaccccttccccccctgcatctcaagaataaagcaagctgcctttgtacttggttg

SEQ ID NO: 115462 - DNA, 2085 bp, Artificial Sequence
  derived and/or modified sequence
atggctcttggtaagcttaggccccctacacctccgatggttatcctcgagccctatgtcctgtctgaactgccaccaattagtcacgagtactacgaccccgctgaattcatggaaggaggcccacaggaggcagacagactcgacgaactggaatacgaggaagtggaactctataagtcttcccaccgggataaactgggcctcatggtatgctacagaacagacgacgaagaagatctcgggatttacgtcggagaagtgaatccgaactctatcgctgctaaggatggcaggatccgagaaggagatcgcatcattcagattaacggcgtggacgtccagaatcgggaagaggccgtggccatcctcagccaagaggagaacacaaatatttctctactggtggccagacctgagagtcagcttgccaagaggtggaaggacagtgatcgagatgattttctcgacgacttcgggagcgagaacgagggagaactaagagctcgtaaacttaaatctccccctgcccagcagcccggtaacgaggaagaaaagggggcaccagacgccggaccaggtctgagtaacagccaagagctagatagcggcgtgggcaggacagatgagtcaacccgcaatgaagagtcctcagagcatgacctgctaggcgacgagcctccttctagtacgaacacgccgggttctctgcgaaagttcggtctgcagggagatgccctgcagagcagagacttccatttttctatggattctctgctagctgaaggggcaggattgggcggaggggacgtcccagggctgaccgatgaggagtacgagaggtatcgagaattgctcgaaattaagtgtcatctggagaatggaaaccagctggggctgctcttcccgagggcttccggtggtaattccgcccttgatgtgaaccggaacgagagtttagggcatgagatggctatgctggaggaggaattgcgtcatttagaatttaagtgtcggaacatcctgagggcccaaaaaatgcagcagctgagggaaaggtgtatgaaagcttggctgctcgaagaagagtctctgtacgatctcgctgctagtgagccaaagaaacacgagttatccgacatcagtgaattgcctgaaaagtcggataaggattcaacatctgcttataacaccggtgaaagctgccggtctacaccgctgctcgtagagcctttgccggaaagccccctcaggcgcgctatggccggaaattccaacctcaaccgaacacctcccggaccagcggtagccacccccgctaaggctgcacctcctccaggcagccccgctaaattccgctcacttagtcgtgatccagaagcagggaggagacagcacgcagaggagcgaggtcgtcgcaacccaaaaaccgggctcactttagagcgggtgggacctgaatcctcaccctacctatcgagacgtcatcgcggacagggacaagagggagaacactatcacagctgtgtccaattagcacctacacggggtttagaggaactggggcatggccctctgtctttggccggtggccctagggttgggggtgtggccgcagccgcaacagaggctccccgaatggagtggaaggtgaaggtcaggtcagacggcacacgctacgtcgctaagcggcctgtccgggatcggttgctcaaggccagggctctgaaaatccgagaagagcggagcggcatgacaaccgacgacgatgccgtgtcggagatgaaaatgggacggtattggtccaaagaggagcgaaagcagcatctgatccgggcacgcgaacagcgcaagaggagggagttcatgatgcagtctcgcctggaatgtcttcgggagcagcaaaacggagattccaaaccagagctgaacatcatcgcactaagccatcgtaaaacgatgaagaagcgtaacaaaaagattttagataactggattaccatacaggagatgctcgcccacggagccaggtccgctgatggcaaacgggtgtacaaccctctgctctccgttacaacagtgtag

SEQ ID NO: 115463 - DNA, 2085 bp, Artificial Sequence
  derived and/or modified sequence
atggccctgggcaagctgagaccccccaccccccccatggtgatcctggagccctacgtgctgagcgagctgccccccatcagccacgagtactacgaccccgccgagttcatggagggcggcccccaggaggccgacagactggacgagctggagtacgaggaggtggagctgtacaagagcagccacagagacaagctgggcctgatggtgtgctacagaaccgacgacgaggaggacctgggcatctacgtgggcgaggtgaaccccaacagcatcgccgccaaggacggcagaatcagagagggcgacagaatcatccagatcaacggcgtggacgtgcagaacagagaggaggccgtggccatcctgagccaggaggagaacaccaacatcagcctgctggtggccagacccgagagccagctggccaagagatggaaggacagcgacagagacgacttcctggacgacttcggcagcgagaacgagggcgagctgagagccagaaagctgaagagcccccccgcccagcagcccggcaacgaggaggagaagggcgcccccgacgccggccccggcctgagcaacagccaggagctggacagcggcgtgggcagaaccgacgagagcaccagaaacgaggagagcagcgagcacgacctgctgggcgacgagccccccagcagcaccaacacccccggcagcctgagaaagttcggcctgcagggcgacgccctgcagagcagagacttccacttcagcatggacagcctgctggccgagggcgccggcctgggcggcggcgacgtgcccggcctgaccgacgaggagtacgagagatacagagagctgctggagatcaagtgccacctggagaacggcaaccagctgggcctgctgttccccagagccagcggcggcaacagcgccctggacgtgaacagaaacgagagcctgggccacgagatggccatgctggaggaggagctgagacacctggagttcaagtgcagaaacatcctgagagcccagaagatgcagcagctgagagagagatgcatgaaggcctggctgctggaggaggagagcctgtacgacctggccgccagcgagcccaagaagcacgagctgagcgacatcagcgagctgcccgagaagagcgacaaggacagcaccagcgcctacaacaccggcgagagctgcagaagcacccccctgctggtggagcccctgcccgagagccccctgagaagagccatggccggcaacagcaacctgaacagaaccccccccggccccgccgtggccacccccgccaaggccgcccccccccccggcagccccgccaagttcagaagcctgagcagagaccccgaggccggcagaagacagcacgccgaggagagaggcagaagaaaccccaagaccggcctgaccctggagagagtgggccccgagagcagcccctacctgagcagaagacacagaggccagggccaggagggcgagcactaccacagctgcgtgcagctggcccccaccagaggcctggaggagctgggccacggccccctgagcctggccggcggccccagagtgggcggcgtggccgccgccgccaccgaggcccccagaatggagtggaaggtgaaggtgagaagcgacggcaccagatacgtggccaagagacccgtgagagacagactgctgaaggccagagccctgaagatcagagaggagagaagcggcatgaccaccgacgacgacgccgtgagcgagatgaagatgggcagatactggagcaaggaggagagaaagcagcacctgatcagagccagagagcagagaaagagaagagagttcatgatgcagagcagactggagtgcctgagagagcagcagaacggcgacagcaagcccgagctgaacatcatcgccctgagccacagaaagaccatgaagaagagaaacaagaagatcctggacaactggatcaccatccaggagatgctggcccacggcgccagaagcgccgacggcaagagagtgtacaaccccctgctgagcgtgaccaccgtgtag

SEQ ID NO: 115464 - protein, 673 aa, Artificial Sequence
  derived and/or modified sequence
MTAPPISHEYYDPAEFMEGGPQEADRLDELEYEEVELYKSSHRDKLGLMVCYRTDDEEDLGIYVGEVNPNSIAAKDGRIREGDRIIQINGVDVQNREEAVAILSQEENTNISLLVARPESQLAKRWKDSDRDDFLDDFGSENEGELRARKLKSPPAQQPGNEEEKGAPDAGPGLSNSQELDSGVGRTDESTRNEESSEHDLLGDEPPSSTNTPGSLRKFGLQGDALQSRDFHFSMDSLLAEGAGLGGGDVPGLTDEEYERYRELLEIKCHLENGNQLGLLFPRASGGNSALDVNRNESLGHEMAMLEEELRHLEFKCRNILRAQKMQQLRERCMKAWLLEEESLYDLAASEPKKHELSDISELPEKSDKDSTSAYNTGESCRSTPLLVEPLPESPLRRAMAGNSNLNRTPPGPAVATPAKAAPPPGSPAKFRSLSRDPEAGRRQHAEERGRRNPKTGLTLERVGPESSPYLSRRHRGQGQEGEHYHSCVQLAPTRGLEELGHGPLSLAGGPRVGGVAAAATEAPRMEWKVKVRSDGTRYVAKRPVRDRLLKARALKIREERSGMTTDDDAVSEMKMGRYWSKEERKQHLIRAREQRKRREFMMQSRLECLREQQNGDSKPELNIIALSHRKTMKKRNKKILDNWITIQEMLAHGARSADGKRVYNPLLSVTTV

SEQ ID NO: 115465 - DNA, 2022 bp, Artificial Sequence
  derived and/or modified sequence
atgactgcacctcccatctcccatgaatactatgacccagccgaatttatggagggagggccccaagaagctgaccggctggacgaactggagtacgaagaggtcgagctgtataaaagcagccacagggataaattgggactgatggtctgctatcgcactgatgatgaagaagacctcggcatctacgttggggaggttaatcctaacagcatcgccgcgaaagacgggagaatcagggaaggagaccgaatcatccagattaacggtgtggatgtccagaatcgagaggaggctgtcgccatcttatcccaggaagaaaacaccaacatttcactgctggtagctcggcctgaatctcagctggcgaagaggtggaaggacagtgacagagacgatttcttggatgacttcggaagcgagaatgagggcgaactgcgtgcccggaaattgaaatcccctccggcgcaacaacccgggaatgaagaggaaaaaggagcccccgacgctgggcctggactctctaactctcaagagttggactccggagttgggagaacggatgaaagcactcgcaatgaagaatcttctgaacatgatcttctgggagatgaaccccccagcagtacaaatacgcctggttcccttagaaagtttgggctccaaggggatgccctgcagtctagagacttccatttctctatggatagcctgctggccgagggcgccggactcggagggggcgacgtccccggcctgactgatgaggagtatgaaagataccgcgagctgctggagattaaatgtcatctggagaatggcaatcaactggggcttctgttcccccgggcctccggtggaaattcagcgctggacgtcaatagaaatgaaagcttaggccacgagatggctatgctcgaggaggagctgaggcatcttgaatttaagtgcaggaacatcctcagagcccagaaaatgcagcagctccgggagcgatgcatgaaagcctggttacttgaagaagagtcgctttacgacttggcagctagtgagcctaagaaacacgagctttcagacatctctgagttaccagaaaagtctgataaggactctacctcagcgtacaatactggggagagttgccgttccacccccctgctcgtcgagccactgccagagtcaccactgcggcgtgccatggccggcaattctaatctcaaccgtacccctcccgggcctgcggtcgccacccccgcgaaagcagcccctccgccgggctctcccgctaagtttcgaagcctgtcaagagatcccgaagcaggcaggcggcagcacgctgaagagagaggtcgcaggaacccaaaaacaggactcacactggaaagggtgggccccgagagttccccttaccttagccgtcgccaccgagggcaggggcaagagggcgagcactatcatagttgcgtacagttggccccaacccgggggctcgaagagctggggcatgggccgttaagcctggcgggtggaccccgtgttggtggcgtcgctgccgcggccaccgaggccccccggatggagtggaaggttaaggtgcgctccgatggcacccgctatgttgcgaagaggccagttagagacaggctactcaaagcgcgggcgcttaagattcgcgaagagaggtccgggatgacaaccgatgatgacgccgtgagcgaaatgaagatgggtcggtattggtcgaaagaagagaggaaacagcatctgattagggcccgagagcaacggaagcgccgagaattcatgatgcagtcccggctcgagtgcttgcgggagcaacagaatggggactccaagcctgagttgaatatcatcgctctgtcacatagaaagaccatgaagaagaggaacaaaaagattctagacaactggatcacgattcaggagatgctggcccacggcgccaggtcagcagatggcaaacgtgtctacaaccctctgctttccgtgacaactgtatag

SEQ ID NO: 115466 - DNA, 2022 bp, Artificial Sequence
  derived and/or modified sequence
atgacagccccacccatcagccatgagtactatgaccctgctgagttcatggagggcggcccccaggaggccgaccggctggatgagctggagtatgaggaggtggagctgtacaagagcagccaccgggacaagctgggcctgatggtgtgctacagaacagatgatgaggaggacctgggcatctacgtgggggaggtgaaccccaacagcattgctgccaaggatggccgcatccgggagggggaccgcatcatccagatcaatggagtggatgtgcagaaccgggaggaggccgtggccatcctgagccaggaggagaacaccaacatcagcctgctggtggcccggcctgagagccagctggccaagcgctggaaggacagcgacagagatgacttcctggatgactttggaagtgaaaatgaaggagagctgcgggccaggaagctgaagagccccccagcccagcagcctggaaatgaggaggagaagggggccccagatgctggccctggcctgagcaacagccaggagctggacagcggcgtgggccgcacagatgagagcaccagaaatgaggagagcagcgagcatgacctgctgggagatgagccccccagcagcaccaacaccccaggcagcctgaggaagtttggcctgcagggagatgccctgcagagccgggacttccacttctccatggacagcctgctggccgagggcgccggcctgggcggcggagatgtgcccggcctgacagatgaggagtatgaaagataccgggagctgctggagatcaagtgccacctggagaatggaaaccagctgggcctgctcttcccccgggccagcggcggcaacagcgccctggatgtgaacagaaatgaaagcctgggccacgagatggccatgctggaggaggagctgcggcacctggagttcaagtgcaggaacatcctgcgggcccagaagatgcagcagctgcgggagcgctgcatgaaggcctggctgctggaggaggagagcctgtatgacctggccgccagcgagcccaagaagcatgagctgagtgacatcagcgagctgcctgagaagagtgacaaggacagcaccagcgcctacaacacaggagagagctgccgcagcacccccctgctggtggagcccctgcctgagagccccctgcggcgggccatggccggcaacagcaacctgaacagaacacctcctggccctgctgtggccaccccagccaaggccgcccctcctcctggcagccctgccaagttccgcagcctgagccgggaccctgaggccggccggcggcagcacgccgaggagcggggcagaagaaaccccaagacaggcctgaccctggagcgggtgggccctgagagcagcccctacctgagcagaagacaccggggccagggccaggagggggagcactaccacagctgtgtgcagctggcccccacccggggcctggaggagctgggccacggccccctgagcctggccggcggcccccgggtgggcggcgtggccgctgctgccacagaggcccccaggatggagtggaaggtgaaggtgcggagtgatggcaccaggtatgtggccaagaggcctgtgcgggaccggctgctgaaggcccgggccctgaagatccgggaggagaggagcggcatgaccacagatgatgatgctgtgtctgagatgaagatgggccgctactggagcaaggaggagaggaagcagcacctgatccgggcccgggagcagaggaagaggcgggagttcatgatgcagagccggctggagtgcctgcgggagcagcagaatggagacagcaagccagagctgaacatcatcgccctgagccacaggaagaccatgaagaagaggaacaagaagatcctggacaactggatcaccatccaggagatgctggcccatggagcccggtctgcagatggcaagagggtgtacaaccccctgctgtctgtgaccaccgtgtag

SEQ ID NO: 115467 - DNA, 2022 bp, Artificial Sequence
  derived and/or modified sequence
atgaccgccccccccatcagccacgagtactacgaccccgccgagtttatggagggcggaccccaggaggccgatagactagatgaactggagtacgaggaggtagaactatataaatcctcgcatagagataaactgggattgatggtgtgctatcggactgatgacgaggaagacctgggcatttatgtgggcgaggttaatccgaactcaattgcagcaaaggacggccgcatcagggagggagatcgaataatccagatcaatggggtcgatgtgcagaatagagaggaagcagtcgctattctgagtcaggaagaaaatactaacatatcactactagtcgcacggcccgagtcccagctcgcgaagagatggaaggatagtgaccgcgacgatttcctcgatgatttcggctccgaaaatgaaggagagcttcgggctcgcaaactcaaaagtccgcctgctcagcagcccggtaacgaggaggaaaaaggcgctcccgacgccggacccggcctcagcaattctcaggagctggacagcggggtcggccggacagacgaatctacccggaacgaagaatcctccgaacatgatttgctgggggacgagcctcccagcagcacgaacaccccaggcagtttgcgcaaatttggtctgcaaggtgatgctcttcaatcaagagactttcactttagcatggactcacttcttgctgagggtgcagggttgggcgggggggatgtgccgggcctgaccgacgaagagtatgaacggtatagggaactcctggagattaagtgccatttagaaaacggcaatcagcttggcttactgttccctcgcgctagtgggggtaatagcgcccttgacgtgaaccgcaacgaatcactgggccacgagatggctatgctcgaggaggaactgagacatctggagtttaagtgtcgcaacattctgagggcacagaagatgcagcagctgagagagagatgcatgaaagcctggctgctggaggaggaatctttgtacgatctcgcagcctcagaaccaaagaagcatgagctttctgacatctctgagctgccagaaaagagcgacaaggactctacgtctgcttataacactggtgagtcctgcagaagcactccacttctggtggaacctttaccagagagccctctgcggcgcgccatggccgggaatagcaacctgaatcggactcctcctgggcctgcagtggctacccctgccaaagcagccccgccaccgggctcacccgcaaaatttagatctctgtcacgcgacccggaagcgggccgccgccagcacgcagaggagagagggcgccgcaatccgaagactggccttactctcgaaagggtcgggcctgagagctcaccctacctgagtaggcgccacaggggacagggccaggagggtgagcactatcactcatgtgttcagctggcacccacccgtggacttgaagaactgggtcacggaccactctcgctcgccgggggcccccgtgttggaggagtggccgctgcggctaccgaggcgccccgaatggagtggaaggtaaaagtaagaagtgatggaacccgatatgtggcgaagcgacctgtgcgggatagattgttgaaggcacgggccttaaaaataagggaagagcgctccgggatgacaaccgacgatgacgcggtaagcgagatgaaaatgggcagatactggtctaaggaagaaagaaagcaacatttaattcgagctagggaacagagaaaaaggcgcgagttcatgatgcagagccgcctggagtgtctcagggagcagcagaacggagacagtaagccagaactgaacataatcgccttgagccatcgtaagaccatgaaaaaacgcaataagaagatactagacaattggatcaccatccaagagatgctggctcacggcgctagatctgccgatgggaaacgggtttacaatccacttctatccgtgaccacggtatag

SEQ ID NO: 115468 - DNA, 2853 bp, Artificial Sequence
  derived and/or modified sequence
catatcatggcgctgggcaagctgcgtccgcccaccccgcccatggtcatcctggagccgtacgtcctctctgagctggccgagggaggaccctcctgtccgggacgtcgctgccggaagtgccagggttgagggcctcagctcctcctcctccatcctctctcctctgccgcctcacaagcatcactccttgaatcttcttgcatcccttgtctgtctcattcctctacctgctctgaatttcctccatctcttcagcttctttctttggcccgaccggaagaagggcctttcatccaggcctggtggctcatgaccgcccccccaatcagccatgagtattatgacccggcggagtttatggagggcggcccgcaggaggcagaccgcttggatgagctggagtatgaggaggtggagctgtataaaagcagccaccgggacaagctgggcctgatggtttgctaccgcacggacgacgaggaggacctgggcatttatgtcggagaggtaaatcccaacagcattgcagccaaagacggccggatccgtgagggagaccgcatcatccagattaacggtgtagacgtccagaaccgggaagaggcggtggccatcctgagccaggaagagaacaccaacatctccctgctggtggcccgacctgagagtcagctggcgaaaaggtggaaggacagcgaccgggatgacttcctggatgactttggctctgagaatgagggggagctgcgtgctcgtaaactgaaatcaccccctgcccagcagcccggaaacgaagaggagaagggggctcccgatgccggcccaggcctgagcaacagccaggagctggacagcggggtgggccggactgacgagagcacccggaacgaagagagctctgagcacgacctgctgggggacgaacccccgagctccaccaacaccccgggaagcctgcgcaagtttggcctgcaaggggacgccctgcagagccgggacttccatttcagcatggactctctgctggccgagggggcggggctgggagggggcgacgtcccgggcctcacggatgaggagtatgagcgctaccgtgagctcctggagatcaagtgccacctggagaacggcaaccagctgggcctcctctttccccgggcctccggaggcaacagcgccctggacgtcaaccgcaacgagagcctgggccacgagatggccatgctggaggaggagctaaggcacctggaattcaagtgccgcaacatactgcgggcgcagaagatgcagcagctgcgtgagcgctgcatgaaggcctggctgctggaggaggagagcctctacgacctggcggccagcgagcccaagaagcacgagctgtccgacatctccgagctgcccgagaagtcggacaaggacagcaccagcgcctacaacactggggagagctgccgcagcaccccgctgcttgtggagcccctgcccgagagccccctgcggcgggccatggccggcaactccaacttgaaccggacccctcccggccccgctgttgccacccccgccaaggcagctcctccaccggggagccccgccaagttccggtccctctcccgggatcctgaggccggccggaggcagcacgcggaggagcgcggccgccgcaaccccaagacggggttgaccctggagcgtgtgggccctgaaagcagcccttacctctcgcggcgccaccgcggccagggccaggagggcgagcactaccacagctgcgtgcagctggccccgacgcgaggcctggaggagctgggccacggccccctgagcttggccggtggccctcgggtgggcggggtggcggccgcggccactgaagcaccgcgcatggagtggaaagtgaaggtgcgcagcgacggaacccgctacgtggccaagcggcccgtgcgagatcggctgctgaaagcccgtgccctgaagatccgggaggagcgcagcggtatgacgaccgacgacgacgcggtgagcgagatgaagatgggccgctactggagcaaggaggagcggaagcagcacctgatccgggcccgtgagcagcggaagcggcgcgagttcatgatgcagagccggctggagtgcctgcgggagcagcagaatggcgacagcaagcccgagctcaacatcattgccctgagccaccgcaaaaccatgaagaagcggaacaagaagatcctggacaactggatcaccatccaggagatgctggcccacggcgcgcgctccgccgatggcaagcgggtctacaaccctcttctctcagtcaccaccgtgtgagctgcccgggcgggtacacggcccaggcccagggaaccccctggggccccggccctcactctcctatagagattgtgtgtgtgtgtgtgtgcgcgcgcgcgtgctcgctgtgcgcacgcacacatctcctcgtctgggtgtgcgcacagggctttgttagcagagagaagcccctgaggagaagggacgcttttcttccttctgcccaagtaaagtgaccatgccagtggccagcactgggggcacacctgtgatgggcaccccttcagctgtgcgtgtgcattccccatcccccatgctcttgcgtgtgcttgcacgtgcacgcacacacacacccagtgctctctccacccgacccgtgtacttgcagacagggaagctgagctgaaaggagcacaagagagtgtccggcttcgctgctgagcgcggcctctccccgccgctgcgcactgcagttatttgtagacaaaggcacccctgcatctcaagaataaagcaagctgcctttgtacttggttg

SEQ ID NO: 115469 - DNA, 2022 bp, Artificial Sequence
  derived and/or modified sequence
atgactgcgccacctatcagtcacgagtactatgatccagccgaattcatggagggaggtccccaggaagcggacagactcgatgagctggaatacgaggaagttgaattatataagtcaagtcatcgtgacaaactaggcctcatggtatgttacaggaccgatgatgaagaggacctgggcatatatgtcggcgaagtgaatccaaactcaatcgccgctaaagacggcaggatccgggagggagacaggattatccaaattaacggggtggatgtgcagaatcgcgaagaagcagtcgcaattctgagtcaggaagaaaataccaatatctcattgttggtggcacgccctgagagtcaattggcgaaacggtggaaagactccgacagggacgactttctggacgattttggcagcgagaatgagggcgaactgagggccaggaagctgaagagcccacccgcacagcagcccggtaatgaagaagagaaaggcgcacccgatgccggaccgggactctcgaattctcaggagcttgactccggggtgggcagaactgatgagtcgacacggaatgaggagtcctctgagcacgatctgttgggtgatgagcctcctagcagtacaaatacacccggttcattaagaaagtttggactgcagggggacgcactccagagtcgggattttcactttagtatggattcactgctcgcagagggtgccggacttggcggaggtgatgttcctggcctgactgacgaggaatacgaaagatacagggagctgctggagatcaagtgccatttggagaatggaaatcagcttggtcttttgttcccccgagcctccgggggtaacagcgctctggacgtcaatcggaatgaaagcctgggacacgagatggccatgttagaggaggagctcagacacctggaattcaagtgccgaaacatcctccgggctcaaaagatgcaacaactcagagagcgctgtatgaaggcatggctcttggaggaagaaagcctttacgaccttgcagcctctgagcctaagaaacatgaactcagcgatataagcgaacttcccgaaaagtcggacaaggattcaacctctgcctataacacgggggaatcctgcaggtcaacacctttgcttgtggaacctctgcctgaaagccccctccggagggcgatggccggtaacagtaatttgaacagaacgccacctggtccagcagtggctacgcctgccaaggcagcaccaccacccggttcccctgctaaattccgatctctaagcagagatcccgaggccggtcgaagacagcacgcagaggagagaggcagacgcaatcctaagacgggactgaccctggagagggtcggtcccgaatcctccccctatctgtcaaggcgccatcgcggacagggacaggagggcgaacattatcacagttgtgtccaactggcaccaacaaggggactggaggagcttggccatggccctctgtctcttgccggaggcccacgggtaggcggtgtcgcagctgccgctactgaagcacctagaatggagtggaaggtgaaggttcggtcagatggtacccgctacgtggctaagagaccagtgagagacaggttactgaaagccagagccctcaaaattcgtgaggagcgcagcggaatgacaacagatgatgatgccgtgagcgaaatgaagatgggtagatactggagcaaggaggaaaggaaacagcatctgattagggctcgtgagcagagaaagcggagagaatttatgatgcaaagccgtctagagtgtctgcgcgaacagcagaacggcgattctaagccagagcttaatattatcgctctctcacacagaaagacgatgaagaagcgaaataaaaagatattagacaattggatcactatccaggagatgctcgctcacggggcaagatccgctgacggcaagagagtgtataaccctttactgtcagtcaccactgtctag

SEQ ID NO: 115470 - DNA, 2022 bp, Artificial Sequence
  derived and/or modified sequence
atgaccgccccccccatcagccacgagtactacgaccccgccgagttcatggagggcggcccccaggaggccgacagactggacgagctggagtacgaggaggtggagctgtacaagagcagccacagagacaagctgggcctgatggtgtgctacagaaccgacgacgaggaggacctgggcatctacgtgggcgaggtgaaccccaacagcatcgccgccaaggacggcagaatcagagagggcgacagaatcatccagatcaacggcgtggacgtgcagaacagagaggaggccgtggccatcctgagccaggaggagaacaccaacatcagcctgctggtggccagacccgagagccagctggccaagagatggaaggacagcgacagagacgacttcctggacgacttcggcagcgagaacgagggcgagctgagagccagaaagctgaagagcccccccgcccagcagcccggcaacgaggaggagaagggcgcccccgacgccggccccggcctgagcaacagccaggagctggacagcggcgtgggcagaaccgacgagagcaccagaaacgaggagagcagcgagcacgacctgctgggcgacgagccccccagcagcaccaacacccccggcagcctgagaaagttcggcctgcagggcgacgccctgcagagcagagacttccacttcagcatggacagcctgctggccgagggcgccggcctgggcggcggcgacgtgcccggcctgaccgacgaggagtacgagagatacagagagctgctggagatcaagtgccacctggagaacggcaaccagctgggcctgctgttccccagagccagcggcggcaacagcgccctggacgtgaacagaaacgagagcctgggccacgagatggccatgctggaggaggagctgagacacctggagttcaagtgcagaaacatcctgagagcccagaagatgcagcagctgagagagagatgcatgaaggcctggctgctggaggaggagagcctgtacgacctggccgccagcgagcccaagaagcacgagctgagcgacatcagcgagctgcccgagaagagcgacaaggacagcaccagcgcctacaacaccggcgagagctgcagaagcacccccctgctggtggagcccctgcccgagagccccctgagaagagccatggccggcaacagcaacctgaacagaaccccccccggccccgccgtggccacccccgccaaggccgcccccccccccggcagccccgccaagttcagaagcctgagcagagaccccgaggccggcagaagacagcacgccgaggagagaggcagaagaaaccccaagaccggcctgaccctggagagagtgggccccgagagcagcccctacctgagcagaagacacagaggccagggccaggagggcgagcactaccacagctgcgtgcagctggcccccaccagaggcctggaggagctgggccacggccccctgagcctggccggcggccccagagtgggcggcgtggccgccgccgccaccgaggcccccagaatggagtggaaggtgaaggtgagaagcgacggcaccagatacgtggccaagagacccgtgagagacagactgctgaaggccagagccctgaagatcagagaggagagaagcggcatgaccaccgacgacgacgccgtgagcgagatgaagatgggcagatactggagcaaggaggagagaaagcagcacctgatcagagccagagagcagagaaagagaagagagttcatgatgcagagcagactggagtgcctgagagagcagcagaacggcgacagcaagcccgagctgaacatcatcgccctgagccacagaaagaccatgaagaagagaaacaagaagatcctggacaactggatcaccatccaggagatgctggcccacggcgccagaagcgccgacggcaagagagtgtacaaccccctgctgagcgtgaccaccgtgtag

SEQ ID NO: 115471 - protein, 660 aa, Artificial Sequence
  derived and/or modified sequence
MGCNMCVVQKPEEQYKVMLQEVELYKSSHRDKLGLMVCYRTDDEEDLGIYVGEVNPNSIAAKDGRIREGDRIIQINGVDVQNREEAVAILSQEENTNISLLVARPESQLAKRWKDSDRDDFLDDFGSENEGELRARKLKSPPAQQPGNEEEKGAPDAGPGLSNSQELDSGVGRTDESTRNEESSEHDLLGDEPPSSTNTPGSLRKFGLQGDALQSRDFHFSMDSLLAEGAGLGGGDVPGLTDEEYERYRELLEIKCHLENGNQLGLLFPRASGGNSALDVNRNESLGHEMAMLEEELRHLEFKCRNILRAQKMQQLRERCMKAWLLEEESLYDLAASEPKKHELSDISELPEKSDKDSTSAYNTGESCRSTPLLVEPLPESPLRRAMAGNSNLNRTPPGPAVATPAKAAPPPGSPAKFRSLSRDPEAGRRQHAEERGRRNPKTGLTLERVGPESSPYLSRRHRGQGQEGEHYHSCVQLAPTRGLEELGHGPLSLAGGPRVGGVAAAATEAPRMEWKVKVRSDGTRYVAKRPVRDRLLKARALKIREERSGMTTDDDAVSEMKMGRYWSKEERKQHLIRAREQRKRREFMMQSRLECLREQQNGDSKPELNIIALSHRKTMKKRNKKILDNWITIQEMLAHGARSADGKRVYNPLLSVTTV

SEQ ID NO: 115472 - DNA, 1983 bp, Artificial Sequence
  derived and/or modified sequence
atgggatgtaacatgtgcgtggtacagaagcccgaagagcagtacaaggtcatgctacaggaagttgagttatataagagtagtcatagggacaagctcgggctcatggtgtgctatagaacagatgacgaggaagatttgggtatctacgtgggagaggtgaatccaaattccatcgctgcgaaggacggccgaattagggagggcgatagaattatacagattaatggcgtggatgtgcagaaccgcgaagaagcagtggccattttgtcccaagaagaaaacactaacatttctttactcgtagcaaggccagagagccaactggctaagcgctggaaggatagtgatagggatgattttctcgatgattttgggtctgaaaacgagggcgagctgcgcgcaaggaagttgaaaagcccccctgcacagcagccgggaaatgaagaggagaagggcgcgccggatgccggtcctgggctgagtaactcccaggagctggacagcggggtgggaaggaccgacgaaagcacaagaaatgaggaatcctctgagcatgatttgcttggcgacgagccaccaagcagcacgaacaccccgggatctctgagaaagttcggcttgcaaggcgacgccctgcaatcaagggattttcacttttccatggattccctgctggccgagggcgcaggcctgggagggggcgacgtccccggcctgaccgatgaggagtacgagcggtatcgagagctgctggaaatcaagtgccatcttgaaaacggcaaccagctggggttattattcccaagagcatccggcgggaattcagctttagacgtgaatcggaatgaatccctggggcacgaaatggccatgctcgaagaagaactgcggcacttggaatttaagtgtagaaacatcctgcgggcacagaagatgcagcagttgcgagagagatgcatgaaggcttggctgcttgaggaggagtcactttacgatctcgctgctagtgagcccaaaaagcacgaattgagcgacatctcggagctccccgaaaagtctgacaaggactctacaagtgcctacaacacaggagaatcgtgcaggtcaacacccttgctggtcgagccgcttccagagtcaccactgcggagggcaatggccgggaattccaaccttaataggaccccccccggtcccgccgtagccaccccagctaaagcagcaccaccccctggctctcccgctaaattccgatccctcagcagagacccagaggctggccgaaggcagcatgccgaggagcggggacgccggaaccccaaaacaggcctgacactcgagagagtaggaccagagagtagcccttacctgtcacgccgccaccgcggacaaggccaggagggagagcactatcattcctgcgtccagctggctcccacgcgcggcctcgaagaactggggcatggccccctttcattggccggaggcccaagagtgggaggcgtggccgcagcggctacagaagcccctagaatggaatggaaagttaaagtccgttctgacggaacgcggtacgtagccaagcggcccgtgcgcgatcgcctcctgaaagctcgggcattgaaaatcagggaggagcgaagcggcatgactacagatgatgacgctgtgtccgagatgaaaatgggccggtactggtcaaaagaagaaaggaagcaacatctcatccgagccagggagcagaggaaacggcgcgagttcatgatgcagagtcggctggagtgcctgagagagcaacagaacggcgattctaagccggagctcaatataatcgccttgagccaccgcaaaactatgaaaaagcgcaacaaaaagatacttgacaattggattaccatccaggaaatgctcgcccatggcgcaagatctgcggatggaaagcgcgtgtataaccctcttctgagtgttacaaccgtttag

SEQ ID NO: 115473 - DNA, 1983 bp, Artificial Sequence
  derived and/or modified sequence
atgggctgcaacatgtgtgtggtgcagaagccagaggagcagtacaaggtgatgctgcaggaggtggagctgtacaagagcagccaccgggacaagctgggcctgatggtgtgctacagaacagatgatgaggaggacctgggcatctacgtgggggaggtgaaccccaacagcattgctgccaaggatggccgcatccgggagggggaccgcatcatccagatcaacggggtggatgtgcagaaccgggaggaggccgtggccatcctgagccaggaggagaacaccaacatcagcctgctggtggcccggcctgagagccagctggccaagcgctggaaggacagcgacagagatgacttcctggatgactttggaagtgaaaatgaaggagagctgcgggccaggaagctgaagagccccccagcccagcagcctggaaatgaggaggagaagggggccccagatgctggccctggcctgagcaacagccaggagctggacagcggcgtgggccgcacagatgagagcaccagaaatgaggagagcagcgagcatgacctgctgggagatgagccccccagcagcaccaacaccccaggcagcctgaggaagtttggcctgcagggagatgccctgcagagccgggacttccacttctccatggacagcctgctggccgagggcgccggcctgggcggcggagatgtgcccggcctgacagatgaggagtatgagcgctaccgggagctgctggagatcaagtgccacctggagaatggaaaccagctgggcctgctcttcccccgggccagcggcggcaacagcgccctggatgtgaacagaaatgaaagcctgggccacgagatggccatgctggaggaggagctgcggcacctggagttcaagtgcaggaacatcctgcgggcccagaagatgcagcagctgcgggagcgctgcatgaaggcctggctgctggaggaggagagcctgtatgacctggccgccagcgagcccaagaagcatgagctgagtgacatcagcgagctgcctgagaagagtgacaaggacagcaccagcgcctacaacacaggagagagctgccgcagcacccccctgctggtggagcccctgcctgagagccccctgcggcgggccatggccggcaacagcaacctgaacagaacacctcctggccctgctgtggccaccccagccaaggccgcccctcctcctggcagccctgccaagttccgcagcctgagccgggaccctgaggccggccggcggcagcacgccgaggagcggggcagaagaaaccccaagacaggcctgaccctggagcgggtgggccctgagagcagcccctacctgagccgccgccaccggggccagggccaggagggggagcactaccacagctgtgtgcagctggcccccacccggggcctggaggagctgggccacggccccctgagcctggccggcggcccccgggtgggcggcgtggccgccgccgccacagaggcccccaggatggagtggaaggtgaaggtgcggagtgatggcacccgctacgtggccaagaggcctgtgcgggaccggctgctgaaggcccgggccctgaagatccgggaggagaggagcggcatgaccacagatgatgatgctgtgtctgagatgaagatgggccgctactggagcaaggaggagaggaagcagcacctgatccgggcccgggagcagaggaagagaagagagttcatgatgcagagccggctggagtgcctgcgggagcagcagaatggagacagcaagccagagctgaacatcatcgccctgagccacaggaagaccatgaagaagaggaacaagaagatcctggacaactggatcaccatccaggagatgctggcccacggggcccggtctgcagatggcaagagggtgtacaaccccctgctgtctgtgaccaccgtgtag

SEQ ID NO: 115474 - DNA, 1983 bp, Artificial Sequence
  derived and/or modified sequence
atgggctgcaacatgtgcgtggtgcagaagcccgaggagcagtacaaggtcatgcttcaggaagtggaactgtacaaaagctctcaccgggacaagctggggcttatggtctgttacaggacagacgatgaggaagacctcggcatatatgttggggaggtcaatcccaatagcattgctgccaaggatggacgcatacgggagggtgatcggatcatccagatcaatggcgttgacgtacagaaccgcgaggaggctgtggcgatcctttcccaggaggagaacaccaacattagccttctggtggctaggccagagagtcagctggcgaagcggtggaaagactcggaccgtgacgattttttagatgattttgggtccgaaaacgagggtgagctgcgagcgcgcaagctcaagagccctcccgcgcaacagcctggaaacgaagaagagaagggggccccagacgctggaccaggcctgagcaatagtcaggagctggacagcggagtgggaaggacagacgaatccaccagaaacgaggagagcagcgagcatgatctactgggagacgaaccacctagttccacaaacacgcctggctccctccggaagttcggcctgcagggggacgcacttcagagccgggatttccacttctccatggactcgctcctggccgagggcgccggactcggcggaggtgacgtgcccggtctgaccgacgaagagtatgagaggtatcgagaactgctagagattaagtgccatctggaaaatgggaatcagctgggcctcttgtttccccgcgcctctggagggaacagtgctcttgacgtgaaccggaatgagtcattaggacatgaaatggccatgcttgaagaggaactgcgccatcttgagttcaaatgcagaaacattctgcgggctcagaagatgcagcagcttagagaaagatgcatgaaggcttggctgttggaagaggaatctctatacgatttggcggcaagtgaacctaaaaagcatgaactctcagatataagcgaacttcccgagaagtcggataaggacagcacttcggcctataacacgggggagtcatgccggtctactcccctgttggtagagcccctgccagaatcccccctgcggagggctatggccggtaactctaacctgaatagaaccccccctggacctgccgtggccactccagctaaggccgccccaccaccaggcagccctgcaaagttccggtcccttagtagggatcccgaggctggccgacgccaacatgccgaggagcggggacgccggaaccctaaaacaggattaacattggaacgggtgggcccggaatccagtccttatttatctcgcaggcaccggggacagggacaggagggagagcactaccactcctgtgtgcagttggcacccacgagagggctggaggaattaggtcacgggcccttgtccctcgctgggggccctagagtgggtggagtcgccgctgccgccaccgaggccccaaggatggaatggaaggttaaggttaggtctgacggcacgcgctatgtggctaagagacccgtacgagaccggctgcttaaagcccgcgcactgaagatccgagaagagcggtcaggcatgacaaccgacgacgatgctgtgagcgaaatgaagatgggacgttattggagcaaagaggaacggaagcagcacttaatacgggcacgcgagcagcgtaaaagaagggaatttatgatgcagagtaggctcgaatgtctcagggaacagcaaaacggagatagcaagccagaactcaacattatcgctctttctcacaggaagaccatgaagaaaagaaacaaaaaaatattggacaattggattactatccaggagatgctagctcacggagctagatctgccgacggcaagcgtgtctataatcccctgctttcggtcaccacagtgtag

SEQ ID NO: 115475 - DNA, 423 bp, Artificial Sequence
  derived and/or modified sequence
atggacctgctgcccaccagcatcctgctggccagcctgtggatctgctctcatctccatcctcctggtgtctccgtcgacctgcctccgacttcaattctgctggtgtccctgtggatatgctcccacctgcacccacccggggtatctgttgatcgccccccaccccccagttcatggtgcctgtgtggctctcctcctactagcatattattagtatctttgtggatctgcagccctcccccttccagttggtgcttgtgcggatctgctccaaccagcatcctcttggtctcactctggatttggagactctggggtcttacggaggtaggacatgtggagtttgtcttcctgccttggttgatctcctggaacataatgttttccaagctttttagctgcttcttgtacctgggctag

SEQ ID NO: 115476 - DNA, 2109 bp, Artificial Sequence
  derived and/or modified sequence
cgggtcagtgaaaggcgtcttcccgttcccgccctccgcctcctctcgccggccagcaacatgggatgtaatatgtgcgtggtccagaaaccggaggagcagtacaaagtgatgctgcaggaggtggagctgtataaaagcagccaccgggacaagctgggcctgatggtttgctaccgcacggacgacgaggaggacctgggcatttatgtcggagaggtaaatcccaacagcattgcagccaaagacggccggatccgtgagggagaccgcatcatccagattaacggtgtagacgtccagaaccgggaagaggcggtggccatcctgagccaggaagagaacaccaacatctccctgctggtggcccgacctgagagtcagctggcgaaaaggtggaaggacagcgaccgggatgacttcctggatgactttggctctgagaatgagggggagctgcgtgctcgtaaactgaaatcaccccctgcccagcagcccggaaacgaagaggagaagggggctcccgatgccggcccaggcctgagcaacagccaggagctggacagcggggtgggccggactgacgagagcacccggaacgaagagagctctgagcacgacctgctgggggacgaacccccgagctccaccaacaccccgggaagcctgcgcaagtttggcctgcaaggggacgccctgcagagccgggacttccatttcagcatggactctctgctggccgagggggcggggctgggagggggcgacgtcccgggcctcacggatgaggagtatgagcgctaccgtgagctcctggagatcaagtgccacctggagaacggcaaccagctgggcctcctctttccccgggcctccggaggcaacagcgccctggacgtcaaccgcaacgagagcctgggccacgagatggccatgctggaggaggagctaaggcacctggaattcaagtgccgcaacatactgcgggcgcagaagatgcagcagctgcgtgagcgctgcatgaaggcctggctgctggaggaggagagcctctacgacctggcggccagcgagcccaagaagcacgagctgtccgacatctccgagctgcccgagaagtcggacaaggacagcaccagcgcctacaacactggggagagctgccgcagcaccccgctgcttgtggagcccctgcccgagagccccctgcggcgggccatggccggcaactccaacttgaaccggacccctcccggccccgctgttgccacccccgccaaggcagctcctccaccggggagccccgccaagttccggtccctctcccgggatcctgaggccggccggaggcagcacgcggaggagcgcggccgccgcaaccccaagacggggttgaccctggagcgtgtgggccctgaaagcagcccttacctctcgcggcgccaccgcggccagggccaggagggcgagcactaccacagctgcgtgcagctggccccgacgcgaggcctggaggagctgggccacggccccctgagcttggccggtggccctcgggtgggcggggtggcggccgcggccactgaagcaccgcgcatggagtggaaagtgaaggtgcgcagcgacggaacccgctacgtggccaagcggcccgtgcgagatcggctgctgaaagcccgtgccctgaagatccgggaggagcgcagcggtatgacgaccgacgacgacgcggtgagcgagatgaagatgggccgctactggagcaaggaggagcggaagcagcacctgatccgggcccgtgagcagcggaagcggcgcgagttcatgatgcagagccggctggagtgcctgcgggagcagcagaatggcgacagcaagcccgagctcaacatcattgccctgagccaccgcaaaaccatgaagaagcggaacaagaagatcctggacaactggatcaccatccaggagatgctggcccacggcgcgcgctccgccgatggcaagcgggtctacaaccctcttctctcagtcaccaccgtgtgagctgcccgggcgggtacacggcccaggcccagggaaccccctggggccccggccctcactctccta

SEQ ID NO: 115477 - DNA, 1983 bp, Artificial Sequence
  derived and/or modified sequence
atgggctgcaatatgtgcgtagtgcaaaagccagaggagcaatataaagtaatgctgcaggaagtggagctctataagagctcccacagggataaactcgggctcatggtgtgctacaggacggacgacgaagaggatctcggtatctacgtgggagaagtgaatcctaactcaatcgccgctaaagacggtcgtatcagagagggtgaccggattatccagatcaacggagttgatgtgcagaatcgcgaggaagcagtggctatcctgtcccaggaagaaaacactaatatttctctgctcgtggcccgaccggaatcccagctggcaaagagatggaaggacagcgatagggatgacttccttgatgatttcggaagtgagaatgagggagaactgcgcgctcggaagctgaagagccctcctgctcagcaacccggaaacgaggaggaaaaaggggcacccgatgcaggacccggactttccaactcacaggagcttgactcaggagtgggacggactgacgagtcaactcgcaacgaggagtcaagcgagcacgatctcttgggcgacgaaccaccttctagcacaaacactccaggaagtctgcgcaagttcggccttcagggcgacgctctccagtctcgcgacttccatttttctatggattccttgctggccgagggcgctggcctgggcggaggagatgtacccggtctgacggacgaggaatacgagaggtaccgggaactgcttgaaataaagtgccatctggaaaatggaaaccagctgggtctccttttccccagggcttcaggtggcaattccgctctagatgtcaatcgaaacgagtctctggggcacgagatggcgatgcttgaggaggagctgcgtcacttagagttcaaatgcagaaacatcctgcgcgctcagaaaatgcagcagctgagagagaggtgtatgaaggcctggctgctggaggaggaaagtctgtatgacttggctgccagtgaacctaagaaacacgaactttccgatatcagcgaactgccagaaaagagtgacaaggactctacgtccgcatacaataccggtgaatcctgtaggtcaacacccctgcttgttgaacccctccctgaatcacccctgaggagagcaatggcgggaaactccaatctgaatcggacacctcccggaccagcagtggcaacccccgctaaggctgcgcctcctccgggaagccccgcaaaatttcggtccctctcgcgggaccccgaggcagggagaagacagcacgcagaggagcggggtagaagaaatcccaagactgggctgacattggaacgggtgggccctgaaagttcgccatacctctctcgacgtcaccgcggtcagggacaggaaggagagcattatcattcctgtgtccagctggccccaaccagaggtctcgaggagttaggtcacggaccgttgtccctggcgggagggcctcgcgtcggaggggtagcagcagcagctaccgaagcacctcgtatggagtggaaagttaaggtgcgctctgacgggactagatacgtagcgaagcgccctgtgcgcgaccgactgctaaaagctcgcgcactgaagatcagggaggagcgaagcggtatgaccaccgatgacgacgcagtctccgaaatgaagatgggccgatattggtctaaagaggagcgtaagcagcatcttatcagggcaagagagcagcggaaaaggagggaattcatgatgcaatcccgtctggaatgtctccgggaacaacagaacggagattcgaaacccgagctgaacattattgctctcagccacaggaagacaatgaagaagcggaacaaaaaaatccttgacaactggattacaattcaggagatgctagctcatggagcgcgatctgcagatggtaaacgcgtgtacaatccactcctttccgttaccactgtctag

SEQ ID NO: 115478 - DNA, 1983 bp, Artificial Sequence
  derived and/or modified sequence
atgggctgcaacatgtgcgtggtgcagaagcccgaggagcagtacaaggtgatgctgcaggaggtggagctgtacaagagcagccacagagacaagctgggcctgatggtgtgctacagaaccgacgacgaggaggacctgggcatctacgtgggcgaggtgaaccccaacagcatcgccgccaaggacggcagaatcagagagggcgacagaatcatccagatcaacggcgtggacgtgcagaacagagaggaggccgtggccatcctgagccaggaggagaacaccaacatcagcctgctggtggccagacccgagagccagctggccaagagatggaaggacagcgacagagacgacttcctggacgacttcggcagcgagaacgagggcgagctgagagccagaaagctgaagagcccccccgcccagcagcccggcaacgaggaggagaagggcgcccccgacgccggccccggcctgagcaacagccaggagctggacagcggcgtgggcagaaccgacgagagcaccagaaacgaggagagcagcgagcacgacctgctgggcgacgagccccccagcagcaccaacacccccggcagcctgagaaagttcggcctgcagggcgacgccctgcagagcagagacttccacttcagcatggacagcctgctggccgagggcgccggcctgggcggcggcgacgtgcccggcctgaccgacgaggagtacgagagatacagagagctgctggagatcaagtgccacctggagaacggcaaccagctgggcctgctgttccccagagccagcggcggcaacagcgccctggacgtgaacagaaacgagagcctgggccacgagatggccatgctggaggaggagctgagacacctggagttcaagtgcagaaacatcctgagagcccagaagatgcagcagctgagagagagatgcatgaaggcctggctgctggaggaggagagcctgtacgacctggccgccagcgagcccaagaagcacgagctgagcgacatcagcgagctgcccgagaagagcgacaaggacagcaccagcgcctacaacaccggcgagagctgcagaagcacccccctgctggtggagcccctgcccgagagccccctgagaagagccatggccggcaacagcaacctgaacagaaccccccccggccccgccgtggccacccccgccaaggccgcccccccccccggcagccccgccaagttcagaagcctgagcagagaccccgaggccggcagaagacagcacgccgaggagagaggcagaagaaaccccaagaccggcctgaccctggagagagtgggccccgagagcagcccctacctgagcagaagacacagaggccagggccaggagggcgagcactaccacagctgcgtgcagctggcccccaccagaggcctggaggagctgggccacggccccctgagcctggccggcggccccagagtgggcggcgtggccgccgccgccaccgaggcccccagaatggagtggaaggtgaaggtgagaagcgacggcaccagatacgtggccaagagacccgtgagagacagactgctgaaggccagagccctgaagatcagagaggagagaagcggcatgaccaccgacgacgacgccgtgagcgagatgaagatgggcagatactggagcaaggaggagagaaagcagcacctgatcagagccagagagcagagaaagagaagagagttcatgatgcagagcagactggagtgcctgagagagcagcagaacggcgacagcaagcccgagctgaacatcatcgccctgagccacagaaagaccatgaagaagagaaacaagaagatcctggacaactggatcaccatccaggagatgctggcccacggcgccagaagcgccgacggcaagagagtgtacaaccccctgctgagcgtgaccaccgtgtag

SEQ ID NO: 115479 - protein, 598 aa, Artificial Sequence
  derived and/or modified sequence
METFHTPSLGDEEFEIPPISLDSDPSLAVSDVVGHFDDLADPSSSQDGSFSAQYGVQTLDMPVGMTHGLMEQGGGLLSGGLTMDLDHSIGTQYSANPPVTIDVPMTDMTSGLMGHSQLTTIDQSELSSQLGLSLGGGTILPPAQSPEDRLSTTPSPTSSLHEDGVEDFRRQLPSQKTVVVEAGKKQKAPKKRKKKDPNEPQKPVSAYALFFRDTQAAIKGQNPNATFGEVSKIVASMWDSLGEEQKQVYKRKTEAAKKEYLKALAAYKDNQECQATVETVELDPAPPSQTPSPPPMATVDPASPAPASIEPPALSPSIVVNSTLSSYVANQASSGAGGQPNITKLIITKQMLPSSITMSQGGMVTVIPATVVTSRGLQLGQTSTATIQPSQQAQIVTRSVLQAAAAAAAAASMQLPPPRLQPPPLQQMPQPPTQQQVTILQQPPPLQAMQQPPPQKVRINLQQQPPPLQIKSVPLPTLKMQTTLVPPTVESSPERPMNNSPEAHTVEAPSPETICEMITDVVPEVESPSQMDVELVSGSPVALSPQPRCVRSGCENPPIVSKDWDNEYCSNECVVKHCRDVFLAWVASRNSNTVVFVK

SEQ ID NO: 115480 - protein, 549 aa, Artificial Sequence
  derived and/or modified sequence
MRNLKSHLSPWILIPHWLSQMWLATLMTWQFFSPDLDHSIGTQYSANPPVTIDVPMTDMTSGLMGHSQLTTIDQSELSSQLGLSLGGGTILPPAQSPEDRLSTTPSPTSSLHEDGVEDFRRQLPSQKTVVVEAGKKQKAPKKRKKKDPNEPQKPVSAYALFFRDTQAAIKGQNPNATFGEVSKIVASMWDSLGEEQKQVYKRKTEAAKKEYLKALAAYKDNQECQATVETVELDPAPPSQTPSPPPMATVDPASPAPASIEPPALSPSIVVNSTLSSYVANQASSGAGGQPNITKLIITKQMLPSSITMSQGGMVTVIPATVVTSRGLQLGQTSTATIQPSQQAQIVTRSVLQAAAAAAAAASMQLPPPRLQPPPLQQMPQPPTQQQVTILQQPPPLQAMQQPPPQKVRINLQQQPPPLQIKSVPLPTLKMQTTLVPPTVESSPERPMNNSPEAHTVEAPSPETICEMITDVVPEVESPSQMDVELVSGSPVALSPQPRCVRSGCENPPIVSKDWDNEYCSNECVVKHCRDVFLAWVASRNSNTVVFVK

SEQ ID NO: 115481 - DNA, 1797 bp, Artificial Sequence
  derived and/or modified sequence
atggagaccttccacacccccagcctgggcgacgaggagttcgagatcccccccatcagcctggacagcgaccccagcctggccgtgagcgacgtggtgggccacttcgacgacctggccgaccccagcagcagccaggacggcagcttcagcgcccagtacggcgtgcagaccctggacatgcccgtgggcatgacccacggcctgatggagcagggcggcggcctgctgagcggcggcctgaccatggacctggaccacagcatcggcacccagtacagcgccaacccccccgtgaccatcgacgtgcccatgaccgacatgaccagcggcctgatgggccacagccagctgaccaccatcgaccagagcgagctgagcagccagctgggcctgagcctgggcggcggcaccatcctgccccccgcccagagccccgaggacagactgagcaccacccccagccccaccagcagcctgcacgaggacggcgtggaggacttcagaagacagctgcccagccagaagaccgtggtggtggaggccggcaagaagcagaaggcccccaagaagagaaagaagaaggaccccaacgagccccagaagcccgtgagcgcctacgccctgttcttcagagacacccaggccgccatcaagggccagaaccccaacgccaccttcggcgaggtgagcaagatcgtggccagcatgtgggacagcctgggcgaggagcagaagcaggtgtacaagagaaagaccgaggccgccaagaaggagtacctgaaggccctggccgcctacaaggacaaccaggagtgccaggccaccgtggagaccgtggagctggaccccgccccccccagccagacccccagccccccccccatggccaccgtggaccccgccagccccgcccccgccagcatcgagccccccgccctgagccccagcatcgtggtgaacagcaccctgagcagctacgtggccaaccaggccagcagcggcgccggcggccagcccaacatcaccaagctgatcatcaccaagcagatgctgcccagcagcatcaccatgagccagggcggcatggtgaccgtgatccccgccaccgtggtgaccagcagaggcctgcagctgggccagaccagcaccgccaccatccagcccagccagcaggcccagatcgtgaccagaagcgtgctgcaggccgccgccgccgccgccgccgccgccagcatgcagctgcccccccccagactgcagcccccccccctgcagcagatgccccagccccccacccagcagcaggtgaccatcctgcagcagcccccccccctgcaggccatgcagcagccccccccccagaaggtgagaatcaacctgcagcagcagcccccccccctgcagatcaagagcgtgcccctgcccaccctgaagatgcagaccaccctggtgccccccaccgtggagagcagccccgagagacccatgaacaacagccccgaggcccacaccgtggaggcccccagccccgagaccatctgcgagatgatcaccgacgtggtgcccgaggtggagagccccagccagatggacgtggagctggtgagcggcagccccgtggccctgagcccccagcccagatgcgtgagaagcggctgcgagaacccccccatcgtgagcaaggactgggacaacgagtactgcagcaacgagtgcgtggtgaagcactgcagagacgtgttcctggcctgggtggccagcagaaacagcaacaccgtggtgttcgtgaagtag

SEQ ID NO: 115482 - DNA, 1650 bp, Artificial Sequence
  derived and/or modified sequence
atgagaaacctgaagagccacctgagcccctggatcctgatcccccactggctgagccagatgtggctggccaccctgatgacctggcagttcttcagccccgacctggaccacagcatcggcacccagtacagcgccaacccccccgtgaccatcgacgtgcccatgaccgacatgaccagcggcctgatgggccacagccagctgaccaccatcgaccagagcgagctgagcagccagctgggcctgagcctgggcggcggcaccatcctgccccccgcccagagccccgaggacagactgagcaccacccccagccccaccagcagcctgcacgaggacggcgtggaggacttcagaagacagctgcccagccagaagaccgtggtggtggaggccggcaagaagcagaaggcccccaagaagagaaagaagaaggaccccaacgagccccagaagcccgtgagcgcctacgccctgttcttcagagacacccaggccgccatcaagggccagaaccccaacgccaccttcggcgaggtgagcaagatcgtggccagcatgtgggacagcctgggcgaggagcagaagcaggtgtacaagagaaagaccgaggccgccaagaaggagtacctgaaggccctggccgcctacaaggacaaccaggagtgccaggccaccgtggagaccgtggagctggaccccgccccccccagccagacccccagccccccccccatggccaccgtggaccccgccagccccgcccccgccagcatcgagccccccgccctgagccccagcatcgtggtgaacagcaccctgagcagctacgtggccaaccaggccagcagcggcgccggcggccagcccaacatcaccaagctgatcatcaccaagcagatgctgcccagcagcatcaccatgagccagggcggcatggtgaccgtgatccccgccaccgtggtgaccagcagaggcctgcagctgggccagaccagcaccgccaccatccagcccagccagcaggcccagatcgtgaccagaagcgtgctgcaggccgccgccgccgccgccgccgccgccagcatgcagctgcccccccccagactgcagcccccccccctgcagcagatgccccagccccccacccagcagcaggtgaccatcctgcagcagcccccccccctgcaggccatgcagcagccccccccccagaaggtgagaatcaacctgcagcagcagcccccccccctgcagatcaagagcgtgcccctgcccaccctgaagatgcagaccaccctggtgccccccaccgtggagagcagccccgagagacccatgaacaacagccccgaggcccacaccgtggaggcccccagccccgagaccatctgcgagatgatcaccgacgtggtgcccgaggtggagagccccagccagatggacgtggagctggtgagcggcagccccgtggccctgagcccccagcccagatgcgtgagaagcggctgcgagaacccccccatcgtgagcaaggactgggacaacgagtactgcagcaacgagtgcgtggtgaagcactgcagagacgtgttcctggcctgggtggccagcagaaacagcaacaccgtggtgttcgtgaagtag

SEQ ID NO: 115483 - DNA, 1797 bp, Artificial Sequence
  derived and/or modified sequence
atggagacctttcatacccccagcctgggtgatgaggaatttgagattcctcccatctcccttgacagcgatccctccctggccgtaagcgatgtagttgggcattttgatgacctggcagacccttcgagctcacaggacggaagcttttccgctcagtacggagttcagacgctggatatgcctgtaggtatgacccacggcctcatggaacaagggggggggctgctgagcggaggtcttacaatggacctggaccattccatcggcacacagtacagcgccaatccccctgtaacgatagatgtacctatgactgatatgactagcggcttgatggggcatagtcagttgaccactatagatcaatcagagctttcttcacagctggggctaagcttaggtggaggaacaattctcccgcctgcccagtccccagaggatcgtttgtcaactacaccgagtccaacaagttctctgcacgaggatggtgtcgaagattttcgcagacagcttccttctcagaaaaccgtggtagttgaggctggtaagaagcagaaggctccgaagaagaggaaaaagaaagacccaaatgagcctcagaagcccgtgagcgcatatgccctattctttagggacacccaggccgccatcaaaggccagaatcctaacgctactttcggcgaggtttccaagatcgtggccagtatgtgggatagccttggcgaagagcagaagcaagtatataagaggaagaccgaggccgcaaaaaaagagtacctgaaggccttggccgcgtataaggacaatcaggagtgtcaggccacggtggagaccgtggagcttgatccggctccgccatctcaaaccccgagtccccccccgatggcaactgtggacccggcttcacccgcgcctgcctccatagagccgcccgcgctgtccccctctattgtggttaatagcacactttctagctatgtcgccaaccaggcttcctctggggccgggggccagccaaacatcactaagttgatcattacaaagcaaatgttgcccagcagcatcaccatgagtcagggaggcatggtgacagtgatccctgctacagtagtcaccagtcggggcttgcagctggggcaaacatcaacagcaacgatccagccctctcagcaggcccaaatcgtgacccgcagcgtgcttcaggcggccgcagcggctgccgccgccgctagcatgcagctaccgccaccccgcctgcagcccccgcctctacagcagatgccccagccccctacacagcagcaggttacaatccttcagcagccccccccgcttcaggcaatgcagcaaccaccaccgcagaaggtgaggatcaacctgcagcagcaaccaccccctctccagatcaaatcagtccccctacccaccctgaaaatgcagacaactctcgtgcctcctacagtggagtcaagcccagaacggccaatgaacaattcccctgaggcacacaccgtggaggctcccagccctgaaacaatatgtgaaatgatcaccgacgtggtccccgaggtggagtcccctagtcagatggatgtggagcttgtctctgggtcaccggttgcccttagcccacagcccaggtgcgtcaggtcaggctgcgaaaatccccccattgtttcaaaagactgggacaatgagtactgctctaacgagtgtgtagtgaagcattgcagggatgtgttcttggcgtgggtcgcttcacgtaatagcaacactgttgtgttcgtaaaatag

SEQ ID NO: 115484 - DNA, 1650 bp, Artificial Sequence
  derived and/or modified sequence
atgcgaaacctcaagtctcatctctctccatggatcctgatccctcactggctctcccagatgtggctcgccacactcatgacctggcagttcttttcccctgatttggatcatagtattgggacacagtattcagctaacccacctgtgaccatagacgtacccatgacagatatgaccagcgggttaatgggtcactctcaactcaccaccatcgatcagagtgagctgtcgagccagcttgggttgtcactcgggggcggaacaattttaccacccgcccaaagtccagaagatcgacttagcactactccaagcccgacctccagtttgcatgaagatggcgtcgaagacttccgacgtcagctaccctctcagaagaccgtagtggtggaggcgggaaagaagcagaaggcaccaaaaaagaggaagaaaaaggatccaaacgaaccacagaagcccgtgtctgcatatgccttgttctttcgtgacacccaggccgccatcaagggccagaatccaaatgccacattcggtgaggtaagcaagattgtggcgtccatgtgggatagtctgggagaagaacagaagcaggtgtataagcggaagaccgaagctgcaaagaaggagtacttgaaagccctcgctgcctataaggacaatcaggagtgccaagctaccgtcgagacggttgagctcgatcctgcaccaccatctcaaactccatcaccaccccccatggctacagtggatcctgcaagccccgccccagcctccattgaaccgccggctctctctccatcaattgtggtaaactcgacactctcttcctacgtggcaaatcaggccagcagtggcgccggtgggcaacctaatatcacaaagttaatcattacaaaacaaatgctgccctctagcatcactatgagccagggaggcatggtgaccgtcatccccgccacagttgtcacgagtcgagggctccagcttgggcagacgtctaccgctacaattcaacccagtcagcaagcacaaatagtgacccgtagtgtactgcaagccgctgctgcagcagcagccgccgcgtccatgcaactgccccctcctcgtctccagccgcctccgctgcaacaaatgcctcagcctccgacacagcagcaggtgactattctgcagcaacccccgccgctgcaggctatgcagcaaccacctcctcagaaagtccggatcaaccttcaacagcaaccaccccctttgcagattaagtctgtccctctgccaaccctgaaaatgcagaccaccttagtcccccctacagtcgagtcttctcccgaacgacctatgaataactcgccagaggcccataccgtcgaggcaccaagcccagaaacgatctgcgagatgattacagacgttgtgccggaggtcgaatcccctagtcagatggacgtggagctggtaagcggatccccagtggccctttcccctcagcccaggtgcgtcagaagcgggtgcgagaatcctcctatagtcagtaaagactgggataacgagtactgttccaatgagtgcgttgtcaagcactgccgcgacgtattcttggcatgggtggcatcccggaatagcaacaccgtggtttttgttaagtag

SEQ ID NO: 115485 - DNA, 1797 bp, Artificial Sequence
  derived and/or modified sequence
atggagaccttccacacccccagcctgggagatgaggagtttgagatcccccccatcagcctggacagcgaccccagcctggccgtgtctgatgtggtgggccactttgatgacctggccgaccccagcagcagccaggacggcagcttcagcgcccagtatggagtgcagaccctggacatgcctgtgggcatgacccacggcctgatggagcagggcggcggcctgctgagcggcggcctgaccatggacctggaccacagcatcggcacccagtacagcgccaacccccctgtgaccattgatgtgcccatgacagacatgaccagcggcctgatgggccacagccagctgaccaccatcgaccagagcgagctgagcagccagctgggcctgagcctgggcggcggcaccatcctgcccccagcccagagcccagaagatcggctgagcaccacccccagccccaccagcagcctgcatgaagatggagtggaggacttccggcggcagctgcccagccagaagacagtggtggtggaggccggcaagaagcagaaggcccccaagaagaggaagaagaaggaccccaatgagccccagaagcctgtgtctgcctatgccctcttcttccgggacacccaggccgccatcaagggccagaaccccaatgccacctttggagaggtgtccaagatcgtggcctccatgtgggacagcctgggggaggagcagaagcaggtgtacaagaggaagacagaagctgccaagaaggagtacctgaaggccctggccgcctacaaggacaaccaggagtgccaggccaccgtggagaccgtggagctggaccctgccccacccagccagacccccagccccccacccatggccaccgtggaccctgccagccctgccccagccagcattgagcccccagccctgagccccagcatcgtggtgaacagcaccctgagcagctatgtggccaaccaggccagcagcggggccggcggccagcccaacatcaccaagctgatcatcaccaagcagatgctgcccagcagcatcaccatgagccagggcggcatggtgaccgtcatcccagccaccgtggtgaccagccggggcctgcagctgggccagaccagcacagccaccatccagcccagccagcaggcccagatcgtgaccaggtctgtgctgcaggccgctgctgctgctgctgctgctgcctccatgcagctgcccccaccccggctgcagcccccacccctgcagcagatgccccagccccccacccagcagcaggtgaccatcctgcagcagcccccacccctgcaggccatgcagcagcccccaccccagaaggtgcgcatcaacctgcagcagcagcccccacccctgcagatcaagtctgtgcccctgcccaccctgaagatgcagaccaccctggtgccccccaccgtggagagcagccctgagcggcccatgaacaacagccctgaggcccacacagtggaggcccccagccctgagaccatctgtgagatgatcacagatgtggtgcctgaggtggagagccccagccagatggatgtggagctggtgtctggcagccctgtggccctgagcccccagccccgctgtgtgcgcagcggctgtgaaaatccacccatcgtgtccaaggactgggacaatgagtactgcagcaatgaatgtgtggtgaagcactgcagagatgtgttcctggcctgggtggccagcaggaacagcaacacagtggtgtttgtgaagtag

SEQ ID NO: 115486 - DNA, 1650 bp, Artificial Sequence
  derived and/or modified sequence
atgaggaacctgaagagccacctgagcccctggatcctgatcccccactggctgagccagatgtggctggccaccctgatgacctggcagttcttctccccagacctggaccacagcatcggcacccagtacagcgccaacccccctgtgaccattgatgtgcccatgacagacatgaccagcggcctgatgggccacagccagctgaccaccatcgaccagagcgagctgagcagccagctgggcctgagcctgggcggcggcaccatcctgcccccagcccagagccctgaggaccggctgagcaccacccccagccccaccagcagcctgcatgaagatggagtggaggacttccggcggcagctgcccagccagaagacagtggtggtggaggccggcaagaagcagaaggcccccaagaagaggaagaagaaggaccccaatgagccccagaagcctgtgtctgcctatgccctcttcttccgggacacccaggccgccatcaagggccagaaccccaatgccaccttcggggaggtgtccaagatcgtggcctccatgtgggacagcctgggggaggagcagaagcaggtgtacaagaggaagacagaggccgccaagaaggagtacctgaaggccctggccgcctacaaggacaaccaggagtgccaggccaccgtggagaccgtggagctggaccctgccccacccagccagacccccagccccccacccatggccaccgtggaccctgccagccctgccccagccagcattgagcccccagccctgagccccagcatcgtggtgaacagcaccctgagcagctatgtggccaaccaggccagcagtggagctgggggccagcccaacatcaccaagctgatcatcaccaagcagatgctgcccagcagcatcaccatgagccagggcggcatggtgaccgtcatcccagccaccgtggtgaccagccggggcctgcagctgggccagaccagcacagccaccatccagcccagccagcaggcccagatcgtgaccaggtctgtgctgcaggccgctgctgctgctgctgctgctgcctccatgcagctgcccccaccccggctgcagcccccacccctgcagcagatgccccagccccccacccagcagcaggtgaccatcctgcagcagcccccacccctgcaggccatgcagcagcccccaccccagaaggtgcgcatcaacctgcagcagcagcccccacccctgcagatcaagtctgtgcccctgcccaccctgaagatgcagaccaccctggtgcccccaacagtggagagcagccctgagcggcccatgaacaacagccctgaggcccacacagtggaggcccccagccctgagaccatctgtgagatgatcacagatgtggtgcctgaggtggagagccccagccagatggatgtggagctggtgtctggcagccctgtggccctgagcccccagccccgctgtgtgcgcagcggctgtgagaacccccccatcgtgtccaaggactgggacaatgagtactgcagcaatgaatgtgtggtgaagcactgcagagatgtgttcctggcctgggtggccagcaggaacagcaacacagtggtgtttgtgaagtag

SEQ ID NO: 115487 - DNA, 1797 bp, Artificial Sequence
  derived and/or modified sequence
atggagaccttccacacccccagcctgggcgacgaggagttcgagatcccccccatcagcctggactccgacccttctctggccgtgagcgacgtggtgggccacttcgatgacctggctgatccctcttcttcccaggacgggtcattttcggcacaatacggggtgcagacattggatatgcctgtgggcatgacacacgggctgatggagcagggaggcggattgctctcaggcggactcaccatggacctggatcactccatcgggacccagtattccgccaatccgcctgttaccattgacgtgcctatgacggacatgacgagcggactcatggggcattctcaactgacaactattgaccaatcagaactctctagccagttgggcctgtcacttggtgggggaactattctgcccccagcacagagtccggaggataggttgagtacaacaccatctcctacatcttcccttcatgaggacggggtggaggatttcagacgacaattgccatctcagaaaacagtggtggtggaagccgggaaaaagcaaaaagctcccaaaaagaggaagaaaaaggatccaaatgagccacagaagcctgttagcgcctacgccctgttctttcgggacacccaggctgcgattaaaggacagaacccaaacgccacattcggcgaagtgtccaaaatcgtggctagcatgtgggatagcctcggtgaggagcaaaagcaagtctacaagaggaagaccgaggccgccaaaaaggaatatctcaaagcccttgcagcatacaaagataatcaggaatgccaggccaccgtggagaccgtcgaactggatcccgctcccccatctcagacgcccagtccacccccaatggcaacagtagaccccgcatccccagcccccgcatccatagaaccccctgctctgtccccaagcatcgtggtcaacagcactctgagttcttatgtggctaatcaagctagctcaggggccggagggcaacctaatattactaagttaattataaccaagcagatgttgccaagtagcatcactatgagtcaaggtgggatggtcacagtcattcctgcaactgtggtgacctctaggggcctgcagttgggtcaaaccagcacggctaccatccagcctagccagcaggctcaaatcgtaactcgttcagtgctccaggctgccgcagctgcagctgccgccgcctcaatgcaactacccccaccgagactgcagcccccccctttgcagcagatgcctcagcccccaactcagcagcaggtcactatattacagcaaccgccgccgctgcaagccatgcagcaacctcccccccagaaggtgagaattaatttgcagcagcagcctcccccactgcagatcaagtctgtgccccttccaacgctgaaaatgcagactacactggtgccccctactgtcgagtcatcccctgagcgtcccatgaataactctcctgaggcccacaccgtcgaggcccccagccctgaaaccatatgcgagatgatcaccgacgtagtgcctgaagtcgaaagcccctcgcagatggacgtggaacttgtcagcggttcaccggttgccctgagcccccagccacgctgtgtaagatctgggtgtgagaatcctcccatagtgagcaaagattgggacaatgaatactgtagcaatgagtgcgtggtgaagcactgccgggatgtcttcctggcatgggtcgcttcaagaaattcaaacacagtggtgttcgtcaagtag

SEQ ID NO: 115488 - DNA, 1650 bp, Artificial Sequence
  derived and/or modified sequence
atgcggaacctgaagagccacctgagcccctggatcctgatcccccactggctatctcaaatgtggctggccaccctcatgacatggcagttctttagccccgacctggatcactcaatcggcacccagtactcagcgaacccgcccgtgaccatagacgtgccaatgaccgatatgacgtctggacttatgggacatagccagctgacaacaatcgatcagtccgaactaagttctcagctcggtcttagtctggggggtgggaccatcctaccccctgcccagtcgccagaggaccgtctgtcaaccaccccttctcccactagcagtcttcacgaagatggcgtggaggactttcggcgtcagctgccgtctcagaaaaccgtggtggtcgaggctggtaagaagcagaaggctccaaagaaaagaaaaaaaaaagaccctaacgaaccccaaaagccagtgagtgcgtacgcactgttcttccgcgacacacaggccgctatcaaaggacagaaccccaatgctacttttggggaggtgagcaagattgttgcgagtatgtgggacagtttgggagaagagcagaagcaggtgtataaacgcaaaaccgaagccgcaaaaaaagagtatctcaaggctcttgccgcatataaagataaccaggagtgtcaggccaccgttgaaaccgtcgagctagatccagcccctcccagccagacccctagtcccccccctatggccacagtggacccagcctcacccgcccctgcatcgatcgagccaccagccctgagcccctccatcgtggtaaattctaccctcagcagttacgtggctaaccaggcttcaagcggcgccggtggacagccgaatattaccaagcttatcatcacaaaacagatgctgcctagctctatcaccatgagtcagggaggcatggtgacagtaattcctgcgaccgtggttacaagcagaggcctccagctaggacagacatccaccgcgacaatccagccttcccaacaagcccagatcgtgactcggtccgtgctgcaggctgctgcagcggccgctgccgcagcctcgatgcagctaccacccccccggctccagccacctcctttgcagcagatgccccagcccccaacccagcagcaggtgacaatcctacagcagccccccccactccaggcgatgcagcagccaccccctcagaaggtccggatcaacctacaacagcagcccccccccctccagatcaaatctgtgccactgcccacactcaagatgcagacaacccttgtgccacccactgtggagtctagtccagagaggcccatgaataattctcccgaggcgcacactgtggaggctccgagccctgagaccatatgcgagatgattacagatgtagttcccgaagtagaaagcccttctcagatggatgtggaactcgtgagtggatcccccgttgctctgtctccccagccgaggtgtgtcaggagtggctgcgagaatccgcctatcgtgagtaaagattgggataacgagtactgtagcaacgagtgcgtcgtcaagcattgccgcgatgtgtttctagcctgggtggccagcagaaacagtaataccgtggtgttcgtcaagtag

SEQ ID NO: 115489 - DNA, 1797 bp, Artificial Sequence
  derived and/or modified sequence
atggaaaccttccacaccccctccctgggtgacgaggagttcgaaatcccgcctatttcccttgattctgatccgtcactggcagtgtccgatgtcgtgggacattttgacgatctggcggacccttcctcctcacaggatggcagtttcagcgcccagtacggggtgcaaacactggacatgcccgttggaatgacacatgggcttatggaacagggaggcggactgctgtcaggcggactcacaatggacctggatcactccatcggtacgcagtattctgccaatcccccagtaacaatcgatgtgcccatgactgacatgacatccggactcatgggccattctcagttgacaacaatcgaccagtcagagctgtcatcacagctgggcctttctcttggaggcggtacaattcttcctccagctcagtcaccagaagatcggctgagtaccacgcctagtccaacatcttcgctgcatgaagacggcgtcgaagactttcggaggcaactgcccagccagaaaactgtcgtggtagaggctggaaaaaagcagaaggcacccaagaaaaggaagaaaaaagatcctaatgaaccccagaaacctgtatctgcgtacgcacttttcttccgggatacccaagcagctattaaaggccaaaatcctaacgctacattcggtgaagtgagcaagattgtagcaagtatgtgggactcactgggggaggagcaaaagcaggtctataagaggaaaaccgaggcagccaagaaggagtatctaaaagcgctcgctgcatataaggacaaccaggagtgccaagccacagtcgagactgtagaactggaccctgctcctccttcccaaactccttcaccgccaccaatggctactgtcgaccctgctagtcctgccccagccagcatcgagccccctgcgctttctcctagcatagtggtaaatagtacgctgtcctcttacgtggccaaccaggcatcttcaggcgcaggcggtcagccaaacatcacaaagctaattataaccaagcagatgttgcctagcagcatcacgatgtcccaggggggaatggttactgttattcccgctacagtggtcaccagcaggggacttcagcttggtcagacttctaccgccaccattcagccttcccagcaagcgcagattgttactcggtctgttctccaagccgcagcagcggcagcggctgctgcctcaatgcagctccctcctccccgactccagcccccaccgttgcagcaaatgccacagcccccaacacaacagcaagtgaccatcctgcagcaacccccacccctccaagcaatgcaacagccccctccccagaaggtgcgcatcaacctgcagcagcagcctccgcctcttcaaatcaaaagcgtccccttgccaacactcaagatgcagacaacgctcgtcccacctacggtggagagttcacccgagcggcctatgaacaactccccggaggcccacaccgtcgaagcaccttctcccgagactatttgtgagatgatcaccgacgtggtgcccgaggtggagagcccgtcccagatggacgtggagctagtttccggttcgccagttgctctttcaccccagcctcggtgcgtgagaagcggatgcgaaaacccaccaatcgtgtcgaaggactgggacaacgagtactgctcaaatgagtgtgtggtcaagcattgtcgtgacgtcttcctcgcctgggtggccagtcggaactctaacaccgtcgtgtttgtgaaatag

SEQ ID NO: 115490 - DNA, 1650 bp, Artificial Sequence
  derived and/or modified sequence
atgaggaacttgaagtcacatctgtctccctggatcctaataccccactggctgagtcagatgtggctggcaactcttatgacctggcagttcttttcgccagacctagatcacagcattggcacacagtacagtgcaaatcctccggtgacaattgacgtgccaatgaccgacatgacatcagggcttatgggccattcccagctgaccacaattgatcagagtgagctctcctcccaactgggcctgagcctaggaggcggaactatcttaccccctgctcaaagcccagaagatcgactgtccacaactccttcacccacaagcagccttcatgaggacggtgtagaggattttagaagacagctgcctagtcagaagaccgtcgtggttgaggctggcaagaaacaaaaagcgccaaagaagcgcaaaaaaaaggatcccaatgagccccagaaaccagtctcagcttacgctctgttcttccgcgacacccaagccgctatcaagggccagaatcctaatgcaaccttcggtgaggtgtccaaaatcgtggcttccatgtgggactcgctcggggaggagcagaagcaggtctacaaacgtaagactgaagcagccaaaaaggagtacctaaaagccctcgcagcctataaagataaccaggaatgtcaggctacggtcgagacagttgaattggaccccgctccgccttctcaaacccctagccctcctccgatggccacggtagatccagcaagcccagcgccagcttccattgagccccctgccctatccccctccatcgtagttaacagcacattgtcttcatacgttgccaaccaggccagctctggcgctggtgggcagcctaacattaccaagttaattatcacgaagcagatgctgccttcttcaattacaatgagtcagggcggaatggttacagtcattccagcaaccgtagtgacctccaggggactgcaacttggtcaaacatccacggctacaatccagccatctcagcaggcacagatcgttactagatctgtgctgcaggccgctgctgccgcagctgctgctgccagcatgcagctgcctcctccgagacttcagcctccaccgctgcagcagatgccgcagcccccaacacagcagcaggtaaccatcctccagcagccccctcctcttcaggctatgcagcagcctccaccccaaaaggtgcggattaacctgcagcagcagcccccaccactacagatcaagtctgtgcccttgccaacattaaaaatgcaaacaactctggtgccaccaaccgttgaaagctcacctgaacggcctatgaataacagtcctgaggcacatacagtcgaggccccttcaccggaaaccatttgcgaaatgatcacagacgtggttcccgaggtcgagagcccgtcacagatggatgtagaattggtgtccggaagtccagtcgccctcagtccccagccacgctgcgtccgctcggggtgtgagaatcctccaattgtatccaaagattgggacaatgagtattgttccaacgagtgtgttgtcaagcactgccgcgacgtgtttctcgcctgggtggccagtcgtaattcgaacaccgtggtgttcgtcaaatag

SEQ ID NO: 115491 - DNA, 2017 bp, Artificial Sequence
  derived and/or modified sequence
agtgggggcggtgggagcgatgagggtctgagacggtgggagcggttgtgtgaagatggagacattccatacaccaagcttgggtgatgaggaatttgaaatcccacctatctccttggattctgatccctcattggctgtctcagatgtggttggccactttgatgacctggcagacccttcctcttcacaggatggcagtttttcagcccagtatggggtccagacattggacatgcctgtgggcatgacccatggcttgatggagcagggcggggggctcctgagtgggggcttgaccatggacttggaccactctataggaactcagtatagtgccaacccacctgttacaattgatgtaccaatgacagacatgacatctggcttgatggggcatagccagttgaccaccattgatcagtcagaactgagttcccagctgggtttgagcctagggggtggcaccatcctgccacctgcccagtcacctgaagatcgtctttcaaccaccccttcacctactagttcacttcacgaggatggtgttgaggatttccggaggcaacttcccagccagaagacagtcgtggtggaagcagggaaaaagcagaaggccccaaagaagagaaaaaagaaagatcctaatgaacctcagaaaccagtttcagcatatgctttattctttcgtgatacacaggctgccatcaagggacagaatcctaatgccacttttggtgaggtttcaaaaattgtggcctccatgtgggatagtcttggagaggagcaaaaacaggtatataagaggaaaactgaggctgccaagaaagagtatctgaaggcactggctgcttacaaagacaaccaggagtgtcaggccactgtggaaacagtggaattggatccagcaccaccatcacaaactccttctccacctcctatggctactgttgacccagcatctccagcaccagcttcaatagagccccctgccctgtccccatccattgttgttaactccaccctttcatcctatgtggcaaaccaggcatcttctggagctgggggtcagcccaatatcaccaagttgattattaccaaacaaatgttgccctcttctattactatgtctcaaggagggatggttactgttatcccagccacagtggtgacctcccgggggctccaactaggccaaaccagtacagctactatccagcccagtcaacaagcccagattgtcactcggtcagtgttgcaggcagcagcagctgctgctgctgctgcttctatgcaactgcctccaccccgactacagccccctccattacaacagatgccacagcccccgactcagcagcaagttaccattctgcagcagcctcctccactccaggccatgcaacagcctccacctcagaaagttcgaatcaatttacagcaacagcctcctcctctgcagatcaagagtgtgcctctacccactttgaaaatgcagactaccttagtcccaccaactgtggaaagtagtcctgagcggcctatgaacaacagccctgaggcccatacagtggaggcaccttctcctgagactatctgtgagatgatcacagatgtagttcctgaggttgagtctccttctcagatggatgttgaattggtgagtgggtctcctgtggcactctcaccccagcctcgatgtgtgaggtctggttgtgagaaccctcccattgtgagtaaggactgggacaatgaatactgcagcaatgagtgtgtggtgaagcactgcagggatgtattcttggcctgggtagcctctagaaattcaaacacagtggtgtttgtgaaatagtccttcctgttctccaagccagtgaagagttatctgctgggaaagtgtccaagagcctgtttttgaaacacaagctgggcttctggtagtgcctcatcacaacccatgatggctgttcatgtttcaccccttttcttccttcagcagaggccaggctatggagca

SEQ ID NO: 115492 - DNA, 4201 bp, Artificial Sequence
  derived and/or modified sequence
atgaggaatttgaaatcccacctatctccttggattctgatccctcattggctgtctcagatgtggttggccactttgatgacctggcagtttttcagcccagacttggaccactctataggaactcagtatagtgccaacccacctgttacaattgatgtaccaatgacagacatgacatctggcttgatggggcatagccagttgaccaccattgatcagtcagaactgagttcccagctgggtttgagcctagggggtggcaccatcctgccacctgcccagtcacctgaagatcgtctttcaaccaccccttcacctactagttcacttcacgaggatggtgttgaggatttccggaggcaacttcccagccagaagacagtcgtggtggaagcagggaaaaagcagaaggccccaaagaagagaaaaaagaaagatcctaatgaacctcagaaaccagtttcagcatatgctttattctttcgtgatacacaggctgccatcaagggacagaatcctaatgccacttttggtgaggtttcaaaaattgtggcctccatgtgggatagtcttggagaggagcaaaaacaggtatataagaggaaaactgaggctgccaagaaagagtatctgaaggcactggctgcttacaaagacaaccaggagtgtcaggccactgtggaaacagtggaattggatccagcaccaccatcacaaactccttctccacctcctatggctactgttgacccagcatctccagcaccagcttcaatagagccccctgccctgtccccatccattgttgttaactccaccctttcatcctatgtggcaaaccaggcatcttctggagctgggggtcagcccaatatcaccaagttgattattaccaaacaaatgttgccctcttctattactatgtctcaaggagggatggttactgttatcccagccacagtggtgacctcccgggggctccaactaggccaaaccagtacagctactatccagcccagtcaacaagcccagattgtcactcggtcagtgttgcaggcagcagcagctgctgctgctgctgcttctatgcaactgcctccaccccgactacagccccctccattacaacagatgccacagcccccgactcagcagcaagttaccattctgcagcagcctcctccactccaggccatgcaacagcctccacctcagaaagttcgaatcaatttacagcaacagcctcctcctctgcagatcaagagtgtgcctctacccactttgaaaatgcagactaccttagtcccaccaactgtggaaagtagtcctgagcggcctatgaacaacagccctgaggcccatacagtggaggcaccttctcctgagactatctgtgagatgatcacagatgtagttcctgaggttgagtctccttctcagatggatgttgaattggtgagtgggtctcctgtggcactctcaccccagcctcgatgtgtgaggtctggttgtgagaaccctcccattgtgagtaaggactgggacaatgaatactgcagcaatgagtgtgtggtgaagcactgcagggatgtattcttggcctgggtagcctctagaaattcaaacacagtggtgtttgtgaaatagtccttcctgttctccaagccagtgaagagttatctgctgggaaagtgtccaagagcctgtttttgaaacacaagctgggcttctggtagtgcctcatcacaacccatgatggctgttcatgtttcaccccttttcttccttcagcagaggccaggctatggagcagggccactgaatttgctgtaatctggagatgctttttactttcaaccataagcggtaatagcagaggaaagggtgaagggagtctgggcaagcaaagcatagagatggtggggtggtggtggggttgaagaaacttgttggtataattgtcataggacttgcctaaaatattattaaaattacgggagtgtactcagctttgagcctaggagaaaatgccactgtgtgcatccattttaaagggttccctcataaaaaaatgttattccccattatcacatcagtacactgctttgaaaacaaaacttttcaacatgggcatactgggctacatggaaaatgacatcacccaggagtgatttctctttatatatattatttctgcagttaccatccttatctgagttatcacagttcatgaatctaagaggcggaactctacatcattagtaagaggttccaccaaagtctaaagttgtattcacttgtgtttgatgaactatctttaaaagaccataggtctatcattatttcttagacataatctaaagaaaaacagactagagaagccacctggttgtaacagaataagcagaagtttacagcatgatagtccaagtggtgataactttaaataaaactcaaatttttactgtttgtagacaggaatgctgtcctagagaacctcctcctcaaccagctacgtacatagttttatcctatgcattcctgttttctgtgttttttgttttttttttttgagacagagtctcgctctgtcacccaggctggagtgcagtggtgcgacctcagctcactgaaacctctgcctcccgggttcaagcgattctcctgcatcagcctcccgagtagctaggattacaggcgcccgccactacgcccagctaatttgtggtatttttagtagagacagggtttcaccatgttggccaggctggtctcgaactcctgacctcatgatccgcccgccttgacctcccaaagtgctgggattacaggcatgagccaccgcacccagcctgcattcctgtttttttaatggttttggagggtagcagtagagatggggtctcactatgttgcccagtctagtcttgaactcctgggctacagttaccctcctacctcggcttcccaaagtgctcggattacaggtgtgagccactgtgcctagcctataatgatcattttaatgtttcccatgcactcatttagtttgaaccttcacagcaacccaatgaggtaatactcccatttcacatataatactgagagatgagttgcacaagattatacactgttaagtagcagagccagaatggacttcagaatcccaactacaatacaaatgtttatttaaataaagaagaaagctattgtacaaatatcactcttcaggtttagcttacagagccatggctatggattcttagctctgtaaggaagtgcttctataaattcttaggtttagagatgataccatctgggtacctttgcttgaaccgtgcaaccacatctgggtctagtaggtggatcccatccagttggtttccaagggtgatcctgaaacagtgtaaaaggaggggcaaaccagaaatcctggaattagagggtttaatattgttaaaaaatgcataccaaatgaagactgcctatcatcatatcaaatatgccaattctaaaaagagcttaacattagaatagtatatggtagaattactagttcagaattggcatagattctggtgttaaaatagactggatctgtattatctgagggttagtaactaatgcttagccaggcctgcttcacagagttgctaccagggagtattctttggataagcaaaatgctagcagcatgtgttttaagctctgttaaggggtgaaagatgtaattattgacagattaaatagataacttcgtaaccaccagggggcagattcaatacatcacagaatggctgaggaagatccttgggttgtgaagagagtagaaaccctagggagcagtgcttttgggtcctagaacctgttgagtttctaatgaatatttgtagaatctcataaaacagtttaaatacaagcttaagtggcttatgaatcctgtgaagctcatttatggactagtgtaaaacaatgtgaagctctactaagttctgtccttaatcataaataatagccccttgaggactagcctgttctctggtcaccttaccagttgggttgcacattgtgtggtcgtccaaataactcaatcttgcgagtgccaggagatagtctttcaatcatgccatagatttcatctggtttatgactggtggaacgaacctaggaaataaaaactagctgctttttaagttac

SEQ ID NO: 115493 - DNA, 1089 bp, Artificial Sequence
  derived and/or modified sequence
atgagagagatcgtgcacctgcaggccggccagtgcggcaaccagatcggcgccaagttctgggaggtgatcagcgacgagcacggcatcgaccccaccggcacctaccacggcgacagcgacctgcagctggagagaatcaacgtgtactacaacgaggccaccggcggcaactacgtgcccagagccgtgctggtggacctggagcccggcaccatggacagcgtgagaagcggccccttcggccagatcttcagacccgacaacttcgtgttcggccagagcggcgccggcaacaactgggccaagggccactacaccgagggcgccgagctggtggacgccgtgctggacgtggtgagaaaggaggccgagagctgcgactgcctgcagggcttccagctgaccacccccacctacggcgacctgaaccacctggtgagcgccaccatgagcggcgtgaccacctgcctgagattccccggccagctgaacgccgacctgagaaagctggccgtgaacatggtgcccttccccagactgcacttcttcatgcccggcttcgcccccctgaccagcagaggcagccagcagtacagagccctgaccgtgcccgagctgacccagcagatgttcgacgccaagaacatgatggccgcctgcgaccccagacacggcagatacctgaccgtggccgccgtgttcagaggcagaatgagcatgaaggaggtggacgagcagatgctgagcgtgcagagcaagaacagcagctacttcgtggagtggatccccaacaacgtgaagaccgccgtgtgcgacatcccccccagaggcctgaagatggccgccaccttcatcggcaacagcaccgccatccaggagctgttcaagagaatcagcgagcagttcaccgccatgttcagaagaaaggccttcctgcactggtacaccggcgagggcatggacgagatggagttcaccgaggccgagagcaacatgaacgacctggtgagcgagtaccagcagtaccaggacgccaccgccgaggagggcgagttcgaggaggaggccgaggaggaggtggcctag

SEQ ID NO: 115494 - DNA, 1089 bp, Artificial Sequence
  derived and/or modified sequence
atgcgcgagatcgtgcatctgcaggcaggccagtgtggcaaccagattggagcaaagttttgggaggtcatcagtgatgagcacggcatcgacccgacgggtacataccacggagacagcgacctgcagctcgaacgtataaacgtctactataatgaggccactggagggaactatgtcccaagagccgtcttggttgatctagaacctggcaccatggactcagtacgttccggaccattcggccagatatttcgtccagacaatttcgtcttcggccaatctggagccggaaataattgggctaagggccattacaccgagggcgcagaactggtggatgctgtgttagatgtcgtgcgcaaggaggctgagtcctgtgactgtctccagggattccaactgaccacgcctacctatggtgatcttaaccatttagtttcagcgacaatgagcggtgtcacgacgtgtcttcggtttccgggacagctgaacgcagatctgcgaaagttggctgtaaacatggttccgttccctcgcttacatttcttcatgcctggcttcgcccccttaacttcaaggggctcccaacagtatagggccctgacagttcccgagctgacgcagcagatgttcgatgccaaaaatatgatggccgcatgcgatccccgccacggacgctacctcactgtcgcagctgtgtttagagggcggatgtccatgaaggaagtcgacgaacaaatgctgtcagtccagagcaagaattcttcttatttcgtggaatggatccctaataacgtcaaaaccgccgtgtgcgacatcccccccagggggctgaagatggccgcgacattcatcgggaacagcaccgcgatacaagagctgttcaagcgaatctcggaacagtttacagccatgtttcggagaaaggcctttttgcactggtataccggcgaggggatggacgagatggagtttacagaggcagagagcaacatgaacgatcttgtgtctgagtaccaacagtatcaggacgccaccgccgaagaaggcgaatttgaggaggaagccgaagaagaggtcgcctag

SEQ ID NO: 115495 - DNA, 1089 bp, Artificial Sequence
  derived and/or modified sequence
atgagggagatcgtgcacctgcaggccggccagtgtggcaaccagatcggggccaagttctgggaggtgatcagtgatgagcacggcatcgaccccaccggcacctaccatggagacagcgacctgcagctggagcgcatcaacgtgtactacaatgaggccactggaggcaactacgtgcccagggctgtgctggtggacctggagcccggcaccatggattctgtgcgcagcggccccttcggccagatcttccggccagacaactttgtgtttggccagagcggggccggcaacaactgggccaagggccactacacagaaggagctgagctggtggatgctgtgctggatgtggtgaggaaggaggccgagagctgtgactgcctgcagggcttccagctgaccacccccacctacggggacctgaaccacctggtgtctgccaccatgtctggagtgaccacctgcctgcgcttccctggccagctgaatgctgacctgaggaagctggccgtgaacatggtgcccttcccccggctgcacttcttcatgcctggctttgcccccctgaccagccggggcagccagcagtaccgggccctgactgtgcctgagctgacccagcagatgtttgatgccaagaacatgatggccgcctgtgaccccaggcatggccgctacctgactgtggccgctgtgttccggggccgcatgtccatgaaggaggtggatgagcagatgctgtctgtgcagagcaagaacagcagctactttgtggagtggatccccaacaacgtgaagacagctgtgtgtgacatccccccccggggcctgaagatggccgccaccttcatcggcaacagcacagccatccaggagctgttcaagaggatcagcgagcagttcaccgccatgttccggaggaaggccttcctgcactggtacacaggagagggcatggatgagatggagttcacagaagctgagagcaacatgaatgacctggtgtctgagtaccagcagtaccaggatgccacagctgaggagggggagtttgaggaggaggccgaggaggaggtggcctag

SEQ ID NO: 115496 - DNA, 1089 bp, Artificial Sequence
  derived and/or modified sequence
atgcgggagatcgtgcacctgcaggccggccagtgcggcaaccagattggggccaagttctgggaggttatctccgatgagcacggtattgaccctactgggacgtaccatggcgattcagatttacagctagaaagaattaatgtatactataacgaagctactgggggcaactacgttccacgagcggtactggtggacctagaaccgggaaccatggattccgtgagatccggcccctttggtcagatttttcggccagacaatttcgtgttcgggcagtcaggagccggcaataattgggcaaaaggccattatactgagggcgcagagctcgttgacgccgtgctcgacgtggtgcgtaaagaagccgagagttgcgattgcctccaggggttccagctcactactccaacatacggggacctgaatcacttagtgtccgcaaccatgagcggagttaccacatgcctgcgttttcccggacaacttaacgccgacttgcggaaactcgccgtgaacatggtgccgttccccagactgcactttttcatgcccggctttgcgccactgaccagccgaggaagtcagcaatatagagccctcacggtacccgaactcacgcaacagatgttcgacgctaagaatatgatggctgcttgtgacccacggcacggaaggtacctcactgttgccgccgtttttcgcggaaggatgtctatgaaggaggtggatgaacagatgttgtcagtgcaatcaaagaattcctcatatttcgtggagtggatccctaacaacgtgaagacagcggtctgcgacattcccccacgaggattgaaaatggctgccactttcataggcaattcaacagctatccaggaactgttcaagcgaatctcggaacagtttaccgccatgttcaggcggaaggcctttttgcactggtatactggagaagggatggacgaaatggagttcactgaagccgagagtaacatgaatgaccttgtaagcgagtaccagcaatatcaggacgccacagcggaggagggcgaatttgaggaagaggccgaggaggaagtagcatag

SEQ ID NO: 115497 - DNA, 1594 bp, Artificial Sequence
  derived and/or modified sequence
gtgctccgccgtctccgccgcatcttccaccctcgccgccgccgcagctccccgcgctcgtgccaccgccgccgcgtccaccctcagcgccaccgccatgcgggagatcgtgcacctgcaggccggccagtgcggcaaccagatcggggccaagttttgggaggttatcagtgacgaacatggcatcgaccccacaggcacataccatggggacagtgacctgcaactggagaggatcaacgtgtactacaacgaggccacaggaggaaattatgtccccagagcggtgctggtggacctggaacccggcaccatggactctgtccgttctggccccttcggtcagatctttcggccggacaacttcgtgtttggccaatccggagccggcaacaactgggcaaaggggcactacacggagggcgcagagctggtggacgctgtcctggacgtagtccggaaggaggccgagagctgcgactgccttcagggcttccagctgaccacccccacctacggggacctcaaccacctggtgtcggccaccatgagcggggtcaccacctgcctgcgcttcccgggccagctgaacgccgacctgcgcaagctggccgtcaacatggttccctttcctcgcctgcacttcttcatgcccggcttcgcacccctgaccagccggggcagccagcagtaccgggccctgacggtgcccgagctcacccagcagatgttcgatgccaagaacatgatggcggcgtgcgacccgcgccacggccgctacctgaccgtggccgccgtgttccggggccgcatgtccatgaaggaggtggacgagcagatgctgagcgtgcagagcaagaacagcagctacttcgtggagtggatccccaacaacgtgaagacggccgtgtgcgacatcccgccccgcggcctgaagatggccgcgaccttcatcggcaacagcacggccatccaggagctgttcaagcgcatctccgagcagttcacggccatgttccggcgcaaggccttcttgcactggtacacgggcgagggcatggacgagatggagttcaccgaggccgagagcaacatgaatgacctggtatctgagtaccagcagtaccaggacgccacggccgaggagggcgagttcgaggaggaggcggaggaggaggtggcctaggctgctcccatcgcttcccacctgtcccctcgaggcttctgacctttgatccgctaggccccccatctctgaaccctagagccccgctttccctccaaggctgactccccgctgaccctaacaatacctttggagctcgctttacctctggctacttcatctccgaccctggctcccctttgagccctaatttatctttaacccccttgagctcttccaaccttgacattcccaggaggagccccgcttcaccccttctgactctggaaaccgcacctttaactttgcagaccttccttcacccctgacttctgcttcacctttgacctctgccccccatgaatcccattttacctctagacctataagttctggtttatgtttgacccctccctctgagctgcactt

SEQ ID NO: 115498 - DNA, 1089 bp, Artificial Sequence
  derived and/or modified sequence
atgcgcgagatcgtacatttacaagccggacagtgtggtaaccagattggggctaagttctgggaggtcatctctgatgaacacggaattgacccaacaggcacctaccatggagattcagacctgcaactggagaggattaatgtttactataacgaggccaccggcggaaattatgtgccgcgtgctgtcttggtagatctggagccaggaaccatggatagcgttaggagtggacccttcggtcagattttccgccctgataatttcgtgtttggtcagtctggtgctggcaacaactgggccaaggggcactatacagagggcgcagagctggtggatgctgtgcttgatgtggtgagaaaggaggcggaaagctgcgattgtctccaaggctttcagctgactactcccacgtatggggacctgaaccacctggtctctgctaccatgagcggagtcactacctgtttgcgattccctggccagctgaacgcggacctcaggaagctcgccgttaacatggtgcctttcccacgtctgcatttctttatgcctggctttgctccgctgacatcacggggttcccagcagtatcgggctctgaccgtgcctgagttgacacagcagatgttcgatgccaagaatatgatggctgcgtgcgatccacggcacggcaggtatttgaccgtggcagctgtcttccgaggcaggatgtctatgaaagaagtggatgaacagatgctgtccgtgcagtcaaagaattcttcttacttcgtggagtggattccaaacaatgtcaaaaccgcggtctgtgacatcccccctcgaggactgaagatggctgcaaccttcatcggcaactctacagctatacaggagctatttaaacgtatcagcgaacaattcaccgctatgttccgtaggaaagcttttctgcactggtacacaggcgagggaatggacgaaatggagtttacagaggcagagtcaaatatgaatgaccttgtcagcgaataccagcagtaccaggatgctaccgccgaggaaggcgaattcgaagaggaagcagaggaagaagtggcttag

SEQ ID NO: 115499 - DNA, 1125 bp, Artificial Sequence
  derived and/or modified sequence
atggacagcgtgagaagcggccccttcggccagctgttcagacccgacaacttcatcttcggccagaccggcgccggcaacaactgggccaagggccactacaccgagggcgccgagctggtggacgccgtgctggacgtggtgagaaaggagtgcgagcactgcgactgcctgcagggcttccagctgacccacagcctgggcggcggcaccggcagcggcatgggcaccctgctgatcagcaagatcagagaggagttccccgacagaatcatgaacaccttcagcgtgatgcccagccccaaggtgagcgacaccgtggtggagccctacaacgccaccctgagcgtgcaccagctggtggagaacaccgacgagacctactgcatcgacaacgaggccctgtacgacatctgcttcagaaccctgaagctgaccacccccacctacggcgacctgaaccacctggtgagcgccaccatgagcggcgtgaccaccagcctgagattccccggccagctgaacgccgacctgagaaagctggccgtgaacatggtgcccttccccagactgcacttcttcatgcccggcttcgcccccctgaccagcagaggcagccagcagtacagagccctgaccgtgcccgagctgacccagcagatgttcgacgccagaaacatgatggccgcctgcgaccccagacacggcagatacctgaccgtggccaccgtgttcagaggccccatgagcatgaaggaggtggacgagcagatgctggccatccagagcaagaacagcagctacttcgtggagtggatccccaacaacgtgaaggtggccgtgtgcgacatcccccccagaggcctgaagatggccagcaccttcatcggcaacagcaccgccatccaggagctgttcaagagaatcagcgagcagttcagcgccatgttcagaagaaaggccttcctgcactggttcaccggcgagggcatggacgagatggagttcaccgaggccgagagcaacatgaacgacctggtgagcgagtaccagcagtaccaggacgccaccgccaacgacggcgaggaggccttcgaggacgaggaggaggagatcgacggctag

SEQ ID NO: 115500 - DNA, 1125 bp, Artificial Sequence
  derived and/or modified sequence
atggacagcgtgcgatctggcccattcggacagctgtttaggccagataattttattttcggccagacaggtgccgggaacaactgggcaaagggtcactatactgagggtgcagaactggtggatgcagtgcttgacgttgtgcggaaagaatgcgagcattgtgattgccttcagggttttcagcttacgcactcactgggcggcggtacgggaagcggaatgggcacactgctgattagcaaaatcagggaagagttcccggataggataatgaacacgttttcagtgatgcctagccctaaggtgtctgacaccgtggtagagccctataatgctactctgtcggtacatcagcttgtggaaaacaccgacgagacctactgtattgacaatgaagctctgtacgacatttgcttcagaacactgaaactaactacgcccacatatggagaccttaaccaccttgttagcgccacaatgtcaggcgtgactacttccctccgttttcccggacagttgaatgcagacttgagaaagctcgctgtgaatatggttccattccctcggctccatttctttatgccgggcttcgcacctctcacctcacgtggtagccagcagtaccgggctctcactgttcccgagctcacccagcagatgtttgatgctcggaatatgatggccgcctgcgatccacgccacgggagatacctgacagtagctaccgtcttccgcggccctatgtccatgaaggaagttgacgagcaaatgctagctatccagtctaagaacagcagctactttgttgagtggatccctaataatgtgaaagtagcagtctgtgacataccgccgcgcggactcaaaatggcttccacgttcattggcaattcgactgccattcaggagctgttcaaaaggatctcagagcaattcagcgcgatgttccgtagaaaagcttttctgcactggttcaccggagaggggatggacgaaatggaatttacggaagctgaatcaaatatgaacgatctggtgtccgaataccagcagtatcaagatgctaccgcgaacgatggcgaggaagcctttgaggatgaagaggaggagatcgatgggtag

SEQ ID NO: 115501 - DNA, 1125 bp, Artificial Sequence
  derived and/or modified sequence
atggattctgtgcgcagcggccccttcggccagctgttccggccagacaacttcatcttcggccagacaggagctggcaacaactgggccaagggccactacacagaaggagctgagctggtggatgctgtgctggatgtggtgaggaaagaatgtgagcactgtgactgcctgcagggcttccagctgacccacagcctgggcggcggcactggaagtggcatgggcaccctgctgatcagcaagatccgggaggagttcccagaccgcatcatgaacaccttctctgtgatgcccagccccaaggtgtctgacacagtggtggagccctacaatgccaccctgtctgtgcaccagctggtggagaacacagatgagacctactgcatcgacaatgaggccctgtatgacatctgcttccgcaccctgaagctgaccacccccacctacggggacctgaaccacctggtgtctgccaccatgtctggagtgaccaccagcctgcgcttccctggccagctgaatgctgacctgaggaagctggccgtgaacatggtgcccttcccccggctgcacttcttcatgcctggctttgcccccctgaccagccggggcagccagcagtaccgggccctgactgtgcctgagctgacccagcagatgtttgatgccaggaacatgatggccgcctgtgaccccaggcatggccgctacctgactgtggccaccgtcttccggggccccatgtccatgaaggaggtggatgagcagatgctggccatccagagcaagaacagcagctactttgtggagtggatccccaacaacgtgaaggtggccgtgtgtgacatccccccccggggcctgaagatggccagcaccttcatcggcaacagcacagccatccaggagctgttcaagaggatcagcgagcagttcagcgccatgttccggaggaaggccttcctgcactggttcaccggggagggcatggatgagatggagttcacagaagctgagagcaacatgaatgacctggtgtctgagtaccagcagtaccaggatgccacagccaatgatggagaggaggcctttgaagatgaggaggaggagattgatggatag

SEQ ID NO: 115502 - DNA, 1125 bp, Artificial Sequence
  derived and/or modified sequence
atggacagcgtgcggagcggccccttcggccagctgttccggcccgacaactttatcttcggccagactggagctggcaacaactgggccaaagggcactatacagaaggagccgagttagtagacgccgtgttagacgtggtgaggaaggagtgcgaacactgtgattgtctacagggattccagctgactcactctctagggggcgggacagggtcaggtatggggacgctgcttatcagcaagattcgcgaggaatttcccgacagaattatgaacacctttagtgtgatgcctagtccaaaggtttccgatacagtggtggagccttacaatgccaccctgagcgtgcatcagcttgtggagaataccgacgaaacatactgcattgataacgaagccctctacgatatctgcttccggaccctgaaacttaccacgcctacctatggcgacttaaatcacctggtgagcgccactatgtctggtgttaccacatcactgagatttccaggccagcttaacgcggacttgagaaagctagccgtcaatatggtgccgttcccacgattacatttttttatgcctggttttgcgcctctgacgagtcgcggttcacagcagtatcgtgcactgacagtccccgagcttacccagcagatgttcgacgccagaaatatgatggccgcctgcgacccgcggcatggccgctacctgaccgtcgctaccgtttttcgcgggcccatgagcatgaaggaggtagacgaacagatgcttgcaatccagagtaagaactcatcttactttgtggaatggatccctaacaacgtaaaggttgctgtctgcgacatcccacctcgcggtctcaaaatggcttcaactttcatcgggaattccacagcgattcaggaattgttcaagcgcatcagcgagcagttttcagctatgttcaggcgcaaagcttttctgcattggtttactggagagggcatggacgagatggagttcacggaggccgaatcaaatatgaacgatctggtgtctgagtaccagcagtatcaggacgctaccgcaaacgacggagaagaggctttcgaggacgaggaggaagagatagacggttag

SEQ ID NO: 115503 - DNA, 1125 bp, Artificial Sequence
  derived and/or modified sequence
atggacagcgtgaggagtgggccatttggacagctctttcggcctgacaactttatatttggccaaaccggcgctgggaataattgggccaagggacattacacagaaggcgctgagctggtcgacgctgtcttggatgtggtgcgcaaggagtgtgagcactgcgattgccttcagggtttccagctaacccatagtctgggaggaggaactggcagcggcatgggcactctccttattagtaaaattcgtgaggagtttccagaccgaattatgaacaccttctctgtcatgccttcaccgaaggtgtccgatactgttgtggagccatataatgccaccttgtcagtacaccagttggtggagaacaccgatgaaacttactgcatcgacaatgaggctctgtatgatatatgtttcagaacgctgaaattaacaacacccacttacggcgatctgaatcacctggtttccgctacaatgagcggtgttaccacatcccttaggtttcccggtcagctcaatgccgatctgcgcaagctggcggtgaacatggtgccctttccccgactgcactttttcatgcctggatttgctcccttgacgtcaagaggcagccagcagtatagggcactgaccgttcctgagctgacccaacagatgttcgatgctcggaatatgatggccgcatgtgatcctcgccacggccgatatctcactgtcgccactgtgttccgcggaccaatgagtatgaaggaggtggatgagcagatgctggccatccagtcaaagaattcttcctatttcgtcgagtggattcccaataatgttaaggtggccgtgtgtgacatcccccctagaggtctgaagatggcttctacatttatcggaaattcaaccgccatccaagagttgttcaagaggatctctgaacagttttcagccatgtttcgccgtaaggcgtttcttcattggtttacaggggagggaatggatgagatggaatttacagaggctgagtccaacatgaacgatctcgtgtccgaatatcaacagtatcaggatgccacagccaacgatggagaagaggccttcgaagatgaagaggaggagattgatgggtag

SEQ ID NO: 115504 - protein, 197 aa, Artificial Sequence [sequence omitted]

SEQ ID NO: 115505 - DNA, 1686 bp, Artificial Sequence
  derived and/or modified sequence
tgcgcaccaatgaatgtgcatggagatggagaggcgggcctgcaagtgcgaacaagccaatcacggaatcccggcggccggcggcccgggaggcagtcgcgcgctcgcatccccaagatggcggccgttaaggacagttgtggcaaaggagaaatggccacagggaatgggcggcggctccacctggggattcctgaggccgtgtttgtggaagatgtagattccttcatgaaacagcctgggaatgagactgcagatacagtattaaagaagctggatgaacagtaccagaagtataagtttatggaactcaaccttgctcaaaagaaaagaaggctaaaaggtcagattcctgaaattaaacagactttggaaattctaaaatacatgcagaagaaaaaagagtccaccaactcaatggagaccagattcttgctggcagataacctgtattgcaaagcttcagttcctcctaccgataaaatgtgtctgtggttgggggctaatgtaatgcttgaatatgatattgatgaagctcaggcattgttggaaaagaatttatcgactgccacaaagaatcttgattccctggaggaagaccttgactttcttcgagatcaatttactaccacagaagtcaatatggccagggtttataattgggatgtaaaaagaagaaacaaggatgactctaccaagaacaaagcataatgctggcaattaaaaatgtggtttagttttccaaacatgttatcttaaatacccctttatccttacaggttgacataactttgaatgttttaacagcaagaattttaagaaaagataaacaccattttatttatttataaaaacaaaattagtttcaaatatttttgacattgtgatttttttttccacatttctcagcaaagctaatggtattttaatcattatttttgcctgtcataagaaaactcttagctgaaatggccgaaaactgtgagacatgctatggaagctgaatgccggacgctagcacagtttactttttccctttctaatcggctgatgttactctcacttgatgtggttaaaccattttagaggtagagaagacagacagtttgaatatttgtaaacttgtttttctttggtatatttaggacttagtggtcctctgttgctattgtcttctataagtggagtttcatgacttactgcttaacgaataactaactactatgatattctggacattttaggaaatggtaatttgccttgctacacattaagagggctattaagactacattttttctaacctcagataagtgcagtgtctttgcaatgccaacataagggagatcttggccaacgtgaaataaaattactcattcaaaactctgcctaaggtgattttgtagttcttaacagttctccagagcatcttgaacaggaatattaagataaatgtgaatctgcaatggctgaaaagagttgtgagcttttttattcatgataaaaccttataggaatagtataaaaaatccctgtggaaagctactagtacattgaccagcgctgggtgatacagattctgataaaaacataaatgtattagttcatctccatgtagtaaaaagtatacttatacaatgttttgtacttgtatttcatgaaattaaaacagtgatgctaaaacta

SEQ ID NO: 115506 - protein, 192 aa, Artificial Sequence
  derived and/or modified sequence
MAPQPMIHTQQGLRTSSPSTPSPEHQEDVDSFMKQPGNETADTVLKKLDEQYQKYKFMELNLAQKKRRLKGQIPEIKQTLEILKYMQKKKESTNSMETRFLLADNLYCKASVPPTDKMCLWLGANVMLEYDIDEAQALLEKNLSTATKNLDSLEEDLDFLRDQFTTTEVNMARVYNWDVKRRNKDDSTKNKA

SEQ ID NO: 115507 - DNA, 579 bp, Artificial Sequence
  derived and/or modified sequence
atggccccccagcccatgatccacacccagcagggcctgagaaccagcagccccagcacccccagccccgagcaccaggaggacgtggacagcttcatgaagcagcccggcaacgagaccgccgacaccgtgctgaagaagctggacgagcagtaccagaagtacaagttcatggagctgaacctggcccagaagaagagaagactgaagggccagatccccgagatcaagcagaccctggagatcctgaagtacatgcagaagaagaaggagagcaccaacagcatggagaccagattcctgctggccgacaacctgtactgcaaggccagcgtgccccccaccgacaagatgtgcctgtggctgggcgccaacgtgatgctggagtacgacatcgacgaggcccaggccctgctggagaagaacctgagcaccgccaccaagaacctggacagcctggaggaggacctggacttcctgagagaccagttcaccaccaccgaggtgaacatggccagagtgtacaactgggacgtgaagagaagaaacaaggacgacagcaccaagaacaaggcctag

SEQ ID NO: 115508 - DNA, 579 bp, Artificial Sequence
  derived and/or modified sequence
atggcgccacagccaatgatccatacacagcagggtctgcgaaccagctccccctcaacaccgagcccagagcaccaggaggacgttgatagcttcatgaagcaacctggaaatgaaactgctgatacagtcctcaaaaagctggatgagcagtatcagaagtacaaattcatggagcttaatctagcccagaaaaagcggcgtctaaagggtcagattcccgaaatcaagcagacgcttgagatcctgaagtacatgcaaaagaaaaaggaatcaaccaacagcatggagacccgctttctcctggctgataatctatattgcaaggcatctgtgcccccaacagataaaatgtgcctgtggctgggcgctaatgtgatgttggagtacgatattgatgaggcccaggcccttctcgaaaaaaatttgagtactgccacaaaaaacctcgattcactcgaggaggaccttgattttttgcgggaccagttcacgacgaccgaggtgaacatggctagggtatacaactgggacgtgaagagacgcaacaaagacgattctaccaagaacaaggcatag

SEQ ID NO: 115509 - DNA, 579 bp, Artificial Sequence
  derived and/or modified sequence
atggccccccagcccatgatccacacccagcagggcctgcggaccagcagccccagcacccccagccctgagcaccaggaggatgtggacagcttcatgaagcagcctggaaatgaaacagctgacacagtgctgaagaagctggatgagcagtaccagaagtacaagttcatggagctgaacctggcccagaagaagaggcggctgaagggccagatccctgagatcaagcagaccctggagatcctgaagtacatgcagaagaagaaggagagcaccaacagcatggagacccgcttcctgctggccgacaacctgtactgcaaggcctctgtgcccccaacagacaagatgtgcctgtggctgggcgccaacgtgatgctggagtatgacattgatgaggcccaggccctgctggagaagaacctgagcacagccaccaagaacctggacagcctggaggaggacctggacttcctgcgggaccagttcaccaccacagaggtgaacatggcccgggtgtacaactgggatgtgaagagaagaaacaaggatgacagcaccaagaacaaggcctag

SEQ ID NO: 115510 - DNA, 579 bp, Artificial Sequence
  derived and/or modified sequence
atggccccccagcccatgatccacacccagcagggcctgcggacctcaagcccctctacgccctctccggaacaccaagaggatgtggatagtttcatgaaacagcccgggaatgagactgcagataccgtgcttaagaaactggacgaacagtatcagaaatacaagttcatggagctgaacttagcacagaagaaacgacggctgaagggccagatccctgagatcaaacaaacactggaaatactgaagtatatgcaaaaaaagaaagagtctacaaacagcatggaaacccgattcctgctagctgataatctctactgcaaagcatcagttccgcctaccgacaaaatgtgtttgtggctgggggctaatgtgatgttagagtacgatattgatgaggcccaggccctcctagagaagaatctctccacggctaccaaaaacctggacagcttagaggaagatctggactttttaagggaccagttcacaacaacagaggtcaacatggcccgggtctataattgggacgttaaacggcgcaacaaggacgatagtaccaaaaacaaggcatag

SEQ ID NO: 115511 - DNA, 579 bp, Artificial Sequence
  derived and/or modified sequence
atggcaccccagcctatgattcacacgcaacagggcctgcggacttccagtccgagcactccttcaccagaacaccaggaagatgtagacagtttcatgaaacagcccggaaatgagactgctgatacagtgctgaagaagctggacgagcagtaccagaagtataagtttatggagcttaacctggcacagaaaaaacgcagattgaagggacagatccccgaaattaaacagactctggagatcttgaagtatatgcagaagaagaaggagtccaccaatagtatggaaacccggttcttgctggctgacaacctgtattgtaaggcttctgtcccaccgactgacaagatgtgcttgtggctcggggcaaatgtcatgctggaatacgacatcgacgaggcgcaggcactcttggaaaaaaatttgtcaacggccacaaagaatctggactccctggaagaagatctcgacttcctacgcgatcagtttaccacaactgaagtgaacatggctagggtgtataattgggacgtgaaaagacggaacaaggatgacagtaccaagaataaagcttag

SEQ ID NO: 115512 - DNA, 944 bp, Artificial Sequence
  derived and/or modified sequence
attactcagcttttcatctgctgtgttgaaagccaacttatcatttttcacattattgtatacatctaaaagacatcataaacgaagactggaagtgaaaactgaaaaactgagaaagttttatttgttggaggttccaactccattgggagctccttctctaatggcacctcaacccatgattcatacccagcaaggcctaaggaccagtagtccttccactccatccccagagcatcaggaagatgtagattccttcatgaaacagcctgggaatgagactgcagatacagtattaaagaagctggatgaacagtaccagaagtataagtttatggaactcaaccttgctcaaaagaaaagaaggctaaaaggtcagattcctgaaattaaacagactttggaaattctaaaatacatgcagaagaaaaaagagtccaccaactcaatggagaccagattcttgctggcagataacctgtattgcaaagcttcagttcctcctaccgataaaatgtgtctgtggttgggggctaatgtaatgcttgaatatgatattgatgaagctcaggcattgttggaaaagaatttatcgactgccacaaagaatcttgattccctggaggaagaccttgactttcttcgagatcaatttactaccacagaagtcaatatggccagggtttataattgggatgtaaaaagaagaaacaaggatgactctaccaagaacaaagcataatgctggcaattaaaaatgtggtttagttttccaaacatgttatcttaaatacccctttatccttacaggttgacataactttgaatgttttaacagcaagaattttaagaaaagataaacaccattttatttatttataaaaacaaaattagtttcaaatatttttgacattgtgatttttttttccacatttctcagcaaa

SEQ ID NO: 115513 - protein, 336 aa, Artificial Sequence
  derived and/or modified sequence
MDYPTLLLALLHVYRALCEEVLWHTSVPFAENMSLECVYPSMGILTQVEWFKIGTQQDSIAIFSPTHGMVIRKPYAERVYFLNSTMASNNMTLFFRNASEDDVGYYSCSLYTYPQGTWQKVIQVVQSDSFEAAVPSNSHIVSEPGKNVTLTCQPQMTWPVQAVRWEKIQPRQIDLLTYCNLVHGRNFTSKFPRQIVSNCSHGRWSVIVIPDVTVSDSGLYRCYLQASAGENETFVMRLTVAEGKTDNQYTLFVAGGTVLLLLFVISITTIIVIFLNRRRRRERRDLFTESWDTQKAPNNYRSPISTSQPTNQSMDDTREDIYVNYPTFSRRPKTRV

SEQ ID NO: 115514 - DNA, 1011 bp, Artificial Sequence
  derived and/or modified sequence
atggattaccccaccctgctgctggccctgttacatgtttaccgggctctgtgcgaggaggttttgtggcatacctcggtgccttttgccgagaacatgtctttggaatgtgtttacccaagcatgggtatcttgacccaggtagagtggtttaagattggaacacaacaggacagcattgccattttctccccaacgcacgggatggtgatccgcaaaccctacgccgaaagagtgtactttctcaactctactatggcctctaacaacatgaccctgttttttaggaatgcttcagaagatgacgttggctattactcttgcagcctttatacatacccacaggggacttggcaaaaggtgatccaggtggtacagtcagactcattcgaagcggcagtgcccagtaacagccacattgtctctgagccgggtaaaaatgtgacgctgacctgtcagccccagatgacctggccagtacaggccgtgagatgggagaagattcagccccggcagattgatctcctgacatactgtaacctggtccacggaagaaacttcactagcaaattcccacgccagattgttagcaactgttcacacggcagatggagtgtgatcgttatcccggacgtgaccgtctcagacagtggcctatatcggtgttatctccaagcatctgcgggagaaaatgagacctttgtaatgcgcctgactgtggctgagggcaagaccgataaccagtataccctttttgttgctgggggaacagtgctgttactgctgttcgtcatctctatcaccacaataattgtcatatttctgaataggcggagaaggagggagagaagggatcttttcactgagtcctgggacacccagaaggcgcctaacaactataggtctcccatttccacatcgcagccaactaatcagtctatggacgataccagagaggacatctacgtgaactaccctacatttagccggcgccccaagaccagggtttag

SEQ ID NO: 115515 - DNA, 1011 bp, Artificial Sequence
  derived and/or modified sequence
atggactaccccaccctgctgctggccctgctgcacgtgtaccgggccctgtgtgaggaggtgctgtggcacacctctgtgccctttgctgagaacatgagcctggagtgtgtgtaccccagcatgggcatcctgacccaggtggagtggttcaagattggcacccagcaggacagcatcgccatcttcagccccacccacggcatggtgatcaggaagccctatgcagagcgggtgtacttcctgaacagcaccatggccagcaacaacatgaccctcttcttcagaaatgcctctgaagatgatgtgggctactacagctgcagcctgtacacctacccccagggcacctggcagaaggtgatccaggtggtgcagagcgacagctttgaggccgctgtgcccagcaacagccacatcgtgtctgagcccgggaagaatgtgaccctgacctgccagccccagatgacctggcctgtgcaggccgtgcgctgggagaagatccagccccggcagattgacctgctgacctactgcaacctggtgcatggaagaaacttcaccagcaagttcccccggcagatcgtgagcaactgcagccacggccgctggagcgtgattgtcatcccagatgtgacagtgtctgattctggcctgtaccgctgctacctgcaggccagcgctggggagaatgagacctttgtgatgaggctgactgtggccgagggcaagacagacaaccagtacaccctgtttgtggccggcggcaccgtgctgctgctgctgtttgtgatcagcatcaccaccatcatcgtcatcttcctgaacagaagaagaagaagagaaagaagagacctcttcacagagagctgggacacccagaaggcccccaacaactaccgcagccccatcagcaccagccagcccaccaaccagagcatggatgacacccgggaggacatctacgtgaactaccccaccttcagccggcggcccaagaccagggtgtag

SEQ ID NO: 115516 - DNA, 1011 bp, Artificial Sequence
  derived and/or modified sequence
atggactaccccaccctgctgctggccctgctgcacgtgtaccgggcactgtgcgaagaggtgctctggcacacatctgtccctttcgcagaaaacatgtctcttgagtgtgtgtatcctagcatgggaatactcacgcaagtcgagtggttcaagatcggcacccagcaggactcgatagccatcttcagccccacccacggtatggtgattcggaaaccgtatgccgagagggtatatttccttaactccaccatggccagcaacaacatgaccctgtttttcaggaatgcttcggaagacgatgttgggtattacagttgcagcctgtacacatacccacagggcacttggcagaaggttatacaggtcgtccagagcgattcgtttgaagctgccgtgccaagtaattcccatatagtttccgaacccggcaagaacgttacactgacgtgccagccacaaatgacctggcccgttcaggcagtgaggtgggagaagatccagccgagacagatagacttgctgacatattgcaacctggtgcacgggcgaaacttcacctcgaagtttccaagacagatcgtcagcaactgctctcacgggcggtggtccgtgatcgtgatccccgatgtgaccgtgtcagacagtggtctctacaggtgctacctgcaggccagcgccggcgagaatgagacattcgtgatgcgactgaccgtcgcagagggcaagaccgacaatcagtataccctcttcgtcgccggaggaaccgtccttctcctgctctttgtcatctcaattactaccataattgtgatatttctcaacaggcggaggcggagggagagacgagacctctttacagaaagctgggatacgcaaaaggcacctaataactaccgaagtccaatatccacaagtcagcctacaaatcaatccatggatgatacaagggaggacatttacgttaattatccaacattttctagaagacccaagacacgcgtttag

SEQ ID NO: 115517 - DNA, 1011 bp, Artificial Sequence
  derived and/or modified sequence
atggattatcccaccttgctgctcgcgcttctgcacgtgtatagggcgttatgcgaagaagttttgtggcacacaagtgtgccatttgcagagaatatgtccctggaatgtgtatatccctcaatggggatcctgacacaggttgaatggtttaagatcggaactcagcaggatagcattgccatattttctcctacccacggtatggtgatacggaaaccctacgcagaaagagtatattttcttaacagcaccatggccagtaataacatgacattattctttagaaatgcctctgaagatgacgtcggatactacagctgttccctatacacctatccacaggggacctggcagaaggtaatccaggtggtgcagtctgactcctttgaggctgcagtgccttctaatagccacatcgtctctgagcctgggaagaatgtgaccctcacctgtcagcctcaaatgacctggcctgtgcaggctgtaaggtgggaaaagattcagcccagacagattgaccttctgacatattgcaacctcgtccacggaaggaatttcacatcaaagtttccacgccaaattgtgagcaactgcagccacggcaggtggagtgtgattgtgataccggatgtgaccgtctccgattctggactgtatcggtgctacctgcaggcctctgcaggcgagaatgagacattcgtgatgcggctgaccgtcgctgagggaaaaacagataatcagtacacactgttcgttgccggagggactgttcttctgttactcttcgtaattagcattacaacaattattgtcatttttcttaaccgcagaaggcggcgtgagcgcagggatttgttcacggagagttgggatacccagaaggcccctaataactatcgctcccccatttccacctctcagcctacaaatcagagcatggacgacacccgcgaagatatctacgtcaattacccaactttttcacggaggcccaagacccgcgtctag

SEQ ID NO: 115518 - DNA, 4661 bp, Artificial Sequence
  derived and/or modified sequence
cgctcccctcagctcctgcagtgctaattaagggagggagcagcggggagcttgcagtgaccaagagggtgttgaggctaggaggccacgataaacaggatacgataaaagtccttaaccaagacgcagatgggaagaagcgttagagcgagcagcactcacatctcaagaaccagcctttcaaacagtttccagagatggattatcctactttacttttggctcttcttcatgtatacagagctctatgtgaagaggtgctttggcatacatcagttccctttgccgagaacatgtctctagaatgtgtgtatccatcaatgggcatcttaacacaggtggagtggttcaagatcgggacccagcaggattccatagccattttcagccctactcatggcatggtcataaggaagccctatgctgagagggtttactttttgaattcaacgatggcttccaataacatgactcttttctttcggaatgcctctgaagatgatgttggctactattcctgctctctttacacttacccacagggaacttggcagaaggtgatacaggtggttcagtcagatagttttgaggcagctgtgccatcaaatagccacattgtttcggaacctggaaagaatgtcacactcacttgtcagcctcagatgacgtggcctgtgcaggcagtgaggtgggaaaagatccagccccgtcagatcgacctcttaacttactgcaacttggtccatggcagaaatttcacctccaagttcccaagacaaatagtgagcaactgcagccacggaaggtggagcgtcatcgtcatccccgatgtcacagtctcagactcggggctttaccgctgctacttgcaggccagcgcaggagaaaacgaaaccttcgtgatgagattgactgtagccgagggtaaaaccgataaccaatataccctctttgtggctggagggacagttttattgttgttgtttgttatctcaattaccaccatcattgtcattttccttaacagaaggagaaggagagagagaagagatctatttacagagtcctgggatacacagaaggcacccaataactatagaagtcccatctctaccagtcaacctaccaatcaatccatggatgatacaagagaggatatttatgtcaactatccaaccttctctcgcagaccaaagactagagtttaagcttattcttgacatgagtgcattagtaatgactcttatgtactcatgcatggatctttatgcaatttttttccactacccaaggtctaccttagatactagttgtctgaattgagttactttgataggaaaaatacttcattacctaaaatcatttttcatagaactgtttcagaaaacctgactctaactggtttatatacaaaagaaaacttactgtatcatataacagaatgatccaggggagattaagctttgggcaagggctatttaccagggcttaaatgttgtgtctagaattaagtatgggcataaactggcttctgaatccctttccagagtgttggatccatttccctggtcttggcctcactctcatgcaggctttcctcttgtgttggcaagatggctgccaactcttggcaattcatacatccttgtttctgtctggtagagagtttgcttctcaaatggagcaaacaaatttgattattttttcattgttaaataggcaacatgaccagaaaggatggaatggcttaagtaaactaagggttcacttctagagctgagaagcagggtcaaagcacaatactgggcaattcagagcatggttagaagaggaaaggggagtctcaaagctggagagtttaccaacaaatattgactgcagtgattaaccaagacatttttgttaactaaaaagtgaaatatgggatggattctagaaatggggtatctctgtccatacttctagaatccactctatcagcatagtccagaagaatacctggcagtagaagaaatgaatattcaagaggaagataaatgcgagagggcaatcctttactattctcatatttatttatctctcattctgtatagaattcttgccgccatcccaggtctagccttaggagcaaatgtagtagatagtcgaataataaataacttaatgttttggacatattttgtctacttttgagaattatttttaatatgtaaattctctcaaaagggtcaggcacctagttattattttttaatgattatgtgaaagttgaatataatataccactaaaagtgacagttgaaagtggtggcataggacggtagggtagaaatttgggagggaaaaaagaaattgggagggtacaggcaacaggagaaaggaatcaaaccacagaaaaatacaaagggaaacttctgcttcactattcagacaaagacagccctaatgacatcaccaacagtcaaagcaattagagaccatacctaatattgtttaaattctagatgtaggctaacaatgaaaagtatttgccaaactgaataaaactgtcatggttaccttgaaaggacaatggttattgttaaatatagtgatcattcatgtctaaaagattcattatttatctctaaagatttctaaagaccaccatctagaaaagattcattatgaaggctgtatttaaatatcaaagttgtggacttcatgataatcttaaataaagcaaatccaaattctcctgttgcctagacagattctaagatgtaatttacacttttaagctaattagtgagtattttatgattttagccttaaacaccatgtatgccaaataatgcacttgttttgtgaattacagaaatggtaagtgcccacatttctgtgaattataaaatttgtgagtttcttttaacccttttcaggagtgaaaaaataaaaacgaccatttcctggttgtgcttaagtatatgcaagaagggtaaactctcatttttattatgtttgcttaaagatctttttatacctggattcatgaaatgtttccacaaatatattagtgtaacaaacttgaaaggcagtttacaagaaagcactctactatcagatcaatcaaagattctgtgagtgaatttattggtttgcatggtgaagcaagcttagcatcaattaaaaggtaaataatttcttttctgaatggtaaagacaatcaaaatattactttctggaaaactccaataaccaaattctcaatgattagtgtatgtgagcaggaaaacatttttacagttgtagtatggggaaatataaatccaattttaagagagaaaattatgactgggtgtggaagggacagtatagtcagataccattgtcatggtggtttttactgggaacttcatgaaagacttttgtagcaaaccactgcagtattgcaaagcctccagaacatttggaacttgtctctttttccttgtgtgtgtttgtgtttttggtctctcattcaaaatattgatgagaactatttactctgtcctttcttctctatatattcttcctctacagagtgtagggttttttcaggaatttggagccatctgaagtcctcccaaaaattctctgacgtcttctgatgctcctgttataccctcaggggtaatgcttgtgaaattccattcattcattttctttctctggacatctttacttaccaaagcactttcattgtcatctttttaacatcattcttaattcgtgatagttttgggactctccctagtgtatgtttctccccctctactcttttgcacctatgattctgattgttactaagaaagcagatgaaaaacagatccacagaataaacgatcagaattccagtaaattctattttaaatacagatactttttacaagttgctgctttggaagcaaaatgcttcttaagttttacatatatatatatatatatacatatatatatacacatataatttatatcgatggataatacattaagaatctatgcttcctttgaatgccattaatatttatgttaaagtaaccaatgaaaggaaattactttgttataataagataggaagacttgttaatggagtacacagttttgtcagggaaagaacacatcttattgaactatgatgactatgcattgactatattattataagagataccttcaaactttatttaaagaactttaggtataatatgttgagaaaataaaatagaaatttcatttacttgtaatcatgcttaaaatgggaggcaggtaggtgaagatataatttttagtaaaaactccaatttatgttttaagtaattcagtgtattactaaaatactatatatataaacttaaaatacatgggttatcaatttaaaagacaaagtaagtaaaaatacttttagtaggcattcgtggattgtgaacatccaagttatattggtttgtatagaatggcattaagtaaaaattacagctgtataacagtagttttctaaattgagagagtccacattgtaattagagatcactgtgaccaaaatgcttctccttgatttataatgatgtactgtattttgtactgcttatatgaaatttcagcaagattgacgatattataaagatgcttataaagtgtaa

SEQ ID NO: 115519 - DNA, 1011 bp, Artificial Sequence
  derived and/or modified sequence
atggactaccccaccctgctgctggccctgctgcacgtgtacagagccctgtgcgaggaggtgctgtggcacaccagcgtgcccttcgccgagaacatgagcctggagtgcgtgtaccccagcatgggcatcctgacccaggtggagtggttcaagatcggcacccagcaggacagcatcgccatcttcagccccacccacggcatggtgatcagaaagccctacgccgagagagtgtacttcctgaacagcaccatggccagcaacaacatgaccctgttcttcagaaacgccagcgaggacgacgtgggctactacagctgcagcctgtacacctacccccagggcacctggcagaaggtgatccaggtggtgcagagcgacagcttcgaggccgccgtgcccagcaacagccacatcgtgagcgagcccggcaagaacgtgaccctgacctgccagccccagatgacctggcccgtgcaggccgtgagatgggagaagatccagcccagacagatcgacctgctgacctactgcaacctggtgcacggcagaaacttcaccagcaagttccccagacagatcgtgagcaactgcagccacggcagatggagcgtgatcgtgatccccgacgtgaccgtgagcgacagcggcctgtacagatgctacctgcaggccagcgccggcgagaacgagaccttcgtgatgagactgaccgtggccgagggcaagaccgacaaccagtacaccctgttcgtggccggcggcaccgtgctgctgctgctgttcgtgatcagcatcaccaccatcatcgtgatcttcctgaacagaagaagaagaagagagagaagagacctgttcaccgagagctgggacacccagaaggcccccaacaactacagaagccccatcagcaccagccagcccaccaaccagagcatggacgacaccagagaggacatctacgtgaactaccccaccttcagcagaagacccaagaccagagtgtag

SEQ ID NO: 115520 - protein, 214 aa, Artificial Sequence
  derived and/or modified sequence
MGRRPARCYRYCKNKPYPKSRFCRGVPDAKIRIFDLGRKKAKVDEFPLCGHMVSDEYEQLSSEALEAARICANKYMVKSCGKDGFHIRVRLHPFHVIRINKMLSCAGADRLQTGMRGAFGKPQGTVARVHIGQVIMSIRTKLQNKEHVIEALRRAKFKFPGRQKIHISKKWGFTKFNADEFEDMVAEKRLIPDGCGVKYIPNRGPLDKWRALHS

SEQ ID NO: 115521 - protein, 201 aa, Artificial Sequence
  derived and/or modified sequence
MGRRPARCYRYCKNKPYPKSRFCRGVPDAKIRIFDLGRKKAKVDEFPLCGHMVSDEYEQLSSEALEAARICANKYMVKSCGKDGFHIRVRLHPFHVIRINKMLSCAGADRLQTGMRGAFGKPQGTVARVHIGQVIMSIRTKLQNKEHVIEALRRAKFKFPGRQKIHISKKWGFTKFNADEFEDMVAEKRLIPDGCGVKYIP

SEQ ID NO: 115522 - DNA, 645 bp, Artificial Sequence
  derived and/or modified sequence
atggggaggaggccagcccgttgctatcgctattgtaagaataagccctatcccaaatcacgcttttgcagaggcgtacctgacgctaagatcagaattttcgacctcggtagaaagaaggcaaaggttgatgagttccctctctgcggccacatggttagtgacgagtacgagcaactatccagtgaggcccttgaagctgcacgcatatgtgccaataaatacatggtgaagagttgtgggaaagatggatttcatatcagagtgcgtcttcaccctttccatgtgatccggatcaacaagatgctgtcctgtgctggcgcagaccggttgcagaccggcatgcggggcgcattcggcaaaccccaggggacggtggcgagggtccatatcggacaggttattatgagcattcgcacaaagctacaaaataaggaacacgtcattgaagccctccggagagcaaagtttaaatttcctgggcgccagaagatccacataagcaaaaaatggggattcactaagttcaacgctgacgagttcgaagacatggtggccgaaaagaggcttatacctgacggctgtggagtgaagtacatccccaatcggggacccttagacaaatggcgggcactgcacagctag

SEQ ID NO: 115523 - DNA, 645 bp, Artificial Sequence
  derived and/or modified sequence
atgggccgacgcccggcccgttgttacagatattgtaagaataaaccataccccaagtctcggttctgccgcggagtcccggatgcaaagatcaggatcttcgacctcggacgcaagaaggctaaagtagatgagttcccactgtgtgggcacatggtgtccgatgagtatgaacaactgtcctctgaagccctggaagcagcccgcatctgcgccaacaagtatatggtgaagagttgcgggaaagacggcttccatatcagggtcagactccacccattccatgtcatacgcattaataaaatgctatcttgcgcgggggccgaccgtctgcaaacaggcatgcggggtgccttcgggaagccacaaggcacagttgcgcgcgtccacatcgggcaggtaatcatgagtatccgaaccaagctccaaaataaagaacacgtgattgaggcactcagacgagcgaagtttaagttccctggcagacagaagatccacattagcaagaagtggggattcaccaaatttaatgctgatgagtttgaggatatggtagctgaaaaaagactcatacctgatggctgcggggtcaagtatattccaaaccgaggacctctggacaaatggcgggcacttcactcgtag

SEQ ID NO: 115524 - DNA, 645 bp, Artificial Sequence
  derived and/or modified sequence
atgggcaggagaccagccagatgttaccgatattgcaaaaacaaaccctacccaaagtcacggttctgcagaggagtccccgacgccaaaatccggatcttcgacttaggacgcaagaaggctaaggtcgatgagttcccactttgcggacatatggtatctgacgaatacgaacagctgagttccgaggccttagaagccgcaagaatctgcgcgaacaagtacatggtgaaatcttgtggcaaagatggattccatatcagagtgcgactccacccctttcacgtcatcaggattaataaaatgctgagttgtgctggagctgatcgcctgcaaacggggatgcggggtgcttttggtaagcctcagggcacagttgccagagttcacatcgggcaggtcattatgagcatccggacaaagctgcaaaacaaagaacacgtgattgaagccctaagacgagctaagttcaagtttccgggccggcagaaaatccatatttccaaaaagtggggattcacaaagtttaacgcagacgagtttgaagacatggtcgccgaaaagcggctgattcctgatgggtgtggagtcaagtatattccaaatcgaggccctctggacaagtggcgggctctccattcttag

SEQ ID NO: 115525 - DNA, 606 bp, Artificial Sequence
  derived and/or modified sequence
atggggaggcggccagcgagatgttaccggtactgcaagaataaaccctacccaaagtccaggttttgtagaggcgtgccagatgcaaagattaggatctttgacctcggtaggaaaaaagccaaagtcgatgaattccccctctgcggacatatggtgagcgatgagtacgaacagctctcttcagaagccctggaggccgcacggatttgcgcaaacaagtatatggtgaagagttgcggcaaggatggattccacattcgggtgaggctccacccttttcacgtcatcaggattaacaagatgctgagctgcgccggagcagacagactccagacaggtatgaggggagcttttggaaagcctcagggcaccgttgctcgcgtccacataggccaggtgatcatgtctatcagaacaaagctgcaaaacaaggagcacgtaatagaggctctcagacgtgccaagttcaagtttccaggtcggcagaaaattcatatcagcaaaaaatggggcttcactaaatttaacgctgacgaatttgaggatatggtggctgaaaaaagactgatcccagatggatgtggcgtaaaatacatcccctag

SEQ ID NO: 115526 - DNA, 645 bp, Artificial Sequence
  derived and/or modified sequence
atgggcagaagacctgcccgctgctaccgctactgcaagaacaagccctaccccaagagccgcttctgccggggcgtgcctgatgccaagatccgcatctttgacctgggcaggaagaaggccaaggtggatgagttccccctgtgtggccacatggtgtctgatgaatatgagcagctgagcagcgaggccctggaggccgcccgcatctgtgccaacaagtacatggtgaagagctgtgggaaggatggcttccacatccgggtgcggctgcaccccttccacgtgatccgcatcaacaagatgctgagctgtgccggggctgaccggctgcagacaggcatgagaggagccttcggcaagccccagggcaccgtggcccgggtgcacatcggccaggtgatcatgagcatccgcaccaagctgcagaacaaggagcacgtgattgaggccctgcggcgggccaagttcaagtttcctggccggcagaagatccacatcagcaagaagtggggcttcaccaagttcaatgctgatgaatttgaggacatggtggccgagaagaggctcatcccagatggctgcggcgtgaagtacatccccaacagaggccccctggacaagtggagggccctgcacagctag

SEQ ID NO: 115527 - DNA, 606 bp, Artificial Sequence
  derived and/or modified sequence
atgggcagaagacctgcccgctgctaccgctactgcaagaacaagccctaccccaagagccgcttctgccggggcgtgcctgatgccaagatccgcatctttgacctgggcaggaagaaggccaaggtggatgagttccccctgtgtggccacatggtgtctgatgaatatgagcagctgagcagcgaggccctggaggccgcccgcatctgtgccaacaagtacatggtgaagagctgtgggaaggatggcttccacatccgggtgcggctgcaccccttccacgtgatccgcatcaacaagatgctgagctgtgccggggctgaccggctgcagacaggcatgagaggagccttcggcaagccccagggcaccgtggcccgggtgcacatcggccaggtgatcatgagcatccgcaccaagctgcagaacaaggagcacgtgattgaggccctgcggcgggccaagttcaagtttcctggccggcagaagatccacatcagcaagaagtggggcttcaccaagttcaatgctgatgaatttgaggacatggtggccgagaagaggctcatcccagatggctgcggcgtgaagtacatcccctag

SEQ ID NO: 115528 - DNA, 645 bp, Artificial Sequence
  derived and/or modified sequence
atgggccggcggcccgcccggtgctaccggtactgcaagaacaagccctatccgaagagcaggttctgtcgtggcgtgcctgacgcgaagatcagaatcttcgatctcggacgtaaaaaagctaaggttgatgaattccctctgtgcggacacatggtaagcgatgaatacgagcaactctcctcagaggctctcgaggccgctaggatttgcgccaacaagtacatggttaagtcatgcggaaaggacggattccatatacgggtgcgcctgcatccttttcatgtgatcaggataaataaaatgctttcttgcgccggggccgaccgcctgcagacagggatgaggggagcttttggaaaacctcaagggacagtggcccgagtccatatcggtcaagtgattatgtccatcaggaccaagcttcagaacaaggagcacgtaatcgaagccctgcgtcgtgccaagttcaagttccctggccgtcaaaaaatccacataagcaagaagtggggttttacaaaatttaatgccgacgagttcgaggatatggtggccgagaaacgcctgattcccgatggctgcggagtgaaatatataccaaataggggccccctggacaaatggcgtgctctgcactcctag

SEQ ID NO: 115529 - DNA, 645 bp, Artificial Sequence
  derived and/or modified sequence
atgggccggcggcccgcccggtgctaccggtactgcaagaacaagccctatcctaaatctaggttctgtagaggagtcccggatgcaaagattcgtatctttgatctgggcagaaagaaggcgaaggtggatgagtttccactctgtggccatatggtaagcgatgaatacgaacagctgagctctgaagctctggaggcagctaggatttgtgccaataagtacatggtcaaaagctgtgggaaagacgggtttcacatccgcgtacggctgcacccgttccacgttatcaggattaataaaatgctttcatgcgctggcgccgatcgcttgcagacaggaatgaggggcgccttcgggaaaccccaaggtaccgtggcgagggttcatatcgggcaggtgatcatgtcaatccggaccaagctacagaacaaggagcacgttattgaagccctgcgacgcgctaagtttaagttccctggacggcagaagatacacatctctaaaaagtggggattcactaagttcaatgccgacgagtttgaagatatggtggcagagaaaaggctcattcccgatggttgtggtgtgaagtatattccaaatcgtggccccctcgataaatggcgcgccctgcacagttag

SEQ ID NO: 115530 - DNA, 645 bp, Artificial Sequence
  derived and/or modified sequence
atgggccggcggcccgcccggtgctaccggtactgcaagaacaagccttaccccaagtctaggttctgccgaggagttccagacgcaaagatccgaatttttgatctgggccgcaagaaggcaaaggtcgacgagttcccattgtgcggccacatggtgtcagacgaatatgaacagctgagcagcgaggcactggaggcagctcgaatttgcgcgaacaagtacatggttaaaagctgtggaaaggacgggtttcacatccgggttagactccatccttttcatgtgattaggattaataaaatgctatcatgcgccggcgcagacagattacagaccggtatgagaggtgcctttggaaagcctcaggggacggtggccagggtacacattggacaggttattatgagtatcagaactaagctgcagaataaggagcatgtgattgaagcgctgaggcgggctaaatttaagttccccggacggcagaaaattcacatcagcaaaaaatggggattcactaagttcaacgccgacgaattcgaagatatggtcgcggagaagcggctgatccctgatggctgcggcgttaaatatatccctaatcgcgggcctctagataaatggcgcgctttgcatagctag

SEQ ID NO: 115531 - DNA, 606 bp, Artificial Sequence
  derived and/or modified sequence
atgggccggcggcccgcccggtgctaccggtactgcaagaacaagccatatcctaagagccgtttctgtaggggggtgcccgacgcgaagatcagaatcttcgaccttgggcggaaaaaggccaaagtagacgagttccctctgtgcggccacatggtgagcgatgagtacgagcaactgtcatccgaggctctcgaggcggctcggatctgcgctaacaagtacatggttaagtcctgcggcaaggacggcttccacataagagtcagactgcacccatttcatgtgatccgaatcaacaaaatgctgtcctgtgcaggagcagaccggttacagactgggatgcggggcgcattcgggaagccacagggaactgtagcacgagttcatatcggacaggttatcatgtccattagaacaaagctccagaataaggagcacgtgatagaagcgctgcgccgggcaaagttcaaattccctggccggcaaaaaatccatataagtaaaaaatggggatttaccaaatttaacgcggatgagtttgaggacatggtcgccgagaagagactgatcccagacggctgcggtgttaagtatattccctag

SEQ ID NO: 115532 - DNA, 645 bp, Artificial Sequence
  derived and/or modified sequence
atgggcaggcggcctgcacggtgctaccggtattgtaagaataagccttaccccaagtcaagattctgccgcggagtgcccgacgcaaagatacgtatatttgatctgggccgaaagaaagctaaagtcgatgagtttcccctgtgcgggcatatggtcagcgatgagtacgagcagctatcaagcgaggctcttgaagctgcacggatctgtgcaaacaaatatatggtgaagtcatgtgggaaagacggctttcatatacgggtacgcctgcaccccttccacgtgatccggattaacaagatgctatcctgtgccggagctgatcggctgcagactggcatgcgcggtgcctttggtaagcctcagggcaccgttgctagggtgcatatcggacaggtcattatgtcaatccggacaaaactgcagaataaggagcatgtgatcgaggctctgaggcgtgcaaagttcaagtttcctggacgacagaagattcatatctccaagaaatggggtttcaccaagtttaatgccgatgaatttgaggacatggtggctgagaagaggctgattccagacggatgtggtgtgaaatacattcccaaccgaggacctctcgataagtggcgcgctttacactcctag

SEQ ID NO: 115533 - DNA, 645 bp, Artificial Sequence
  derived and/or modified sequence
atggggagaaggcccgctcggtgctaccgttattgcaaaaataagccctaccctaaaagtcgtttctgccggggtgtaccagatgcgaagatccgtatttttgacctggggagaaagaaggccaaggtcgacgagtttccgctctgtggtcacatggtctccgatgaatacgagcagctgagctctgaggctctggaggccgctcgcatctgcgccaataaatacatggttaagtcttgcggcaaagatggcttccacatccgggtgagattacatccctttcacgtcatacgaatcaataagatgctctcttgcgctggcgctgatagattgcagactggtatgcgcggagctttcgggaagccacagggaactgttgccagggtacacattgggcaggtcattatgtccatacggaccaagctccagaataaggaacacgtgatagaggccttgagaagagcaaagttcaagtttccgggtagacaaaagatacacatatcaaagaaatgggggtttacaaaattcaatgccgacgaattcgaagatatggtggctgagaagcggctgatccccgatgggtgtggcgtgaaatacattccaaatcgtggccctttggacaagtggcgtgcgctgcattcatag

SEQ ID NO: 115534 - DNA, 645 bp, Artificial Sequence
  derived and/or modified sequence
atgggacgcagacccgcaagatgctacaggtattgcaagaataaaccctaccctaagagcaggttctgtaggggggtacctgacgctaaaattcggattttcgatctgggtaggaagaaagccaaggtcgacgagtttcctctgtgcggccacatggtctctgacgaatacgagcagcttagttccgaggcgcttgaggctgcacggatttgcgctaataaatatatggtaaagagctgcgggaaagacggatttcatataagagtgcgccttcacccatttcatgtaattcgaatcaataaaatgctcagctgtgcaggggctgaccggctgcaaacgggcatgcggggagccttcggcaagccgcagggtacagtcgccagggtgcacattggccaggttatcatgtctatacggactaagctccagaataaggagcatgtcatcgaggcactaaggcgagcaaaattcaagttcccaggccgtcagaagatccatatcagtaaaaagtgggggttcacgaagttcaatgctgatgaattcgaggacatggtagctgagaaacgcctgattcccgatggatgcggggtaaaatacatccccaacaggggacccttggataagtggcgcgctctacattcttag

SEQ ID NO: 115535 - DNA, 606 bp, Artificial Sequence
  derived and/or modified sequence
atgggacgacggcctgcgcgttgctatcgttactgtaagaataaaccataccctaaatccagattctgcaggggtgttccagatgccaagatccggattttcgatcttggacgaaaaaaagctaaagttgacgagtttcctctgtgcgggcacatggtgtctgacgagtacgaacaattgagctctgaggcgctggaggctgcccgtatttgcgctaacaagtacatggttaagtcctgcggtaaggacggctttcacatcagagtgagattacacccctttcacgtgatccgtatcaataagatgcttagctgcgccggtgccgataggcttcaaacagggatgagaggggctttcggtaagccacaggggacagtcgcacgcgtccacatcggtcaggtaattatgtcaattaggaccaagctgcagaataaggaacacgtgatcgaagctctccggagggctaagtttaagttccccggaagacagaaaattcacatatccaagaagtggggattcactaaatttaacgccgacgaattcgaggacatggtggcggagaagagattaatccccgatgggtgcggtgttaaatacatcccctag

SEQ ID NO: 115536 - DNA, 2278 bp, Artificial Sequence
  derived and/or modified sequence
agcgcctctttcccttcggtgtggtgagtaagcgcagttgtcgtctcttgcggtgccgttgctggttctcacaccttttaggtctgttctcgtcttccgttccgactctctctttttcgttgcagccactgaagatcctggtgtcgccatgggccgccgccccgcccgttgttaccggtattgtaagaacaagccgtacccaaagtctcgcttctgccgaggtgtccctgatgccaagattcgcatttttgacctggggcggaaaaaggcaaaagtggatgagtttccgctttgtggccacatggtgtcagatgaatatgagcagctgtcctctgaagccctggaggctgcccgaatttgtgccaataagtacatggtaaaaagttgtggcaaagatggcttccatatccgggtgcggctccaccccttccacgtcatccgcatcaacaagatgttgtcctgtgctggggctgacaggctccaaacaggcatgcgaggtgcctttggaaagccccagggcactgtggccagggttcacattggccaagttatcatgtccatccgcaccaagctgcagaacaaggagcatgtgattgaggccctgcgcagggccaagttcaagtttcctggccgccagaagatccacatctcaaagaagtggggcttcaccaagttcaatgctgatgaatttgaagacatggtggctgaaaagcggctcatcccagatggctgtggggtcaagtacatccccaatcgtggccctctggacaagtggcgggccctgcactcatgagggcttccaatgtgctgcccccctcttaatactcaccaataaattctacttcctgtccacctatgtctttgtatctacattcttgacggggaaggaacttcctctgggaacctttgggtcattgccctttcacttcagaaacaggttgacaactcagccctgctcatgaggcagcaaaccctgcaaagggctgggactggtggccttatgtcagttgtctactctggagcttgacttggacctccccaggtcctaggcagtaggttgaaaaacactgaagtgcttttcatgaagcacagctgcagcaaagccttgcaatcccaggctggggtcagcctacagttgtgttgcttattacaacacatgcggaccaagaggggcttgtgggctagaggctgaccagcagcgtttatttagcaagggtaggtgtgcatcacattgggcttgttctcacccatctggtttggccattcctccttggtgggaatcatccaggtactgctgaggtcacctgcgatttgccccatttcctatctctagcaacctcctgggccccatgcccccaccccttctagaacctgcattcccagggccttcaccacctgaccaaaggtctaggctaacctttggtcatttgtaacaagacctcggaacagacacgtgtgtggcatggtttggcctggggatcttagatgtctgacctgaactattgtagaacagcgctggcttttgggggagcagcaaaaatgagaggagtgctaggtgggtggcctgagcatctgtatccagggacaggactccaaaggcttttggtcccagagctggggtatgttggccccagcccccagcctgtggctcccaaaaggcctctggttttttgtaatctcagtttacagccatttcttaggtttttaattacctttattttattttgccaaacatacctgggaataccttttattttttttttaccttggggtgatggttccaaaccataaatgtgattatagttaacacatgacccttctagcgtcccagccagtgtttttcctgacctctgttctttggagaggaggatggaagggaggggtccggcacgctgctggcattttgctgtgtcctgcagcccctttccgggacacctgggttcacacagctttttagcttacataactggtgcagattttctgtgtggagatgttgccttgaccagccttggctggactttaccaggcatgcagaagcctgtaccaacacagactacagcacccaggaggtgcgagtgtggctgctcagcggttataacaggcctgactgcattgttcaccggattataatgagccaaaatgtttcccggtgtttgctggtttcagggaaggagtttgatatagcagattaaccaccctccttgtagctattggggcttaatggtttcctggtgattcttaccaatccacaataaacatggcccattggcatatctgc

SEQ ID NO: 115537 - DNA, 1284 bp, Artificial Sequence
  derived and/or modified sequence
gcaattcctgacttgtactgccccagtggtgttacagcctcgaacccagtttccagacctaagtcaccgccggcatccagagtcccatgatggaaagggaggctaggttcccctgggaaggaccttgcaccactgctgcaagtgcaccccagaaatcgtcccaagcttttctcaaagggacctgcagccatttataaaagcgacatatcatcctggaaaacagaaatatacgtctgtcacagttaacggcaaagcctagggcaagagttctacgcccaagatggccagccggaagcgggcttctcgcgaccatgtggcgaagccccattcgtcagctggccgcccgcggccctggtacccggtcacctctctgatctgcgcatgtgctgggctacgcccgggcgcaagcgccaagagcggctgcgtctatggtcatgacgtctgacagagcgtccacccgtcttcgacaggactctatggttcttacgcgcgcagacagaccgcctatataagccatgcgcaggcggaggagcgcctctttcccttcggtgtgccactgaagatcctggtgtcgccatgggccgccgccccgcccgttgttaccggtattgtaagaacaagccgtacccaaagtctcgcttctgccgaggtgtccctgatgccaagattcgcatttttgacctggggcggaaaaaggcaaaagtggatgagtttccgctttgtggccacatggtgtcagatgaatatgagcagctgtcctctgaagccctggaggctgcccgaatttgtgccaataagtacatggtaaaaagttgtggcaaagatggcttccatatccgggtgcggctccaccccttccacgtcatccgcatcaacaagatgttgtcctgtgctggggctgacaggctccaaacaggcatgcgaggtgcctttggaaagccccagggcactgtggccagggttcacattggccaagttatcatgtccatccgcaccaagctgcagaacaaggagcatgtgattgaggccctgcgcagggccaagttcaagtttcctggccgccagaagatccacatctcaaagaagtggggcttcaccaagttcaatgctgatgaatttgaagacatggtggctgaaaagcggctcatcccagatggctgtggggtcaagtacatccccaatcgtggccctctggacaagtggcgggccctgcactcatgagggcttccaatgtgctgcccccctcttaatactcaccaataaattctacttcctgtccaccta

SEQ ID NO: 115538 - DNA, 2318 bp, Artificial Sequence
  derived and/or modified sequence
gggctacgcccgggcgcaagcgccaagagcggctgcgtctatggtcatgacgtctgacagagcgtccacccgtcttcgacaggactctatggttcttacgcgcgcagacagaccgcctatataagccatgcgcaggcggaggagcgcctctttcccttcggtgtgccactgaagatcctggtgtcgccatgggccgccgccccgcccgttgttaccggtattgtaagaacaagccgtacccaaagtctcgcttctgccgaggtgtccctgatgccaagattcgcatttttgacctggggcggaaaaaggcaaaagtggatgagtttccgctttgtggccacatggtgtcagatgaatatgagcagctgtcctctgaagccctggaggctgcccgaatttgtgccaataagtacatggtaaaaagttgtggcaaagatggcttccatatccgggtgcggctccaccccttccacgtcatccgcatcaacaagatgttgtcctgtgctggggctgacaggctccaaacaggcatgcgaggtgcctttggaaagccccagggcactgtggccagggttcacattggccaagttatcatgtccatccgcaccaagctgcagaacaaggagcatgtgattgaggccctgcgcagggccaagttcaagtttcctggccgccagaagatccacatctcaaagaagtggggcttcaccaagttcaatgctgatgaatttgaagacatggtggctgaaaagcggctcatcccagatggctgtggggtcaagtacatccccaatcgtggccctctggacaagtggcgggccctgcactcatgagggcttccaatgtgctgcccccctcttaatactcaccaataaattctacttcctgtccacctatgtctttgtatctacattcttgacggggaaggaacttcctctgggaacctttgggtcattgccctttcacttcagaaacaggttgacaactcagccctgctcatgaggcagcaaaccctgcaaagggctgggactggtggccttatgtcagttgtctactctggagcttgacttggacctccccaggtcctaggcagtaggttgaaaaacactgaagtgcttttcatgaagcacagctgcagcaaagccttgcaatcccaggctggggtcagcctacagttgtgttgcttattacaacacatgcggaccaagaggggcttgtgggctagaggctgaccagcagcgtttatttagcaagggtaggtgtgcatcacattgggcttgttctcacccatctggtttggccattcctccttggtgggaatcatccaggtactgctgaggtcacctgcgatttgccccatttcctatctctagcaacctcctgggccccatgcccccaccccttctagaacctgcattcccagggccttcaccacctgaccaaaggtctaggctaacctttggtcatttgtaacaagacctcggaacagacacgtgtgtggcatggtttggcctggggatcttagatgtctgacctgaactattgtagaacagcgctggcttttgggggagcagcaaaaatgagaggagtgctaggtgggtggcctgagcatctgtatccagggacaggactccaaaggcttttggtcccagagctggggtatgttggccccagcccccagcctgtggctcccaaaaggcctctggttttttgtaatctcagtttacagccatttcttaggtttttaattacctttattttattttgccaaacatacctgggaataccttttattttttttttaccttggggtgatggttccaaaccataaatgtgattatagttaacacatgacccttctagcgtcccagccagtgtttttcctgacctctgttctttggagaggaggatggaagggaggggtccggcacgctgctggcattttgctgtgtcctgcagcccctttccgggacacctgggttcacacagctttttagcttacataactggtgcagattttctgtgtggagatgttgccttgaccagccttggctggactttaccaggcatgcagaagcctgtaccaacacagactacagcacccaggaggtgcgagtgtggctgctcagcggttataacaggcctgactgcattgttcaccggattataatgagccaaaatgtttcccggtgtttgctggtttcagggaaggagtttgatatagcagattaaccaccctccttgtagctattggggcttaatggtttcctggtgattcttaccaatccacaataaacatggcccattggcatatctgc

SEQ ID NO: 115539 - DNA, 657 bp, Artificial Sequence
  derived and/or modified sequence
ggaggagcgcctctttcccttcggtgtggtgaccactgaagatcctggtgtcgccatgggccgccgccccgcccgttgttaccggtattgtaagaacaagccgtacccaaagtctcgcttctgccgaggtgtccctgatgccaagattcgcatttttgacctggggcggaaaaaggcaaaagtggatgagtttccgctttgtggccacatggtgtcagatgaatatgagcagctgtcctctgaagccctggaggctgcccgaatttgtgccaataagtacatggtaaaaagttgtggcaaagatggcttccatatccgggtgcggctccaccccttccacgtcatccgcatcaacaagatgttgtcctgtgctggggctgacaggctccaaacaggcatgcgaggtgcctttggaaagccccagggcactgtggccagggttcacattggccaagttatcatgtccatccgcaccaagctgcagaacaaggagcatgtgattgaggccctgcgcagggccaagttcaagtttcctggccgccagaagatccacatctcaaagaagtggggcttcaccaagttcaatgctgatgaatttgaagacatggtggctgaaaagcggctcatcccagatggctgtggggtcaagtacatccc

SEQ ID NO: 115540 - DNA, 645 bp, Artificial Sequence
  derived and/or modified sequence
atgggcagaagacccgccagatgctacagatactgcaagaacaagccctaccccaagagcagattctgcagaggcgtgcccgacgccaagatcagaatcttcgacctgggcagaaagaaggccaaggtggacgagttccccctgtgcggccacatggtgagcgacgagtacgagcagctgagcagcgaggccctggaggccgccagaatctgcgccaacaagtacatggtgaagagctgcggcaaggacggcttccacatcagagtgagactgcaccccttccacgtgatcagaatcaacaagatgctgagctgcgccggcgccgacagactgcagaccggcatgagaggcgccttcggcaagccccagggcaccgtggccagagtgcacatcggccaggtgatcatgagcatcagaaccaagctgcagaacaaggagcacgtgatcgaggccctgagaagagccaagttcaagttccccggcagacagaagatccacatcagcaagaagtggggcttcaccaagttcaacgccgacgagttcgaggacatggtggccgagaagagactgatccccgacggctgcggcgtgaagtacatccccaacagaggccccctggacaagtggagagccctgcacagctag

SEQ ID NO: 115541 - DNA, 606 bp, Artificial Sequence
  derived and/or modified sequence
atgggcagaagacccgccagatgctacagatactgcaagaacaagccctaccccaagagcagattctgcagaggcgtgcccgacgccaagatcagaatcttcgacctgggcagaaagaaggccaaggtggacgagttccccctgtgcggccacatggtgagcgacgagtacgagcagctgagcagcgaggccctggaggccgccagaatctgcgccaacaagtacatggtgaagagctgcggcaaggacggcttccacatcagagtgagactgcaccccttccacgtgatcagaatcaacaagatgctgagctgcgccggcgccgacagactgcagaccggcatgagaggcgccttcggcaagccccagggcaccgtggccagagtgcacatcggccaggtgatcatgagcatcagaaccaagctgcagaacaaggagcacgtgatcgaggccctgagaagagccaagttcaagttccccggcagacagaagatccacatcagcaagaagtggggcttcaccaagttcaacgccgacgagttcgaggacatggtggccgagaagagactgatccccgacggctgcggcgtgaagtacatcccctag

SEQ ID NO: 115542 - DNA, 327 bp, Artificial Sequence
  derived and/or modified sequence
cctaagagtcgcttctgtcgcggggtgcctgacgcaaagatacggatctttgacctggggagaaagaaggcgaaagtggacgagttcccactgtgtggacacatggtttccgatgaatacgagcaattgagcagcgaagctctggaggctgcccggatctgcgcaaataagtacatggtaaagtcctgtggtaaggatggctttcatatcagggtacgcctgcacccttttcatgtgattcgcattaacaaaatgctctcatgtgccggagccgaccgacccacccttctgtgtcaatgctgggaaaccagccgcaacacgtcgtag

SEQ ID NO: 115543 - DNA, 327 bp, Artificial Sequence
  derived and/or modified sequence
cccaagagccgcttctgccggggcgtgcctgatgccaagatccgcatctttgacctgggcaggaagaaggccaaggtggatgagttccccctgtgtggccacatggtgtctgatgaatatgagcagctgagcagcgaggccctggaggccgcccgcatctgtgccaacaagtacatggtgaagagctgtgggaaggatggcttccacatccgggtgcggctgcaccccttccacgtgatccgcatcaacaagatgctgagctgtgccggggctgaccggcccaccctgctgtgccagtgctgggagaccagcaggaacaccagctag

SEQ ID NO: 115544 - DNA, 327 bp, Artificial Sequence
  derived and/or modified sequence
cccaagagccggttctgccggggcgtgcccgacgccaagatccggatttttgatcttggaaggaaaaaagccaaggtcgacgaatttcctctttgtggacatatggtgtcagacgaatacgagcaattatcgagcgaagcactggaggcagcaaggatctgcgcgaataagtatatggttaaaagctgtggaaaagatggatttcatatccgggtaagactgcatcctttccacgttatccgaataaacaagatgttgtcctgtgccggcgcggatcgacccaccctgctctgtcagtgctgggagacatcccgcaatacttcttag

SEQ ID NO: 115545 - DNA, 327 bp, Artificial Sequence
  derived and/or modified sequence
cctaagtctcggttctgcagaggagtccccgatgcaaagatccgaattttcgacttaggacggaagaaagctaaagtggatgaatttccgctgtgtggccacatggtcagcgatgaatatgagcaactgagcagcgaagcccttgaggccgctcgcatttgtgcaaataaatatatggttaaatcgtgcggaaaagatggcttccacatccgagtgaggctgcatccatttcatgtcatccgaataaacaagatgttatcttgcgcaggggcagaccgccctacacttttatgccaatgttgggaaacctccaggaacacttcatag

SEQ ID NO: 115546 - DNA, 713 bp, Artificial Sequence
  derived and/or modified sequence
ccaaagtctcgcttctgccgaggtgtccctgatgccaagattcgcatttttgacctggggcggaaaaaggcaaaagtggatgagtttccgctttgtggccacatggtgtcagatgaatatgagcagctgtcctctgaagccctggaggctgcccgaatttgtgccaataagtacatggtaaaaagttgtggcaaagatggcttccatatccgggtgcggctccaccccttccacgtcatccgcatcaacaagatgttgtcctgtgctggggctgacaggcctaccttgctctgccagtgctgggagacctccagaaacacatcgtagagggcgttcagctccttctctacggccttaggagtggtgtgcagcgggaccaacaccaggctgggaaggactgcaaggcccagggaccgagggctgccatccactcctggaccttctccccctagcccgtctgggtgaggaagcccccagtggagccagccagaactccccttctgctcccacataccaagcccacccttcccttcctaccattgctgggcaaagagaactgggccacaaatggctcccgggcaaagacgtcatcctcatcgttgtacacgtaggaactcaggacctgtgttttgtgtgacctgggaggacaaagggatgggcagcagtggccccacgtctttgattttggcttgcaagtgccaaacggcgctcag

SEQ ID NO: 115547 - DNA, 327 bp, Artificial Sequence
  derived and/or modified sequence
cccaagagcagattctgcagaggcgtgcccgacgccaagatcagaatcttcgacctgggcagaaagaaggccaaggtggacgagttccccctgtgcggccacatggtgagcgacgagtacgagcagctgagcagcgaggccctggaggccgccagaatctgcgccaacaagtacatggtgaagagctgcggcaaggacggcttccacatcagagtgagactgcaccccttccacgtgatcagaatcaacaagatgctgagctgcgccggcgccgacagacccaccctgctgtgccagtgctgggagaccagcagaaacaccagctag

SEQ ID NO: 115548 - protein, 166 aa, Artificial Sequence
  derived and/or modified sequence
MLRGVLGKTFRLVGYTIQYGCIAHCAFEYVGGVVMCSGPSMEPTIQNSDIVFAENLSRHFYGIQRGDIVIAKSPSDPKSNICKRVIGLEGDKILTTSPSDFFKSHSYVPMGHVWLEGDNLQNSTDSRCYGPIPYGLIRGRIFFKIWPLSDFGFLRASPNGHRFSDD

SEQ ID NO: 115549 - protein, 107 aa, Artificial Sequence
  derived and/or modified sequence
MLRGVLGKTFRLVGYTIQYGCIAHCAFEYVGGVVMCSGPSMEPTIQNSDIVFAENLSRHFYGIQRGDIVIAKSPSDPKSNICKRVIGLEGDKILTTSPSDFFKSHSY

SEQ ID NO: 115550 - protein, 96 aa, Artificial Sequence
  derived and/or modified sequence
MLRGVLGKTFRLVGYTIQYGCIAHCAFEYVGGVVMCSGPSMEPTIQNSDIVFAENLSRHFYGIQRGDIVIAKSPSDPKSNICKRVIGLEGDKILTT

SEQ ID NO: 115551 - DNA, 501 bp, Artificial Sequence
  derived and/or modified sequence
atgctgcgaggtgttctgggaaagacctttcgcctggttgggtacactattcagtatgggtgtatcgcccattgtgcattcgagtatgtgggaggcgtcgttatgtgcagtgggccttccatggagcctacaattcaaaattcagacatcgttttcgccgagaatctgagtagacacttttacggcattcagcgcggcgacattgttatcgccaagagcccatcggaccctaagagcaatatttgtaagagggtaatcggcctggaaggtgataagatactgactacaagccccagcgacttctttaaaagtcacagctatgtccccatgggccacgtatggttggaaggcgacaatctgcagaatagcactgactcacgttgctatggacccatcccctacggtcttattcgaggtcgcattttttttaagatatggccactgtcagactttgggtttctacgggctagccccaacgggcatagattctccgatgattag

SEQ ID NO: 115552 - DNA, 324 bp, Artificial Sequence
  derived and/or modified sequence
atgctgaggggggtgctgggcaagaccttccggctggtaggctacacaatacagtatgggtgcatcgcgcattgtgcgtttgagtacgtggggggcgtcgttatgtgttctggcccatctatggagcccacaattcagaattccgacattgtgtttgcggagaatttgtcgaggcacttttatggtattcagcggggtgacatagtgattgctaagagcccttccgacccaaagagtaacatttgtaagcgagtgatcggcctggaaggagacaaaattctgaccacgtcaccctctgatttctttaagtcacactcctactag

SEQ ID NO: 115553 - DNA, 291 bp, Artificial Sequence
  derived and/or modified sequence
atgctgaggggtgttctgggaaaaacctttaggctggttgggtatacaattcaatatggctgcattgcacattgtgcatttgaatacgttgggggagtcgtaatgtgctctggccccagcatggaacctacaatccaaaacagcgatatcgtcttcgcagaaaacctgtctaggcatttctatggtatacaacggggagatatcgtcatcgcaaaatccccctcagatccaaagtcaaacatctgcaagagggtgatcgggttggaaggagacaagatcctgaccacatag

SEQ ID NO: 115554 - DNA, 501 bp, Artificial Sequence
  derived and/or modified sequence
atgctgcgtggggttctcggaaagaccttcagactggtcggatacactatccaatacggatgtatcgcacactgtgcttttgagtatgttggaggcgtcgtcatgtgctctgggccttccatggagccgaccatccagaatagtgatatcgtgtttgctgaaaatctgtctcgccacttctacgggatccagaggggagatattgtgatcgccaagtcccctagtgacccaaaaagcaatatttgcaagcgagtgatcggcctggagggtgataaaatactgaccacctcgcctagtgacttttttaagtcacactcttacgttcccatgggccacgtttggctcgagggggataacctgcagaatagcacagactcccgttgttacgggcccatcccctacggactcatcaggggaaggatctttttcaagatctggcctctgtctgatttcggctttctccgcgcctcacccaatggacaccggttttccgatgactag

SEQ ID NO: 115555 - DNA, 795 bp, Artificial Sequence
  derived and/or modified sequence
gaaaagtgcgccctacgaaaggacggtcgacttcggcggggcccaggtgagaaaggcccacctgtgtcctggttgagggtctccagggttctttggggcccgaggaatttcagacctgaacaatcaggtggacaacttcttgtgactttgggtattctgaaattactgccaatggtggcagagtctacatagaactatgcttcgtggtgttctggggaaaacctttcgacttgttggctatactattcaatatggctgtatagctcattgtgcttttgaatacgttggtggtgttgtcatgtgttctggaccatcaatggagcctacaattcaaaattcagatattgtctttgcagaaaatcttagtcgacatttttatggtatccaaagaggtgacattgtgattgcaaaaagcccaagtgatccaaaatcaaatatttgtaaaagagtaattggtttggaaggagacaaaatcctcaccactagtccatcagatttctttaaaagccatagttatgtgccaatgggtcatgtttggttagaaggtgacaatctacagaattctacagattccaggtgctatggacctattccatatggactaataagaggacgaatcttctttaagatttggcctctgagtgattttggatttttacgtgccagccctaatggccacagattttctgatgattagtaagcatttattcttttgacttgattattgtctccttttcatgtgaatttattactcccgttgaaaccgtgtacttaccaataaactatttgctattc

SEQ ID NO: 115556 - DNA, 475 bp, Artificial Sequence
  derived and/or modified sequence
aggacggtcgacttcggcggggcccaggtgagaaaggcccacctgtgtcctggttgagggtctccagggttctttggggcccgagcatcttgactctactgtgcctggatgtagctgtgtgttttgccaatggtggcagagtctacatagaactatgcttcgtggtgttctggggaaaacctttcgacttgttggctatactattcaatatggctgtatagctcattgtgcttttgaatacgttggtggtgttgtcatgtgttctggaccatcaatggagcctacaattcaaaattcagatattgtctttgcagaaaatcttagtcgacatttttatggtatccaaagaggtgacattgtgattgcaaaaagcccaagtgatccaaaatcaaatatttgtaaaagagtaattggtttggaaggagacaaaatcctcaccactagtccatcagatttctttaaaagccatagttat

SEQ ID NO: 115557 - DNA, 552 bp, Artificial Sequence
  derived and/or modified sequence
gcgtattgctgaaaagtgcgccctacgaaaggacggtcgacttcggcggggcccaggtgagaaaggcccacctgtgtcctggttgagggtctccagggttctttggggcccgaggaatttcagacctgaacaatcaggtggacaacttcttgtgactttgggtattctgaaattactcatcttgactctactgtgcctggatgtagctgtgtgttttgtgtgtatcctgttcatggccaatggtggcagagtctacatagaactatgcttcgtggtgttctggggaaaacctttcgacttgttggctatactattcaatatggctgtatagctcattgtgcttttgaatacgttggtggtgttgtcatgtgttctggaccatcaatggagcctacaattcaaaattcagatattgtctttgcagaaaatcttagtcgacatttttatggtatccaaagaggtgacattgtgattgcaaaaagcccaagtgatccaaaatcaaatatttgtaaaagagtaattggtttggaaggagacaaaatcctcaccact

SEQ ID NO: 115558 - DNA, 685 bp, Artificial Sequence
  derived and/or modified sequence
gagaaaggcccacctgtgtcctggttgagggtctccagggttctttggggcccgaggccaatggtggcagagtctacatagaactatgcttcgtggtgttctggggaaaacctttcgacttgttggctatactattcaatatggctgtatagctcattgtgcttttgaatacgttggtggtgttgtcatgtgttctggaccatcaatggagcctacaattcaaaattcagatattgtctttgcagaaaatcttagtcgacatttttatggtatccaaagaggtgacattgtgattgcaaaaagcccaagtgatccaaaatcaaatatttgtaaaagagtaattggtttggaaggagacaaaatcctcaccactagtccatcagatttctttaaaagccatagttatgtgccaatgggtcatgtttggttagaaggtgacaatctacagaattctacagattccaggtgctatggacctattccatatggactaataagaggacgaatcttctttaagatttggcctctgagtgattttggatttttacgtgccagccctaatggccacagattttctgatgattagtaagcatttattcttttgacttgattattgtctccttttcatgtgaatttattactcccgttgaaaccgtgtacttaccaataaactatttgctattca

SEQ ID NO: 115559 - DNA, 501 bp, Artificial Sequence
  derived and/or modified sequence
atgctgcggggcgtgctgggcaagaccttccggctggtgggctacaccatccagtatggctgcatcgcccactgtgcctttgaatatgtgggcggcgtggtgatgtgcagcggccccagcatggagcccaccatccagaacagcgacatcgtgtttgctgagaacctgagccgccacttctacggcatccagagaggagacatcgtcatcgccaagagccccagcgaccccaagagcaacatctgcaagagggtcatcggcctggagggggacaagatcctgaccaccagccccagcgacttcttcaagagccacagctatgtgcccatgggccacgtgtggctggagggggacaacctgcagaacagcacagacagccgctgctacggccccatcccctacggcctcatccggggccgcatcttcttcaagatctggcccctgagtgactttggcttcctgcgggccagccccaacggccaccgcttcagtgatgactag

SEQ ID NO: 115560 - DNA, 324 bp, Artificial Sequence
  derived and/or modified sequence
atgctgcggggcgtgctgggcaagaccttccggctggtgggctacaccatccagtatggctgcatcgcccactgtgcctttgaatatgtgggcggcgtggtgatgtgcagcggccccagcatggagcccaccatccagaacagcgacatcgtgtttgctgagaacctgagccgccacttctacggcatccagagaggagacatcgtcatcgccaagagccccagcgaccccaagagcaacatctgcaagagggtcatcggcctggagggggacaagatcctgaccaccagccccagcgacttcttcaagagccacagctactag

SEQ ID NO: 115561 - DNA, 291 bp, Artificial Sequence
  derived and/or modified sequence
atgctgcggggcgtgctgggcaagaccttccggctggtgggctacaccatccagtatggctgcatcgcccactgtgcctttgaatatgtgggcggcgtggtgatgtgcagcggccccagcatggagcccaccatccagaacagcgacatcgtgtttgctgagaacctgagccgccacttctacggcatccagagaggagacatcgtcatcgccaagagccccagcgaccccaagagcaacatctgcaagagggtcatcggcctggagggggacaagatcctgaccacctag

SEQ ID NO: 115562 - DNA, 501 bp, Artificial Sequence
  derived and/or modified sequence
atgctgcggggcgtgctgggcaagaccttccggctggtgggctacacaatccagtatgggtgcatagctcactgtgctttcgagtacgttggcggggtcgtgatgtgcagtggtcctagtatggagccaactatacagaattcggatatcgtatttgctgagaacttatctagacacttttatgggattcaaagaggcgacatcgttattgccaaaagccctagtgatccaaaaagtaacatttgtaagagggtcataggactggagggagacaagattttgacaacctctccttccgacttttttaagtctcacagctacgtgcctatggggcacgtgtggctggagggcgataacctgcagaatagcaccgactcccgatgttacggtccgattccgtacggtctgatcagagggcggattttttttaagatatggccactgagcgactttgggtttctgcgggcctctcctaacggacacagattttccgatgactag

SEQ ID NO: 115563 - DNA, 324 bp, Artificial Sequence
  derived and/or modified sequence
atgctgcggggcgtgctgggcaagaccttccggctggtgggctacactatccagtacggctgcattgcccattgtgcttttgaatatgtgggcggggtagtgatgtgcagtggccctagtatggagcctaccatacagaatagcgatatagtgtttgccgaaaatctgagccgccatttctacgggattcagaggggcgatattgtgatcgccaaatccccttccgaccctaaatccaatatatgtaaaagagtgataggtctcgaaggagacaaaattcttactacgtctccttcggatttctttaaaagccatagttattag

SEQ ID NO: 115564 - DNA, 291 bp, Artificial Sequence
  derived and/or modified sequence
atgctgcggggcgtgctgggcaagaccttccggctggtgggctacaccatccaatacggctgcattgcgcattgcgccttcgagtatgttggcggggtcgttatgtgcagcggaccgagtatggaacccacgatccagaactccgatatcgtgttcgcagagaatctcagccgacatttctacgggatccaacgcggggacattgtcattgctaagagcccgtccgatccaaagtcgaatatctgcaagcgcgttatcggtctggagggcgataagatactaacgacgtag

SEQ ID NO: 115565 - DNA, 501 bp, Artificial Sequence
  derived and/or modified sequence
atgctgcggggcgtgctgggcaagaccttccggctggtgggctacacaattcagtacggatgcatcgcccattgcgccttcgagtacgtaggaggagtggttatgtgttcgggaccctctatggaacctacgatccagaacagtgacatcgtattcgccgaaaatctgagtcgacatttttacggcatacagaggggcgatatagtcattgcgaaaagtccatccgaccctaaaagtaatatctgcaaacgcgtgattggtctggaaggcgataaaattctcaccacttcgccatcggactttttcaagagccacagttacgtccctatggggcacgtttggctggaaggagacaatctccaaaacagcacagactccaggtgctacggcccaatcccatacggcctgatccggggcagaatattcttcaagatctggcctcttagcgatttcgggttcttacgggcctcaccaaacggtcataggttttctgacgactag

SEQ ID NO: 115566 - DNA, 501 bp, Artificial Sequence
  derived and/or modified sequence
atgcttagaggggtcttaggtaaaacgtttagactcgtcggctataccatacaatacggctgtatcgcacactgcgcattcgagtatgtgggtggagttgtgatgtgctccggaccttctatggagccaactattcagaacagcgatatcgtgttcgcggaaaatctgtctagacacttttacgggatacagcggggagatatcgtaatcgccaagtcgccctcagaccctaagagcaacatctgtaagagggtgattggactggagggagacaaaatactgactacctctccaagtgacttcttcaagagtcattcttacgtgcctatgggtcatgtttggctggagggtgataatctgcagaatagcactgactcgagatgttacggcccaatcccttacggtttaattagaggtcgaatcttttttaaaatttggcccctgagcgattttggttttctaagagcaagccccaatggacaccgcttctctgatgattag

SEQ ID NO: 115567 - DNA, 324 bp, Artificial Sequence
  derived and/or modified sequence
atgctccgaggcgtactcgggaaaacttttcggctggtggggtatacaattcagtatggctgtatcgctcactgcgcatttgagtatgtgggcggtgtggttatgtgttctggtccctctatggaacccacaattcagaatagcgacatcgtctttgccgagaatttatcaaggcacttttacgggattcagaggggcgacatcgtgatcgctaaatcaccctcagaccccaaatccaatatctgcaaacgggttatcggactagagggtgataagatcctcacaacctctccctcagattttttcaagtcccactcctattag

SEQ ID NO: 115568 - DNA, 291 bp, Artificial Sequence
  derived and/or modified sequence
atgctgcggggtgtcttggggaagacatttcgactggtcggctacactattcaatatgggtgtattgcccactgtgccttcgagtatgtcgggggagtcgtgatgtgtagcggcccatctatggagccaaccatccagaatagtgacatagtgttcgccgaaaatctttctcggcacttttacggtattcagcgcggtgacattgtcatcgcaaagtctccgtctgacccaaagagcaatatttgcaaacgagtgatcggcctggagggcgacaaaattttaacaacctag

SEQ ID NO: 115569 - DNA, 501 bp, Artificial Sequence
  derived and/or modified sequence
atgttaaggggtgtgttgggtaaaacatttaggctcgtcggctataccatacagtatggctgcatcgctcactgtgcatttgagtacgtaggcggagtagtcatgtgcagcgggccatcaatggaaccgaccatccagaactctgatattgtcttcgcagaaaacctgtctaggcatttctacggaattcagagaggggatattgtgatagccaaatcccccagtgatcctaagtcaaacatctgtaagagggtgattggtctcgagggcgataaaatcctgaccacgagcccctctgatttcttcaagtcgcatagttacgtccccatgggacacgtgtggctcgagggcgacaatctgcagaatagtactgattctcggtgctatggccctattccttacggcctgatcagggggagaatcttcttcaagatatggcctctttctgatttcggatttctccgagctagccctaacggccacaggttcagtgatgattag

SEQ ID NO: 115570 - DNA, 501 bp, Artificial Sequence
  derived and/or modified sequence
atgctgagaggcgtgctgggcaagaccttcagactggtgggctacaccatccagtacggctgcatcgcccactgcgccttcgagtacgtgggcggcgtggtgatgtgcagcggccccagcatggagcccaccatccagaacagcgacatcgtgttcgccgagaacctgagcagacacttctacggcatccagagaggcgacatcgtgatcgccaagagccccagcgaccccaagagcaacatctgcaagagagtgatcggcctggagggcgacaagatcctgaccaccagccccagcgacttcttcaagagccacagctacgtgcccatgggccacgtgtggctggagggcgacaacctgcagaacagcaccgacagcagatgctacggccccatcccctacggcctgatcagaggcagaatcttcttcaagatctggcccctgagcgacttcggcttcctgagagccagccccaacggccacagattcagcgacgactag

SEQ ID NO: 115571 - DNA, 324 bp, Artificial Sequence
  derived and/or modified sequence
atgctgagaggcgtgctgggcaagaccttcagactggtgggctacaccatccagtacggctgcatcgcccactgcgccttcgagtacgtgggcggcgtggtgatgtgcagcggccccagcatggagcccaccatccagaacagcgacatcgtgttcgccgagaacctgagcagacacttctacggcatccagagaggcgacatcgtgatcgccaagagccccagcgaccccaagagcaacatctgcaagagagtgatcggcctggagggcgacaagatcctgaccaccagccccagcgacttcttcaagagccacagctactag

SEQ ID NO: 115572 - DNA, 291 bp, Artificial Sequence
  derived and/or modified sequence
atgctgagaggcgtgctgggcaagaccttcagactggtgggctacaccatccagtacggctgcatcgcccactgcgccttcgagtacgtgggcggcgtggtgatgtgcagcggccccagcatggagcccaccatccagaacagcgacatcgtgttcgccgagaacctgagcagacacttctacggcatccagagaggcgacatcgtgatcgccaagagccccagcgaccccaagagcaacatctgcaagagagtgatcggcctggagggcgacaagatcctgaccacctag

SEQ ID NO: 115573 - protein, 1094 aa, Artificial Sequence
  derived and/or modified sequence
MSGGLGLRRSPEMSGKIEKADSQRSHLSSFTMKLMDKFHSPKIKRTPSKKGKPAEVSVKIPEKPVNKEATDRFLPEGYPLPLDLEQQAVEFMSTSAVASRSQRQKNLSWLEEKEKEVVSALRYFKTIVDKMAIDKKVLEMLPGSASKVLEAILPLVQNDPRIQHSSALSSCYSRVYQSLANLIRWSDQVMLEGVNSEDKEMVTTVKGVIKAVLDGVKELVRLTIEKQGRPSPTSPVKPSSPASKPDGPAELPLTDREVEILNKTTGMSQSTELLPDATDEEVAPPKPPLPGIRVVDNSPPPALPPKKRQSAPSPTRVAVVAPMSRATSGSSLPVGINRQDFDVDCYAQRRLSGGSHSYGGESPRLSPCSSIGKLSKSDEQLSSLDRDSGQCSRNTSCETLDHYDPDYEFLQQDLSNADQIPQQTAWNLSPLPESLGESGSPFLGPPFQLPLGGHPQPDGPLAPGQQTDTPPALPEKKRRSAASQTADGSGCRVSYERHPSQYDNISGEDLQSTAPIPSVPYAPFAAILPFQHGGSSAPVEFVGDFTAPESTGDPEKPPPLPEKKNKHMLAYMQLLEDYSEPQPSMFYQTPQNEHIYQQKNKLLMEVYGFSDSFSGVDSVQELAPPPALPPKQRQLEPPAGKDGHPRDPSAVSGVPGKDSRDGSERAPKSPDALESAQSEEEVDELSLIDHNEIMSRLTLKQEGDDGPDVRGGSGDILLVHATETDRKDLVLYCEAFLTTYRTFISPEELIKKLQYRYEKFSPFADTFKKRVSKNTFFVLVRVVDELCLVELTEEILKLLMELVFRLVCNGELSLARVLRKNILDKVDQKKLLRCATSSQPLAARGVAARPGTLHDFHSHEIAEQLTLLDAELFYKIEIPEVLLWAKEQNEEKSPNLTQFTEHFNNMSYWVRSIIMLQEKAQDRERLLLKFIKIMKHLRKLNNFNSYLAILSALDSAPIRRLEWQKQTSEGLAEYCTLIDSSSSFRAYRAALSEVEPPCIPYLGLILQDLTFVHLGNPDYIDGKVNFSKRWQQFNILDSMRCFQQAHYDMRRNDDIINFFNDFSDHLAEEALWELSLKIKPRNITRRKTDREEKT

SEQ ID NO: 115574 - DNA, 3285 bp, Artificial Sequence
  derived and/or modified sequence
atgagcggcggcctgggcctgagaagaagccccgagatgagcggcaagatcgagaaggccgacagccagagaagccacctgagcagcttcaccatgaagctgatggacaagttccacagccccaagatcaagagaacccccagcaagaagggcaagcccgccgaggtgagcgtgaagatccccgagaagcccgtgaacaaggaggccaccgacagattcctgcccgagggctaccccctgcccctggacctggagcagcaggccgtggagttcatgagcaccagcgccgtggccagcagaagccagagacagaagaacctgagctggctggaggagaaggagaaggaggtggtgagcgccctgagatacttcaagaccatcgtggacaagatggccatcgacaagaaggtgctggagatgctgcccggcagcgccagcaaggtgctggaggccatcctgcccctggtgcagaacgaccccagaatccagcacagcagcgccctgagcagctgctacagcagagtgtaccagagcctggccaacctgatcagatggagcgaccaggtgatgctggagggcgtgaacagcgaggacaaggagatggtgaccaccgtgaagggcgtgatcaaggccgtgctggacggcgtgaaggagctggtgagactgaccatcgagaagcagggcagacccagccccaccagccccgtgaagcccagcagccccgccagcaagcccgacggccccgccgagctgcccctgaccgacagagaggtggagatcctgaacaagaccaccggcatgagccagagcaccgagctgctgcccgacgccaccgacgaggaggtggccccccccaagccccccctgcccggcatcagagtggtggacaacagccccccccccgccctgccccccaagaagagacagagcgcccccagccccaccagagtggccgtggtggcccccatgagcagagccaccagcggcagcagcctgcccgtgggcatcaacagacaggacttcgacgtggactgctacgcccagagaagactgagcggcggcagccacagctacggcggcgagagccccagactgagcccctgcagcagcatcggcaagctgagcaagagcgacgagcagctgagcagcctggacagagacagcggccagtgcagcagaaacaccagctgcgagaccctggaccactacgaccccgactacgagttcctgcagcaggacctgagcaacgccgaccagatcccccagcagaccgcctggaacctgagccccctgcccgagagcctgggcgagagcggcagccccttcctgggcccccccttccagctgcccctgggcggccacccccagcccgacggccccctggcccccggccagcagaccgacaccccccccgccctgcccgagaagaagagaagaagcgccgccagccagaccgccgacggcagcggctgcagagtgagctacgagagacaccccagccagtacgacaacatcagcggcgaggacctgcagagcaccgcccccatccccagcgtgccctacgcccccttcgccgccatcctgcccttccagcacggcggcagcagcgcccccgtggagttcgtgggcgacttcaccgcccccgagagcaccggcgaccccgagaagcccccccccctgcccgagaagaagaacaagcacatgctggcctacatgcagctgctggaggactacagcgagccccagcccagcatgttctaccagaccccccagaacgagcacatctaccagcagaagaacaagctgctgatggaggtgtacggcttcagcgacagcttcagcggcgtggacagcgtgcaggagctggcccccccccccgccctgccccccaagcagagacagctggagccccccgccggcaaggacggccaccccagagaccccagcgccgtgagcggcgtgcccggcaaggacagcagagacggcagcgagagagcccccaagagccccgacgccctggagagcgcccagagcgaggaggaggtggacgagctgagcctgatcgaccacaacgagatcatgagcagactgaccctgaagcaggagggcgacgacggccccgacgtgagaggcggcagcggcgacatcctgctggtgcacgccaccgagaccgacagaaaggacctggtgctgtactgcgaggccttcctgaccacctacagaaccttcatcagccccgaggagctgatcaagaagctgcagtacagatacgagaagttcagccccttcgccgacaccttcaagaagagagtgagcaagaacaccttcttcgtgctggtgagagtggtggacgagctgtgcctggtggagctgaccgaggagatcctgaagctgctgatggagctggtgttcagactggtgtgcaacggcgagctgagcctggccagagtgctgagaaagaacatcctggacaaggtggaccagaagaagctgctgagatgcgccaccagcagccagcccctggccgccagaggcgtggccgccagacccggcaccctgcacgacttccacagccacgagatcgccgagcagctgaccctgctggacgccgagctgttctacaagatcgagatccccgaggtgctgctgtgggccaaggagcagaacgaggagaagagccccaacctgacccagttcaccgagcacttcaacaacatgagctactgggtgagaagcatcatcatgctgcaggagaaggcccaggacagagagagactgctgctgaagttcatcaagatcatgaagcacctgagaaagctgaacaacttcaacagctacctggccatcctgagcgccctggacagcgcccccatcagaagactggagtggcagaagcagaccagcgagggcctggccgagtactgcaccctgatcgacagcagcagcagcttcagagcctacagagccgccctgagcgaggtggagcccccctgcatcccctacctgggcctgatcctgcaggacctgaccttcgtgcacctgggcaaccccgactacatcgacggcaaggtgaacttcagcaagagatggcagcagttcaacatcctggacagcatgagatgcttccagcaggcccactacgacatgagaagaaacgacgacatcatcaacttcttcaacgacttcagcgaccacctggccgaggaggccctgtgggagctgagcctgaagatcaagcccagaaacatcaccagaagaaagaccgacagagaggagaagacctag

SEQ ID NO: 115575 - DNA, 3285 bp, Artificial Sequence
  derived and/or modified sequence
atgagtggcggactgggcctgaggcggagcccggaaatgtccggaaagattgagaaggcagattcccagcgtagtcatctttcatcgtttactatgaaacttatggataagtttcacagccccaagatcaaaaggacaccaagcaagaagggaaagcctgcagaagttagcgttaaaatccctgagaaacccgtaaataaagaggccaccgaccgctttttgcccgagggctacccgctccccctggatctggagcaacaagccgtggagtttatgagcacgagcgcagttgctagcaggtcacagcgccaaaagaatctctcctggctggaggagaaggaaaaagaagtggtttccgcactgcgttattttaaaaccatagtggataagatggcgattgacaagaaagttctcgaaatgctcccagggagtgcctctaaggtcctggaagccatcctccccctggtgcagaacgatccacgcattcagcactccagcgcactgtcctcctgctacagcagagtataccagagtctggccaacctgattcgctggtcagatcaggttatgttggagggtgtgaattccgaggacaaagagatggtaacgacagtgaagggagtgatcaaggccgtactggacggtgttaaagaactcgtgcgtctgacgatcgagaaacaggggcgtccttcaccgaccagtccagtcaaacctagtagcccagcatccaaacctgacggacccgccgaactaccgctgaccgacagggaggtggagatccttaacaaaaccacagggatgtctcagtcaaccgagcttctacccgacgctactgacgaggaagtagctccccccaagcctcctcttcctggaatcagggtggttgacaattcccccccaccggctctccccccaaaaaagagacaatctgccccgtctcctaccagagttgccgtggttgcccccatgagtagagctacaagtggcagctctctcccagtgggaattaacagacaggatttcgacgtagattgttacgcccagcgccggctatccggcggaagtcatagctacggcggcgaaagccctaggctctccccatgcagctccatcggcaagctgtcaaaaagcgacgaacagctgtcctctctggaccgggattctggacagtgctcaagaaacacgtcatgtgaaaccctcgatcattatgacccagactacgagtttctgcagcaggatctttctaacgccgaccagatccctcagcagacagcgtggaaccttagccctctccctgaaagcctgggagagtccggcagccccttcctggggcctccttttcagctccctctgggcggacatccccagcctgacgggccactggctcccggacagcagaccgatactccgccggccctgccagaaaaaaagcggaggagtgccgcttcccaaaccgcggatggatccggatgccgagtgtcatatgaacggcacccttcacaatatgacaatatctcaggagaagacctgcagagtaccgcacccataccatctgtgccttacgctcctttcgctgcgatcctgcccttccaacatggtgggtccagcgcgccggtcgaatttgtcggagattttacggcacctgaaagtaccggcgaccctgagaagcccccaccactccccgaaaagaaaaacaaacatatgctggcctatatgcaactgctggaggattatagcgagccacagccatcaatgttctatcagacccctcagaatgagcacatctaccagcagaagaacaagttgctcatggaagtgtacggtttctctgattctttcagtggggtggacagtgtgcaggaactggccccaccacccgcactcccgcctaaacagcggcagctagagcctcccgccgggaaggatggccacccccgcgatccctctgctgtatctggagttccgggcaaggattctcgggatggttcagaacgggctcctaagagccccgatgcattagagagtgcacagagtgaagaagaggtggacgaactttcactaattgatcacaatgagatcatgagccggcttactctcaagcaggaaggcgacgacggccctgacgtgcgaggtggctccggtgacatcttactggtgcatgcaacagagactgacaggaaggacctggtgctgtattgcgaagcgttcctgactacatataggacatttatttcaccagaggaattaatcaaaaagctgcagtataggtacgaaaagtttagtcctttcgcagacactttcaagaagagagtatctaagaacacgttttttgtgttggtgagagtagtggacgaactctgtctcgtggaacttacggaagagattctgaagcttctgatggaattagtattcaggcttgtgtgcaacggcgagttgtccctcgcgagagtgctaaggaagaacatcctggataaagtcgatcaaaaaaagctgctgcgttgcgctaccagttcgcagccattagccgcccgcggcgtagccgctcgacctgggacacttcatgacttccactctcacgaaatcgccgaacaactcactcttttggatgctgagctgttctataagattgaaattccggaagtcctgctatgggctaaagaacagaacgaggagaagagtcctaacctgacgcaatttactgaacacttcaacaacatgagctactgggtgagaagtatcatcatgttacaggaaaaagcgcaggacagagagcggcttctcctcaagtttattaaaattatgaaacatctcagaaagctaaacaactttaatagttatctggccatcttgtcagctttagattctgcacctattcgccggctagagtggcaaaaacagacttcggaagggctggcagagtattgcactcttatcgattcttcttcctcttttcgcgcgtatagggccgccctcagtgaggtggagcccccatgcattccgtacctaggacttattctgcaggaccttacatttgtgcacctgggcaaccctgattacatcgacgggaaggtgaacttttccaagaggtggcagcagttcaacatcctggactccatgagatgttttcaacaggctcactacgatatgagacggaacgatgatataatcaactttttcaacgactttagtgatcatttggccgaagaagcattgtgggagttgtctctgaaaatcaaaccgcggaatattactcgtcgcaagacagatcgcgaggagaaaacctag

SEQ ID NO: 115576 - DNA, 3285 bp, Artificial Sequence
  derived and/or modified sequence
atgagcggcggtctcggactgaggagaagccccgagatgtcaggcaaaatcgaaaaggccgattcacagcgttctcatctgtcgagttttaccatgaagttaatggataagtttcactccccaaagattaaacggacaccgagcaaaaagggaaagccagccgaagtctccgtgaaaattcccgaaaagccagtaaacaaggaagcgacagacaggtttctcccagagggctaccctttacccctcgatctggagcaacaagccgtggagtttatgagcacctctgcagtcgcctccaggtcccagagacagaagaacctgagctggctggaggagaaagagaaagaagtcgtgtctgcccttcgttatttcaaaacaattgtggataaaatggctatcgataagaaagtactcgagatgcttccaggatcagcatctaaggttttggaagctatcctacccctcgtacagaacgaccctaggattcagcactcgagtgccctttccagctgctactctcgtgtttaccagtcacttgccaacctgataaggtggtctgatcaggtgatgctcgaaggggtgaactcagaggacaaagaaatggtgaccactgtgaagggcgtcattaaagctgtactggacggggtaaaagaactggtgaggctcactattgaaaaacaaggccgtcccagtccgacgtcacccgtaaagccctcgtcccctgcttcaaagccagatggccccgccgaactcccactgaccgatcgggaagtggaaatcctcaacaaaactaccggtatgagtcaatccaccgaacttcttcccgacgccactgacgaggaggttgctccgcccaagcctcccttgcccggaatccgcgtggtggataacagccctccgcctgctctgccaccgaagaagagacagagtgccccctcgcctacgcgcgtcgcggtggtggctcccatgagtagggctacatcagggtccagtctgccagtgggcattaacaggcaggatttcgacgtcgactgctacgcccaacgcagattgagcgggggctcccattcctacggaggagaatccccgcgactgagcccatgcagtagcataggaaagttgagcaagagcgacgagcagctatcatccctggacagagacagtgggcagtgctcccggaacacatcttgtgagaccctagaccactacgaccccgattatgagttcttgcagcaggacctcagtaacgcggaccagatcccgcagcaaaccgcttggaatcttagccctctgccagagtccctgggggaatcgggctcaccatttttggggcctcccttccagctccccttgggcggacaccctcagccagacggaccactggcacctgggcaacagaccgacacacccccggcactgccagaaaagaaaaggaggtccgcggcatcacaaactgccgatggttcgggatgcagagtctcgtacgagcgccacccttctcaatacgacaacattagcggtgaagacctccagtctacagcccccatcccaagcgtcccgtacgccccatttgccgccatactgccattccaacacggaggctcctccgccccagtggaattcgtcggagactttacagcacctgaaagcaccggagaccccgaaaagcccccaccattgccggagaagaagaacaagcacatgcttgcttacatgcaactgcttgaggattactctgaaccacagccgtctatgttttatcagaccccacagaacgagcatatttatcagcaaaaaaataagctgctgatggaggtatacggattttcggactccttttcgggcgtcgacagtgtccaggagctggcccctccaccggcattgcctccaaaacagcgccagctggaacctcccgccggcaaagatgggcatcctagagatccaagcgccgtgtccggtgtgcctgggaaagattctcgagacggctctgaacgcgccccaaagagtcctgacgcactggagagcgcccaaagtgaagaagaggtcgacgagctgagcctcattgatcataacgaaataatgagtcgattaacactcaaacaggagggggacgatggacccgacgtgcgtggcgggtccggggacatcctgctcgtgcatgccactgaaacagatcgcaaagatctggtgctgtattgtgaggccttcctgacaacgtataggacatttatctccccagaagagctcattaaaaaactccagtatagatatgagaaattcagcccattcgccgatacctttaaaaagagagtgtccaagaatactttcttcgttctggtgagagttgtggacgaattgtgccttgtggaactcaccgaagaaatcctgaagcttctgatggagcttgtgttccggctggtttgcaacggggagctttcccttgcgagggtgctgagaaaaaacatcctcgataaagtcgatcagaagaaactgctgcgctgtgccaccagcagtcagccgctcgccgcaaggggcgtcgccgcacggccaggcacacttcatgatttccattctcacgaaatagcagaacaattgacactcctggatgccgagctgttttacaaaatagaaatcccagaggtgctcttatgggccaaagagcagaacgaagagaagtccccaaatcttacccagttcaccgaacattttaacaatatgtcttactgggtacgttccattataatgttgcaggagaaggcccaagacagagaaagactgctcctgaagttcattaaaattatgaagcacttgcgcaaacttaacaacttcaattcttacttggctatcctgagtgctttggattccgctccaattagaagattggagtggcagaagcaaacctccgagggcctcgctgagtattgtaccctgattgatagctcttcctccttccgagcttaccgggccgcactcagtgaggtcgagcccccctgtattccttatctgggactgatcttgcaagacctcacctttgtgcacctgggcaatcctgattatatagacgggaaggtgaactttagtaagcgatggcagcagttcaacatactagattctatgcgctgcttccagcaggctcattatgacatgagacggaacgatgatattattaactttttcaacgacttttcagatcacctggcggaggaggccctgtgggagctgtcgcttaaaattaagccccgaaacatcacccgcagaaaaaccgatagagaggagaaaacatag

SEQ ID NO: 115577 - DNA, 3285 bp, Artificial Sequence
  derived and/or modified sequence
atgtctgggggcctgggcctgcggcgcagccctgagatgtctgggaagattgagaaggctgacagccagaggagccacctgagcagcttcaccatgaagctgatggacaagttccacagccccaagatcaagaggacccccagcaagaagggcaagccagctgaggtgtctgtgaagatccctgagaagcctgtgaacaaggaggccacagaccgcttcctgcctgagggctaccccctgcccctggacctggagcagcaggccgtggagttcatgagcaccagcgctgtggccagccgcagccagaggcagaagaacctgtcctggctggaggagaaggagaaggaggtggtgtctgccctgcgctacttcaagaccatcgtggacaagatggccatcgacaagaaggtgctggagatgctgcccggcagcgccagcaaggtgctggaggccatcctgcccctggtgcagaatgacccccgcatccagcacagcagcgccctgagcagctgctacagccgggtgtaccagagcctggccaacctgatccgctggagcgaccaggtgatgctggagggcgtgaacagcgaggacaaggagatggtgaccaccgtgaagggcgtcatcaaggctgtgctggatggagtgaaggagctggtgcggctgaccatcgagaagcagggccggcccagccccaccagccctgtgaagcccagcagccctgccagcaagccagatggccctgctgagctgcccctgacagaccgggaggtggagatcctgaacaagaccaccggcatgagccagagcacagagctgctgcctgatgccacagatgaggaggtggccccacccaagccacccctgcccggcatccgggtggtggacaacagccccccaccagccctgccccccaagaagaggcagagcgcccccagccccaccagggtggccgtggtggcccccatgagccgggccaccagcggcagcagcctgcctgtgggcatcaaccggcaggactttgatgtggactgctacgcccagaggcggctgagcggcggcagccacagctatggaggagagagcccccggctgagcccctgcagcagcatcggcaagctgagcaagagtgatgagcagctgagcagcctggaccgggacagcggccagtgcagcaggaacaccagctgtgagaccctggaccactatgaccctgactatgagttcctgcagcaggacctgagcaatgctgaccagatcccccagcagacagcctggaacctgagccccctgcctgagagcctgggggagagcggcagccccttcctgggcccccccttccagctgcccctgggcggccacccccagccagatggccccctggcccctggccagcagacagacaccccaccagccctgcctgagaagaagagaagatctgctgccagccagacagcagatggcagcggctgccgggtgtcctatgagcggcaccccagccagtatgacaacatcagcggggaggacctgcagagcacagcccccatccccagcgtgccctatgccccctttgctgccatcctgcccttccagcacggcggcagcagcgcccctgtggagtttgtgggggacttcaccgcccctgagagcactggagaccctgagaagcccccacccctgcctgagaagaagaacaagcacatgctggcctacatgcagctgctggaggactacagcgagccccagcccagcatgttctaccagaccccccagaatgagcacatctaccagcagaagaacaagctgctgatggaggtgtatggcttcagtgacagcttcagcggcgtggacagcgtgcaggagctggcccctcctccagccctgccccccaagcagaggcagctggagcccccagctgggaaggatggccacccccgggaccccagcgctgtgtctggagtgcctgggaaggacagcagagatggcagcgagcgggcccccaagagcccagatgccctggagagcgcccagagcgaggaggaggtggatgagctgagcctgattgaccacaatgagatcatgagccggctgaccctgaagcaggagggagatgatggcccagatgtgcggggcggcagcggggacatcctgctggtgcacgccacagaaacagacaggaaggacctggtgctgtactgtgaggccttcctgaccacctaccgcaccttcatcagccctgaggagctgatcaagaagctgcagtaccgctatgagaagttcagcccctttgctgacaccttcaagaagagggtgtccaagaacaccttctttgtgctggtgcgggtggtggatgagctgtgcctggtggagctgacagaggagatcctgaagctgctgatggagctggtgttccggctggtgtgcaatggagagctgagcctggcccgggtgctgaggaagaacatcctggacaaggtggaccagaagaagctgctgcgctgtgccaccagcagccagcccctggccgcccggggcgtggccgcccggcccggcaccctgcatgacttccacagccatgaaattgctgagcagctgaccctgctggatgctgagctgttctacaagattgagatccctgaggtgctgctgtgggccaaggagcagaatgaggagaagagccccaacctgacccagttcacagagcacttcaacaacatgagctactgggtgcgcagcatcatcatgctgcaggagaaggcccaggaccgggagcggctgctgctgaagttcatcaagatcatgaagcacctgaggaagctgaacaacttcaacagctacctggccatcctgagcgccctggacagcgcccccatccggcggctggagtggcagaagcagaccagcgagggcctggccgagtactgcaccctgattgacagcagcagcagcttccgggcctacagagctgccctgtctgaggtggagcccccctgcatcccctacctgggcctcatcctgcaggacctgacctttgtgcacctgggcaacccagactacattgatggcaaggtgaacttcagcaagcgctggcagcagttcaacatcctggacagcatgcgctgcttccagcaggcccactatgacatgagaagaaatgatgacatcatcaacttcttcaatgacttcagtgaccacctggccgaggaggccctgtgggagctgagcctgaagatcaagcccaggaacatcaccaggaggaagacagaccgggaggagaagacctag

SEQ ID NO: 115578 - DNA, 3285 bp, Artificial Sequence
  derived and/or modified sequence
atgagcggcggcctgggcctgcggcggagccccgagatgagcggcaagattgaaaaagcggacagccagaggtcccacttgtctagctttactatgaagctgatggacaaatttcactccccaaaaattaaacgtactcccagcaagaagggcaagcccgcagaggtctccgtcaagatcccagaaaaacctgtcaacaaggaggcgacagatcggttcctgcccgaaggataccccctacccctggacctggaacaacaggctgtcgagttcatgagcactagtgcagtggcgagccgctcgcaaaggcagaagaacctgtcatggctagaggagaaggagaaagaagttgtgagtgcactgcgctattttaaaactatcgtcgataaaatggccatcgacaagaaagtgctcgagatgctccctggatccgccagtaaagtgctggaggctatacttccactggtgcagaatgatccaaggattcaacatagttctgcactctcgtcgtgttacagtagagtttaccagagcctggctaacctgatcaggtggagcgaccaagtcatgctagaaggtgtgaattcagaagataaggaaatggtgacgactgtgaagggtgttattaaagccgtcctggatggggtgaaggaactggtgcgcctgaccatcgagaaacaggggcgcccctcacccacgtctccagtgaaaccatcctcgcccgcgtctaaacctgacggacccgcagaactaccactcacagatagagaggtggaaatcctgaacaagaccactggtatgagccaaagcactgagctactgcctgacgcgaccgatgaagaggttgccccccctaagcctcctttgccaggtatacgtgttgtagacaacagtccccctccagcactgccaccgaaaaagcgccagtctgcaccaagtcccacacgtgttgccgtggtcgcacccatgtctcgcgcgacatctggcagcagcctccctgtgggcattaaccgccaggactttgacgtggattgttatgcccagaggagattgtcagggggttcacactcatatggaggtgaatctcctagactgagtccctgcagttcaataggaaagttgtctaaaagcgacgaacagctgtcctccctagacagggacagcggtcagtgcagccgcaatacctcctgcgaaacactcgatcattacgatcccgattatgagtttctgcagcaagatctgtctaacgccgaccagatcccacagcagaccgcctggaatcttagcccattacctgagagcctgggcgaatccggcagccccttcctggggcctccttttcagctaccacttggcggccacccccagccagatggacccttagctcccggccagcaaactgacacacccccagcgctgcccgagaaaaaacggcggtcagcagcaagccaaaccgccgacggaagcggctgtcgggtgtcatatgagagacacccctcccaatacgacaatatctctggagaggatcttcagtcaactgcccccattccttccgtgccctatgccccttttgctgccatactacccttccaacacggagggagctcagccccggttgagttcgtcggcgactttaccgctcccgaatctacaggagatcccgaaaaacctccccccctgcccgaaaaaaaaaacaagcacatgctagcttacatgcagctgctcgaggattatagcgagccacagcctagcatgttttaccagacgccccagaatgagcatatataccagcaaaagaacaaactcttaatggaggtctacggcttttctgactccttttctggcgtcgatagcgtgcaggagctggcgccacccccagctctgccaccaaagcagaggcaactggaaccccctgctgggaaggacggacatccgcgcgatccaagtgccgtgagcggcgtccctggtaaagactcaagagacggctccgagcgggcccctaagagtccagacgctctggaatcagctcagtctgaggaagaggtggacgagctcagcctgatcgaccacaacgaaatcatgagccgactgaccctcaaacaggagggagatgacgggcctgacgtccggggaggaagcggagacattctactcgtccacgccactgaaacagataggaaagacttagtcctctactgtgaagcctttctcaccacgtacagaacgttcatttcccctgaagagctgatcaaaaaacttcaatacagatacgaaaagttttccccgtttgctgatacctttaaaaaacgagtgtccaagaatactttcttcgttctggtgcgcgtcgtggatgagctttgtctggttgaactgacggaagagatcctgaagcttctgatggagcttgtgttccggctggtgtgcaatggggagctgagtctagcccgggtactgagaaagaacatactggataaggtcgaccaaaagaagctgctgcgctgtgccacatcctcacagccgctagccgcaaggggagttgccgcccggccaggtactctgcacgacttccacagccacgagatcgccgagcagttgacactgctcgacgcagagctgttctataaaattgaaatccctgaagttttgctctgggcgaaagaacaaaacgaagaaaagagcccaaatctcacccagttcactgaacacttcaataacatgtcatactgggtgcggtctataatcatgctccaggaaaaagctcaagatcgagaaaggttactcttaaagttcatcaaaatcatgaagcatctgagaaagctaaataattttaacagctatctggcgatattgtccgctttggacagcgcccccattcgtcgcctggagtggcagaagcagacttctgagggactcgctgaatactgcactttaattgattcctctagtagttttcgggcctatagggccgctttaagcgaggtggagccaccatgcattccatatctggggcttatcctccaggacctcactttcgtacacctgggaaacccagactatattgatggaaaagttaacttctctaagcgatggcaacagttcaacattcttgactctatgaggtgctttcaacaggcccattacgatatgcggcggaatgacgatatcataaattttttcaacgacttctccgatcacctggccgaagaggccctttgggaactatcactgaagataaagccgagaaacattacgagacgcaagacagatagggaggagaaaacatag

SEQ ID NO: 115579 - DNA, 3285 bp, Artificial Sequence
  derived and/or modified sequence
atgagcggcggcctgggcctgcggcggagccccgagatgagcggcaagattgaaaaagccgatagccagcgatcacatttaagttcgttcacaatgaagctcatggacaaattccattctccaaaaatcaagcggaccccgtcgaaaaagggcaagcccgccgaagtgagcgtcaaaattcctgaaaaacccgttaataaggaagccaccgaccgtttcctcccagagggatatcctctaccacttgaccttgagcaacaagcggtagagtttatgagcacatctgcggtggcctcacgctcccagcggcagaagaacctctcctggttggaggagaaagaaaaagaagtggtgtcagcgttgcggtacttcaagaccatcgtcgacaagatggctatcgacaaaaaggtactggagatgctccctggttctgccagtaaggtgctggaggcgatattacccctggtacaaaatgacccaaggatccaacattccagtgccttaagttcatgctacagtagagtgtatcagtcactggccaacttgatccgctggtctgatcaagtaatgctggagggagtgaactccgaggataaagaaatggtgacaactgtgaaaggtgtaattaaggctgtgctggacggtgtgaaagaactcgtacgcctaacgattgaaaaacaagggaggccctcacctaccagcccagttaagcccagttccccggcctcaaagcccgatggcccagcagagttgccactgacagaccgagaggtggaaatcctcaacaagactacaggtatgtcccagtccactgaactgttgccagacgctactgacgaagaggttgcaccgcccaagccacccctgcccggcatccgggttgtggacaacagccctccacccgccctgcctcctaagaaaaggcagagtgcgccttctccaacaagagtcgcggtggttgctcctatgtccagggccacttccggaagcagtttacctgtcggcatcaacaggcaggactttgatgttgactgctatgcccagcgcagactgagcgggggctcccacagctacggcggagagagtccccgattatcgccctgttcttcgatcggtaaactgtccaagagtgacgagcaattgtcaagtctggatagggactcgggccagtgttcaaggaataccagttgcgagaccctcgatcactacgaccctgactacgagtttttgcaacaggatctgagcaacgccgaccagataccccagcaaacagcctggaatctgtcccctctgcctgagagtctgggcgagtctggcagcccgtttctgggcccccctttccagctacccttaggggggcacccacaaccagacgggccactggcccctggccagcaaactgacaccccacccgccttgcccgaaaagaagaggcgctccgcggcaagccagaccgccgatggcagcggatgtcgggtttcatatgaaagacacccctcacagtatgacaacatctccggtgaagacctgcagtctacagcccccattccgtccgtcccatacgcaccgtttgcagcaatcttaccgttccagcatggcgggtctagcgcgcctgtcgagtttgtgggcgacttcaccgccccagaaagcacaggcgacccagaaaagccccctccactgccggaaaaaaaaaataagcatatgttggcctatatgcaactgctcgaagactattcagagccccagccgtcaatgttctatcagactcctcaaaacgagcacatctaccagcagaagaacaaactgttaatggaagtctatggatttagcgacagttttagtggggtggactcagtgcaagagctggccccccctcctgcattgccacccaagcagaggcagctggagccccccgccggtaaggatggtcatccacgggaccctagcgctgtgtctggagttcctggcaaagacagccgcgatggctccgaaagggctcccaagagcccagatgctctcgaatccgcccagagcgaggaggaggtcgacgagctttccctgatagatcacaacgaaattatgagccgcctgaccctgaagcaggaaggcgacgatgggccagacgtgagaggggggagcggcgacattctactagtgcacgctacagagacagacagaaaagacctggtgttgtactgcgaggcgtttctgaccacataccgaactttcatctcacccgaagaactgataaagaagctgcaatatcggtacgagaaattctccccttttgctgacacgtttaagaaacgagtgtccaaaaacactttctttgttctggttcgcgtcgtggatgagctctgcctggtggagctgacagaggaaatacttaagttgttaatggagttagtgttcaggcttgtatgtaacggagaactgtctcttgcacgcgtgttgcgcaagaacatcctggacaaggtagatcaaaagaaactgttaagatgcgccacatcttcccagccccttgccgctaggggagtggcagcacgacctggcacattacatgacttccacagtcacgaaatcgccgaacagctcaccttgctggacgccgagctgttctataagattgaaatacccgaggttttactctgggcaaaggaacaaaacgaggaaaagtctcctaacttaacacagttcacggagcatttcaacaatatgtcttactgggtgcggagtatcatcatgctgcaggagaaagcccaggaccgggagcgattgttgctgaagtttatcaagattatgaaacatttacgcaagctgaataattttaatagctacctggcaatcctctctgctctggatagtgctccgatcaggaggctggaatggcagaagcagacttctgagggcctggcagaatactgcacccttattgactccagttcttcttttagagcgtatagggcggctctgtccgaggttgagcccccttgtatcccgtacttaggcttgatcttgcaagacctgactttcgtgcatctaggaaaccccgattacattgacgggaaagtcaatttctcaaagagatggcaacaattcaatattctggactctatgcgctgcttccagcaggcccactacgacatgcgccgtaacgatgacattatcaacttcttcaacgacttttctgaccacctggcagaagaggcactgtgggaactgagcttaaagatcaagccaaggaatatcacgcggcgcaagactgatagggaagaaaaaacgtag

SEQ ID NO: 115580 - DNA, 3285 bp, Artificial Sequence
  derived and/or modified sequence
atgtccggcggactggggctccggaggagccctgagatgtcaggaaaaatcgagaaagcggactcacagcgctcccacctctccagcttcaccatgaagctaatggataaatttcatagcccaaagataaagcgtaccccctccaagaagggcaagccagccgaagtgagcgtgaaaattcctgagaagccagtgaataaggaggcaacggatagattcctcccagaggggtacccactgccgcttgacttggaacagcaggccgtggaatttatgagcacttccgcagtggccagccgcagccaaaggcagaaaaacctgtcctggctggaggaaaaagaaaaggaagtggtttccgctctacggtactttaaaactatcgtggacaaaatggctatagataagaaggtcttggagatgttgccagggtcagcatccaaggtgcttgaagccatcctccccctggtccagaacgatccaagaatccagcattctagtgcccttagctcgtgctactccagggtgtaccagagtctggcaaacctgattagatggtctgatcaggtgatgctggaaggagtgaatagcgaggacaaggaaatggtaactaccgtaaaaggggtgattaaggctgttctggatggagttaaagagctcgtgcggttaacaattgaaaagcaagggagacctagtccaaccagtccagtgaaaccgtcaagccccgcatctaagccagatggacccgcagagcttccactgacagatcgcgaggtcgaaatcttgaataagacaactgggatgtcacagtcgaccgagctcctgcctgacgctactgacgaggaggtcgcaccgcctaaaccccctctgccgggaattcgcgtggtcgataatagccccccaccagcactgcctcctaagaagcggcagtcggctccatccccgacgcgggtggcagtggtcgctcccatgtcacgggcaacatccgggtctagtctgccagttggtataaataggcaggacttcgacgtagactgttatgcacagagaagactgtccggcggatcccactcgtacggaggcgaaagcccacgcctaagtccgtgtagctctattggcaaactgagcaagtcagatgagcagctgtccagtctggaccgagattctggacaatgtagccggaacacttcttgtgagactttggaccactatgatccggattacgaattcctgcaacaggatctctcaaacgcagatcagatcccgcagcagaccgcctggaacctgtcacctctgcccgaatccctaggggaatccggaagccccttcctcggaccacccttccagctacctctgggtggacatccccaaccagacggtcccctggcaccgggtcagcagacagacactcccccagcactccctgaaaaaaagcgcagaagcgcagcatcacagactgccgatggatccggctgccgcgtttcgtatgagcggcacccctcccagtacgataacatcagcggggaagaccttcagtccactgctcctatcccatctgtgccctacgcaccctttgccgctatccttccatttcaacacgggggtagcagtgcacccgtcgaatttgtcggggattttactgcgccagaatcaacaggcgacccagaaaaaccaccccctctcccggaaaaaaaaaacaagcatatgcttgcgtatatgcaactgcttgaggactactcggagcctcagccctctatgttctaccaaacaccccagaacgaacacatttaccagcagaagaataaactgctaatggaggtttacgggttctctgatagctttagtggagtggacagcgtccaagaactggccccaccgccagcccttccgcctaaacaaagacagctagagccacccgcaggcaaggatggtcaccccagagacccctccgccgtcagtggtgttcccggtaaggacagccgagacggctcagagagagctccaaaaagtcccgacgctctcgagagcgctcagagtgaggaagaagtggatgagctctcactcatagaccacaacgaaatcatgagcaggctgacccttaaacaggagggcgacgatggacccgacgtgcggggtggcagcggggacatcttgctggtgcatgccacggagactgacaggaaagaccttgtgctctattgcgaagcctttctcacaacgtataggaccttcatctcccccgaagagctgatcaaaaagctccagtacagatatgagaaattctcacccttcgctgatacatttaagaaaagggtatcaaaaaatacattctttgtgcttgtgcgagtggtggacgagctgtgccttgtggaactcacagaggaaatactgaagcttctgatggaacttgtgttcaggttagtttgcaatggagagctctccttggcaagagtcctccggaagaatatactggacaaggttgaccagaagaagttgctaaggtgtgcaacgagctcccagcccttggccgcacggggagtcgccgcacggcctggaacactgcacgattttcacagccacgagattgcagagcagctgaccttgctggacgctgaactgttttataagattgagatcccggaagttctactatgggccaaggagcagaacgaggaaaaatctcctaaccttactcagttcaccgaacattttaataacatgtcctactgggtaaggtccattatcatgttgcaggagaaagcccaggatcgggagcgcctcctgctgaaattcattaaaattatgaaacatctgaggaagctgaataacttcaattcttatcttgccatactcagcgccctggactccgctccaattagaaggctcgaatggcaaaagcaaacatcagagggcctggcggaatattgcacactgattgattcaagtagtagcttcagagcgtaccgcgctgcactctccgaggtggagcctccttgtatcccctaccttgggctcatcctgcaagatctgacttttgtacacctgggaaaccctgattacattgacggaaaggttaatttttccaagcgctggcagcagttcaatattttagacagcatgaggtgctttcagcaagcccactatgatatgaggcggaatgatgacattatcaattttttcaacgatttcagcgaccatctcgcagaagaagcgctgtgggagttatcacttaaaataaaaccacggaatatcacgcgtcggaaaacagacagggaggaaaaaacctag

SEQ ID NO: 115581 - DNA, 3285 bp, Artificial Sequence
  derived and/or modified sequence
atgagcgggggactaggcctgagacggtctcccgagatgagtggcaaaattgaaaaggcagactcccagcggtcacacctgtcatcattcactatgaaactgatggacaagttccattcacccaagatcaagaggaccccctccaagaaagggaaaccggcagaagttagcgtgaagatcccagagaaaccagtgaacaaagaagccacagaccggtttctcccggaaggctatcccctgccccttgacttggagcagcaagcggtcgagtttatgtcaacaagcgctgtggcgtccaggtcccagaggcaaaagaacctgtcttggcttgaggaaaaggaaaaggaggtggtgtcagcccttaggtacttcaagacgatcgtggacaagatggccatcgacaaaaaggtgcttgaaatgctgccaggaagtgcttcaaaagtactggaggccattctgccactggttcagaatgaccctcgtatacagcacagcagtgctctctccagttgctactctcgcgtgtaccagtctttggccaatctgattcgctggtcggatcaagtgatgctggaaggtgtgaacagtgaggacaaggaaatggtgaccacagtgaaaggagtgatcaaggcagtgctcgacggcgtcaaagagcttgtgcgcctaactatcgagaagcagggcagaccgtcacctacctcccctgtcaagccttccagcccagcgtcaaaacccgatggacctgccgagctaccgctcaccgaccgagaggttgaaatattgaacaaaaccacagggatgagtcaatctactgagctgctacctgacgctaccgacgaagaggttgcgccacctaagccacctctccctgggatccgggtggtggataactcccctcctccggctctgcccccaaaaaaaaggcagagtgcgccatcccctactagagtagcagtagtggcacccatgtcacgagctacctctggttcatctctcccggtcggaattaataggcaagacttcgatgttgactgctatgctcagaggcgactcagcgggggaagccattcttacggtggggaaagcccacgattatccccatgctcctccattggtaagctgagtaagagtgacgaacaactctcatcgctggacagggactccggacaatgctccagaaatacatcttgtgaaacactagatcattacgaccctgattatgagttcttgcagcaggacttgagtaacgctgaccagataccacagcagacagcctggaacctgtcgcccctgcctgagtcactgggggaatctggatccccatttctcgggccaccattccaactgccccttgggggacaccctcagcccgacgggcctcttgcaccaggtcagcagaccgatacaccaccagccctgcccgaaaagaagagaagatccgctgcctctcagacagctgacggcagcggctgtcgggtatcgtacgagaggcacccatcccagtatgacaatatctcaggggaagaccttcagtccactgctccaatccctagtgtcccctacgctccattcgccgcaatcctgccattccagcacggaggcagcagcgccccagtggaatttgttggggacttcaccgcgccagagagcaccggagaccctgaaaaacctccccctcttccagagaagaagaataaacatatgctcgcatatatgcagctgttagaagattactccgagccccagccaagtatgttctaccagacacctcagaatgagcacatctatcagcagaagaataaacttctaatggaggtgtacggttttagtgatagcttctcaggcgtcgactcagtgcaagagctcgccccaccccctgcacttcctccaaaacagagacagctggaacccccagccggaaaagatggccaccccagggacccgagtgcagttagcggagtcccgggaaaggattccagagacggttcagagagggctccaaaaagtcccgatgccctggaatctgcacagtccgaggaggaagtcgacgagctgtcgttgatagaccacaacgagatcatgtccaggctgacgctgaagcaggagggcgatgacgggccagatgttaggggcggatccggagacattcttctggtacacgcaaccgagacagatcggaaagaccttgtgttgtactgtgaagcctttctgaccacttataggaccttcatttccccagaggagctgatcaaaaagttacagtaccggtacgaaaagttcagcccttttgcagacactttcaagaaaagggtgagcaagaacacctttttcgtactcgtgcgcgtggtcgatgagctgtgccttgtggagttaacagaggagatactgaagctgctcatggaacttgtatttaggctcgtgtgcaacggggaactttctctcgcgagggtgttgcggaagaatatcctggataaggttgaccagaaaaaactcctgcggtgcgcaaccagttcacagcccctggctgcaaggggcgtggctgcacggccaggcaccctgcatgacttccattcccatgaaattgcggagcagctgacactgttggacgctgaattattttacaagatcgaaattcccgaagtgctcctctgggcgaaagagcagaacgaagagaaatcaccaaacctgacccagttcaccgagcactttaataacatgtcatattgggtgaggtccataattatgctgcaggagaaggcccaggatcgcgagaggcttttactaaagtttattaaaatcatgaaacatctacgaaaacttaataattttaattcctatctggctatcctgtctgccctcgactctgcccctataaggcgcctggaatggcagaagcaaacgtcggaaggattagctgaatactgcaccctaattgacagttcttcttccttccgcgcatacagagccgctctgagcgaggtcgagcccccatgcatcccttatctggggctgatacttcaggacttgaccttcgtgcatttgggcaacccagactacatcgacggcaaggtcaacttctccaagagatggcaacagtttaatatcctggattcaatgaggtgcttccagcaagcccactacgatatgaggcgcaatgacgacatcataaacttttttaacgactttagcgatcacttggctgaggaggccctttgggaactgtccctaaagatcaaaccaagaaacatcacaaggcgcaagacagaccgggaagagaaaacgtag

SEQ ID NO: 115582 - DNA, 6019 bp, Artificial Sequence
  derived and/or modified sequence
cccggcccgggcccgatgagcggcggcctcggcctccggcgcagcccggaaatgtccggcaagatcgagaaagcagactctcagcgttctcatctctcttccttcaccatgaagctgatggacaaattccactcacccaaaatcaagagaacgccatcaaagaagggaaaaccagctgaggtgtccgtaaagattccagagaagcctgtgaacaaagaggcaacagacagatttctaccagagggctaccctctccccttggatctggagcagcaggcagtagaatttatgtccaccagtgctgtggcttccaggtctcaaaggcagaagaacctgagctggctggaggagaaagagaaggaagttgtcagtgccctgcgctactttaagaccattgtggacaaaatggcaattgataagaaggtactggagatgcttccagggtcagccagcaaggtgctggaggccatcttacccctggtgcagaacgatcctcgaattcagcacagctcagccctctcttcctgctatagccgagtgtaccaaagcctcgccaacctcattcgctggtctgaccaagtgatgctggaaggcgtgaactcagaagacaaggagatggtgacgactgtgaagggggtcatcaaggctgtgctggatggagtgaaggagctggtcaggctcaccatcgagaagcagggacgtccgtctccgacgagccccgtgaagcccagttcccctgccagcaagcctgatggcccagcagagctccccctgacagaccgcgaggtagagatcctaaacaagacgactgggatgtcacagtcaactgagctcctcccagatgccacggatgaagaggtcgcgccccccaagcctcctctgcctggcattcgggtggttgataatagtcctccaccagcattgccacccaagaaaagacagtcggcgccgtcccctacccgagtggctgtggtggcccccatgagccgagccaccagtggctccagtttgcctgttggaatcaataggcaggattttgatgttgactgttacgcacagaggcgactgtcaggaggcagccactcatatggtggagagtcgccccgcctctccccctgcagcagcataggcaagctcagcaagtcagacgagcagctgtcctctctggacagggacagtgggcagtgctcccggaacacaagctgtgaaacactagaccactatgatcccgactatgaattcctccagcaagacctctctaacgcagaccagatacctcagcagacggcctggaaccttagcccgttgccagagtctttgggggagtctgggtctccatttcttggccctcctttccagctgcctcttggcggccatccccagccagacggacctctggccccagggcagcagacagatacgccacctgctctccccgagaagaagcgcaggagcgcagcctcccagacggcggacggctctggctgcagggtgtcctacgagcggcatccctcgcagtatgacaacatctctggggaggacctgcagagcacagccccgatcccatccgtcccctacgcgccctttgctgctattctgccctttcagcatggaggttcctcagcccctgtcgaatttgtgggtgattttactgctcctgagtcaaccggtgacccagaaaaaccacctcctctaccagagaagaaaaacaaacacatgctggcctacatgcagttgctggaggactactcggagccgcagccctctatgttctaccagacgccacagaacgagcacatctaccagcagaagaacaagctcctcatggaggtatacggcttcagcgactccttcagtggggtggactccgtgcaggagctggccccgccgcccgccctaccccccaagcagcggcagctggagccaccggctgggaaagacggacatcccagagatccctcagcggtcagcggcgtccctgggaaggacagcagagacggcagtgagagggccccaaagtcaccagatgctctggagtcggctcagtcggaggaggaagtggacgagctgtccctcattgaccacaacgaaattatgtccaggctgacgctcaagcaggagggtgatgacgggccggacgtccgcggaggatctggggacatcttactggtccatgctactgagactgacaggaaagatttggtgttgtactgcgaggcattcctgaccacctacaggaccttcatctccccagaggagctcatcaagaagctgcagtacagatatgagaaattctctccctttgccgacacattcaagaagcgcgtcagcaagaacacgttcttcgtgctggtacgggtggtggatgagctctgcctggtggagttgacagaagagatcctgaagctgctgatggaactggtcttccgcctggtgtgcaatggggagctgagcctggcccgtgtgctccggaagaacatcctggacaaggtggaccagaagaagctactcaggtgtgccacctccagccagcccctggcagcccggggggtagcagccaggccggggaccttgcacgactttcacagccatgagatagcggagcagctaacgctgctggatgctgagctcttctataaaatagagattcctgaggttttgctttgggcaaaagagcagaatgaggagaagagccccaacttgacccagttcacggagcacttcaacaacatgtcctactgggtccggtccataatcatgttacaggaaaaggcccaggacagggaacggctgctcttgaagttcatcaagatcatgaagcacttgcggaagctgaataacttcaactcctacttggccatcctctctgccctggactcggcgcccatccgcaggctggagtggcagaagcagacttcagagggcctggccgagtactgcacactgatcgacagctcgtcctccttccgagcctaccgggccgccctctcggaggtggaaccgccgtgcatcccgtacctggggctgatcctgcaggacctgaccttcgttcacctgggaaacccagactacatcgacgggaaagtgaacttctccaagcggtggcagcagttcaacatcctcgacagcatgcgctgcttccagcaggcgcactatgacatgcggaggaacgacgacattataaacttcttcaatgacttcagtgaccacctggctgaggaggccctatgggaactgtctctgaaaattaaacccaggaacataacaaggagaaaaacagaccgggaagagaagacctaggagcagacgccgggatccaggagaatgctcgaggggcgcagagggcagctcccagaccggagaggaccttggacctgttaggcgcatggcaggagtcccggcctcggagccatgaggctggccagccctcagcggggccgggcgggagctggagcctgccagccgcttcctgcctccttcctctgtgggagcagacccgtgggcctcagggcagccagcaggcaggtcttgttgccaatttacaaaccggtggttttctggtttggttttgttttctgcttttacttccatctctcccctcttgaccttccacccactcccctccagggagagagcagcagagacctcatcagcagaccaaggaagtggtgggtgctccccctccctaagctccagggtccctgaatcttctgaaatctcaaatgagtggaggcctcctggggtggcctgtcctgcaggggccctggaatgggggcaagcagctgggtgggcagaatgcagagtagactcgggggaggatcctttcactttccgcttccccttctgatgcatggaggatggtgtgagcttttcagcaggcccggaaaggtacgcaggtgacgccttagcagccccgcagctggtgctctgccccgcggtactggcgccatcagggcctcccttgcccgcctgagagcagcagcagtctctgtcatcccgtcgccccttaccccccaccccaggccactgggcccctcccacaccacctggggagctgagaagaggaggctggagtaagggaggacttgatcatccaagaaatactttttattgctgggagtcttctgaacctcaccaaactgaggccagagctgagctcctgggggagttaattcagaggggagaggccagcacctccctcctccatcgctcgctgtgtgccttaaactccatctcatgtccctccccatcccctggctttccctccctccttgccccatcctgggccagccagcagggctcctcctctggctcttcagacctttcagccagtgctgtcagtgcccctgggagggaagggcatccctgaggcacccgaatggtccctcagggtgcagggaggcagaagcctggccacagaggagcctcctaaggcagcagctgcagcaagcgcaccctctccccactctccccacgccagagcggcttccagagcagatgctgtttccatcctcctcgtcaaaaccattctcgctgctgagcttgacaatctgggcaaggcttgtggggcgcttgacaaacagaatctgccctgtgccgcctggttccgtggcctccagcatgagcctgcaggcagggcgctgcgggaacccagttgtgctgccccagcccatgcctccgggtctgctgtgcatgaatgagtgctcacttgtcccgggtttaggacgtggtcaagtgaacagcagggtctaactgtgcttacttagcccagttcaaacagaacaaaggaaaaatatagaaagcaacatctgttgatcatttaggtttttttttaaaccaccatgtcactttgagtccttcatgggtttttgaacagcatttatcaagaagaaaatgtgggctttttcccctctcccgtgttttgtttgtcctgtagatagagggaggaaagccgtgcagtggcaggcgggaccccctctggtggcgggaccccctcttgcggtggtcttgcggggccagccgggacctgtcactttattatttaaggagtgtgtgtgtagagtcgctggcttattaacagtattgtgtgtgggttgggtttttagtttgttccttctttttgaagtcccttcatttcaatccttgactctctctccccttcccttgcccagctctgttgaatgctgctgtgcgcgtgtgagggccgctctgcacacagggcccttgggttgtgtgaactgaaattctccctgtatttgtgagactcgcaggagtccccatctgtagcacaggcaatgccagtgccatgctgcagcctcagaaaccaggcctctcactccagcagcaggcagaaccgtgtctgtggtcgggtgctgtccacagctctgtctgccttgttcttgggcttgagctggatagaggtggggtctcttcaccttccctgaattcagaacagaccctgtgcctggccccagtgtgcccaggcaattccccaggccctcactgggagcccttggtgttctgagcagcagggcccaggcagcacatgagcagtgcccaggggctccctgcgtgaggacggcaaggtgcgatgtatgtctaacttattgatggcaggcagccccctgtgccccctaagcctggccctggttattgctgagctctgtgctcagtgctgcggcctggccgtggctcgtctgttcctttggggggcccgggcgggttgtgggaatcagtcttcacagacagacgtgagccaggcggaggactcgttccttgcagaggtcagtcctcacctgcaggtgtcggggtgtgggggggcaaggaggggcaggcacacaccatgtctgacctgaacccgattctggggagcatcttcccgctccggccccacgacctccacagggttacattgtaatatatatgccccagctaacctgtctgatggtggcatcttcctgcagacatttcaaacatgtaacttttatatgaaaaaaaataaacacagatgaaagctgcc

SEQ ID NO: 115583 - DNA, 6256 bp, Artificial Sequence
  derived and/or modified sequence
cgctgcgctgcggccggctcgcgggccgggggagcggcggcgggcgcgcgggaggcggagcggcggcggcgggcgcggcgggagcggctgggcccgggcgggctggagcgcggtcgccgagcgcagggccgcggccgcgcggagcccgccatgccggcgcgggtctgaggcgtggcgagccagggccgaggcgagcggcgggcgcgccgcccctgtcgccccgcggcggcccggcccgggcccgatgagcggcggcctcggcctccggcgcagcccggaaatgtccggcaagatcgagaaagcagactctcagcgttctcatctctcttccttcaccatgaagctgatggacaaattccactcacccaaaatcaagagaacgccatcaaagaagggaaaaccagctgaggtgtccgtaaagattccagagaagcctgtgaacaaagaggcaacagacagatttctaccagagggctaccctctccccttggatctggagcagcaggcagtagaatttatgtccaccagtgctgtggcttccaggtctcaaaggcagaagaacctgagctggctggaggagaaagagaaggaagttgtcagtgccctgcgctactttaagaccattgtggacaaaatggcaattgataagaaggtactggagatgcttccagggtcagccagcaaggtgctggaggccatcttacccctggtgcagaacgatcctcgaattcagcacagctcagccctctcttcctgctatagccgagtgtaccaaagcctcgccaacctcattcgctggtctgaccaagtgatgctggaaggcgtgaactcagaagacaaggagatggtgacgactgtgaagggggtcatcaaggctgtgctggatggagtgaaggagctggtcaggctcaccatcgagaagcagggacgtccgtctccgacgagccccgtgaagcccagttcccctgccagcaagcctgatggcccagcagagctccccctgacagaccgcgaggtagagatcctaaacaagacgactgggatgtcacagtcaactgagctcctcccagatgccacggatgaagaggtcgcgccccccaagcctcctctgcctggcattcgggtggttgataatagtcctccaccagcattgccacccaagaaaagacagtcggcgccgtcccctacccgagtggctgtggtggcccccatgagccgagccaccagtggctccagtttgcctgttggaatcaataggcaggattttgatgttgactgttacgcacagaggcgactgtcaggaggcagccactcatatggtggagagtcgccccgcctctccccctgcagcagcataggcaagctcagcaagtcagacgagcagctgtcctctctggacagggacagtgggcagtgctcccggaacacaagctgtgaaacactagaccactatgatcccgactatgaattcctccagcaagacctctctaacgcagaccagatacctcagcagacggcctggaaccttagcccgttgccagagtctttgggggagtctgggtctccatttcttggccctcctttccagctgcctcttggcggccatccccagccagacggacctctggccccagggcagcagacagatacgccacctgctctccccgagaagaagcgcaggagcgcagcctcccagacggcggacggctctggctgcagggtgtcctacgagcggcatccctcgcagtatgacaacatctctggggaggacctgcagagcacagccccgatcccatccgtcccctacgcgccctttgctgctattctgccctttcagcatggaggttcctcagcccctgtcgaatttgtgggtgattttactgctcctgagtcaaccggtgacccagaaaaaccacctcctctaccagagaagaaaaacaaacacatgctggcctacatgcagttgctggaggactactcggagccgcagccctctatgttctaccagacgccacagaacgagcacatctaccagcagaagaacaagctcctcatggaggtatacggcttcagcgactccttcagtggggtggactccgtgcaggagctggccccgccgcccgccctaccccccaagcagcggcagctggagccaccggctgggaaagacggacatcccagagatccctcagcggtcagcggcgtccctgggaaggacagcagagacggcagtgagagggccccaaagtcaccagatgctctggagtcggctcagtcggaggaggaagtggacgagctgtccctcattgaccacaacgaaattatgtccaggctgacgctcaagcaggagggtgatgacgggccggacgtccgcggaggatctggggacatcttactggtccatgctactgagactgacaggaaagatttggtgttgtactgcgaggcattcctgaccacctacaggaccttcatctccccagaggagctcatcaagaagctgcagtacagatatgagaaattctctccctttgccgacacattcaagaagcgcgtcagcaagaacacgttcttcgtgctggtacgggtggtggatgagctctgcctggtggagttgacagaagagatcctgaagctgctgatggaactggtcttccgcctggtgtgcaatggggagctgagcctggcccgtgtgctccggaagaacatcctggacaaggtggaccagaagaagctactcaggtgtgccacctccagccagcccctggcagcccggggggtagcagccaggccggggaccttgcacgactttcacagccatgagatagcggagcagctaacgctgctggatgctgagctcttctataaaatagagattcctgaggttttgctttgggcaaaagagcagaatgaggagaagagccccaacttgacccagttcacggagcacttcaacaacatgtcctactgggtccggtccataatcatgttacaggaaaaggcccaggacagggaacggctgctcttgaagttcatcaagatcatgaagcacttgcggaagctgaataacttcaactcctacttggccatcctctctgccctggactcggcgcccatccgcaggctggagtggcagaagcagacttcagagggcctggccgagtactgcacactgatcgacagctcgtcctccttccgagcctaccgggccgccctctcggaggtggaaccgccgtgcatcccgtacctggggctgatcctgcaggacctgaccttcgttcacctgggaaacccagactacatcgacgggaaagtgaacttctccaagcggtggcagcagttcaacatcctcgacagcatgcgctgcttccagcaggcgcactatgacatgcggaggaacgacgacattataaacttcttcaatgacttcagtgaccacctggctgaggaggccctatgggaactgtctctgaaaattaaacccaggaacataacaaggagaaaaacagaccgggaagagaagacctaggagcagacgccgggatccaggagaatgctcgaggggcgcagagggcagctcccagaccggagaggaccttggacctgttaggcgcatggcaggagtcccggcctcggagccatgaggctggccagccctcagcggggccgggcgggagctggagcctgccagccgcttcctgcctccttcctctgtgggagcagacccgtgggcctcagggcagccagcaggcaggtcttgttgccaatttacaaaccggtggttttctggtttggttttgttttctgcttttacttccatctctcccctcttgaccttccacccactcccctccagggagagagcagcagagacctcatcagcagaccaaggaagtggtgggtgctccccctccctaagctccagggtccctgaatcttctgaaatctcaaatgagtggaggcctcctggggtggcctgtcctgcaggggccctggaatgggggcaagcagctgggtgggcagaatgcagagtagactcgggggaggatcctttcactttccgcttccccttctgatgcatggaggatggtgtgagcttttcagcaggcccggaaaggtacgcaggtgacgccttagcagccccgcagctggtgctctgccccgcggtactggcgccatcagggcctcccttgcccgcctgagagcagcagcagtctctgtcatcccgtcgccccttaccccccaccccaggccactgggcccctcccacaccacctggggagctgagaagaggaggctggagtaagggaggacttgatcatccaagaaatactttttattgctgggagtcttctgaacctcaccaaactgaggccagagctgagctcctgggggagttaattcagaggggagaggccagcacctccctcctccatcgctcgctgtgtgccttaaactccatctcatgtccctccccatcccctggctttccctccctccttgccccatcctgggccagccagcagggctcctcctctggctcttcagacctttcagccagtgctgtcagtgcccctgggagggaagggcatccctgaggcacccgaatggtccctcagggtgcagggaggcagaagcctggccacagaggagcctcctaaggcagcagctgcagcaagcgcaccctctccccactctccccacgccagagcggcttccagagcagatgctgtttccatcctcctcgtcaaaaccattctcgctgctgagcttgacaatctgggcaaggcttgtggggcgcttgacaaacagaatctgccctgtgccgcctggttccgtggcctccagcatgagcctgcaggcagggcgctgcgggaacccagttgtgctgccccagcccatgcctccgggtctgctgtgcatgaatgagtgctcacttgtcccgggtttaggacgtggtcaagtgaacagcagggtctaactgtgcttacttagcccagttcaaacagaacaaaggaaaaatatagaaagcaacatctgttgatcatttaggtttttttttaaaccaccatgtcactttgagtccttcatgggtttttgaacagcatttatcaagaagaaaatgtgggctttttcccctctcccgtgttttgtttgtcctgtagatagagggaggaaagccgtgcagtggcaggcgggaccccctctggtggcgggaccccctcttgcggtggtcttgcggggccagccgggacctgtcactttattatttaaggagtgtgtgtgtagagtcgctggcttattaacagtattgtgtgtgggttgggtttttagtttgttccttctttttgaagtcccttcatttcaatccttgactctctctccccttcccttgcccagctctgttgaatgctgctgtgcgcgtgtgagggccgctctgcacacagggcccttgggttgtgtgaactgaaattctccctgtatttgtgagactcgcaggagtccccatctgtagcacaggcaatgccagtgccatgctgcagcctcagaaaccaggcctctcactccagcagcaggcagaaccgtgtctgtggtcgggtgctgtccacagctctgtctgccttgttcttgggcttgagctggatagaggtggggtctcttcaccttccctgaattcagaacagaccctgtgcctggccccagtgtgcccaggcaattccccaggccctcactgggagcccttggtgttctgagcagcagggcccaggcagcacatgagcagtgcccaggggctccctgcgtgaggacggcaaggtgcgatgtatgtctaacttattgatggcaggcagccccctgtgccccctaagcctggccctggttattgctgagctctgtgctcagtgctgcggcctggccgtggctcgtctgttcctttggggggcccgggcgggttgtgggaatcagtcttcacagacagacgtgagccaggcggaggactcgttccttgcagaggtcagtcctcacctgcaggtgtcggggtgtgggggggcaaggaggggcaggcacacaccatgtctgacctgaacccgattctggggagcatcttcccgctccggccccacgacctccacagggttacattgtaatatatatgccccagctaacctgtctgatggtggcatcttcctgcagacatttcaaacatgtaacttttatatgaaaaaaaataaacacagatgaaagctgcccaatgcca

SEQ ID NO: 115584 - protein, 1406 aa, Artificial Sequence
  derived and/or modified sequence
MDMVENADSLQAQERKDILMKYDKGHRAGLPEDKGPEPVGINSSIDRFGILHETELPPVTAREAKKIRREMTRTSKWMEMLGEWETYKHSSKLIDRVYKGIPMNIRGPVWSVLLNIQEIKLKNPGRYQIMKERGKRSSEHIHHIDLDVRTTLRNHVFFRDRYGAKQRELFYILLAYSEYNPEVGYCRDLSHITALFLLYLPEEDAFWALVQLLASERHSLPGFHSPNGGTVQGLQDQQEHVVPKSQPKTMWHQDKEGLCGQCASLGCLLRNLIDGISLGLTLRLWDVYLVEGEQVLMPITSIALKVQQKRLMKTSRCGLWARLRNQFFDTWAMNDDTVLKHLRASTKKLTRKQGDLPPPAKREQGSLAPRPVPASRGGKTLCKGYRQAPPGPPAQFQRPICSASPPWASRFSTPCPGGAVREDTYPVGTQGVPSLALAQGGPQGSWRFLEWKSMPRLPTDLDIGGPWFPHYDFEWSCWVRAISQEDQLATCWQAEHCGEVHNKDMSWPEEMSFTANSSKIDRQKVPTEKGATGLSNLGNTCFMNSSIQCVSNTQPLTQYFISGRHLYELNRTNPIGMKGHMAKCYGDLVQELWSGTQKSVAPLKLRRTIAKYAPKFDGFQQQDSQELLAFLLDGLHEDLNRVHEKPYVELKDSDGRPDWEVAAEAWDNHLRRNRSIIVDLFHGQLRSQVKCKTCGHISVRFDPFNFLSLPLPMDSYMDLEITVIKLDGTTPVRYGLRLNMDEKYTGLKKQLRDLCGLNSEQILLAEVHDSNIKNFPQDNQKVQLSVSGFLCAFEIPVPSSPISASSPTQIDFSSSPSTNGMFTLTTNGDLPKPIFIPNGMPNTVVPCGTEKNFTNGMVNGHMPSLPDSPFTGYIIAVHRKMMRTELYFLSPQENRPSLFGMPLIVPCTVHTRKKDLYDAVWIQVSWLARPLPPQEASIHAQDRDNCMGYQYPFTLRVVQKDGNSCAWCPQYRFCRGCKIDCGEDRAFIGNAYIAVDWHPTALHLRYQTSQERVVDKHESVEQSRRAQAEPINLDSCLRAFTSEEELGESEMYYCSKCKTHCLATKKLDLWRLPPFLIIHLKRFQFVNDQWIKSQKIVRFLRESFDPSAFLVPRDPALCQHKPLTPQGDELSKPRILAREVKKVDAQSSAGKEDMLLSKSPSSLSANISSSPKGSPSSSRKSGTSCPSSKNSSPNSSPRTLGRSKGRLRLPQIGSKNKPSSSKKNLDASKENGAGQICELADALSRGHMRGGSQPELVTPQDHEVALANGFLYEHEACGNGCGDGYSNGQLGNHSEEDSTDDQREDTHIKPIYNLYAISCHSGILSGGHYITYAKNPNCKWYCYNDSSCEELHPDEIDTDSAYILFYEQQGIDYAQFLPKIDGKKMADTSSTDEDSESDYEKYSMLQ

SEQ ID NO: 115585 - DNA, 4221 bp, Artificial Sequence
  derived and/or modified sequence
atggacatggtggagaacgccgacagcctgcaggcccaggagagaaaggacatcctgatgaagtacgacaagggccacagagccggcctgcccgaggacaagggccccgagcccgtgggcatcaacagcagcatcgacagattcggcatcctgcacgagaccgagctgccccccgtgaccgccagagaggccaagaagatcagaagagagatgaccagaaccagcaagtggatggagatgctgggcgagtgggagacctacaagcacagcagcaagctgatcgacagagtgtacaagggcatccccatgaacatcagaggccccgtgtggagcgtgctgctgaacatccaggagatcaagctgaagaaccccggcagataccagatcatgaaggagagaggcaagagaagcagcgagcacatccaccacatcgacctggacgtgagaaccaccctgagaaaccacgtgttcttcagagacagatacggcgccaagcagagagagctgttctacatcctgctggcctacagcgagtacaaccccgaggtgggctactgcagagacctgagccacatcaccgccctgttcctgctgtacctgcccgaggaggacgccttctgggccctggtgcagctgctggccagcgagagacacagcctgcccggcttccacagccccaacggcggcaccgtgcagggcctgcaggaccagcaggagcacgtggtgcccaagagccagcccaagaccatgtggcaccaggacaaggagggcctgtgcggccagtgcgccagcctgggctgcctgctgagaaacctgatcgacggcatcagcctgggcctgaccctgagactgtgggacgtgtacctggtggagggcgagcaggtgctgatgcccatcaccagcatcgccctgaaggtgcagcagaagagactgatgaagaccagcagatgcggcctgtgggccagactgagaaaccagttcttcgacacctgggccatgaacgacgacaccgtgctgaagcacctgagagccagcaccaagaagctgaccagaaagcagggcgacctgcccccccccgccaagagagagcagggcagcctggcccccagacccgtgcccgccagcagaggcggcaagaccctgtgcaagggctacagacaggccccccccggcccccccgcccagttccagagacccatctgcagcgccagccccccctgggccagcagattcagcaccccctgccccggcggcgccgtgagagaggacacctaccccgtgggcacccagggcgtgcccagcctggccctggcccagggcggcccccagggcagctggagattcctggagtggaagagcatgcccagactgcccaccgacctggacatcggcggcccctggttcccccactacgacttcgagtggagctgctgggtgagagccatcagccaggaggaccagctggccacctgctggcaggccgagcactgcggcgaggtgcacaacaaggacatgagctggcccgaggagatgagcttcaccgccaacagcagcaagatcgacagacagaaggtgcccaccgagaagggcgccaccggcctgagcaacctgggcaacacctgcttcatgaacagcagcatccagtgcgtgagcaacacccagcccctgacccagtacttcatcagcggcagacacctgtacgagctgaacagaaccaaccccatcggcatgaagggccacatggccaagtgctacggcgacctggtgcaggagctgtggagcggcacccagaagagcgtggcccccctgaagctgagaagaaccatcgccaagtacgcccccaagttcgacggcttccagcagcaggacagccaggagctgctggccttcctgctggacggcctgcacgaggacctgaacagagtgcacgagaagccctacgtggagctgaaggacagcgacggcagacccgactgggaggtggccgccgaggcctgggacaaccacctgagaagaaacagaagcatcatcgtggacctgttccacggccagctgagaagccaggtgaagtgcaagacctgcggccacatcagcgtgagattcgaccccttcaacttcctgagcctgcccctgcccatggacagctacatggacctggagatcaccgtgatcaagctggacggcaccacccccgtgagatacggcctgagactgaacatggacgagaagtacaccggcctgaagaagcagctgagagacctgtgcggcctgaacagcgagcagatcctgctggccgaggtgcacgacagcaacatcaagaacttcccccaggacaaccagaaggtgcagctgagcgtgagcggcttcctgtgcgccttcgagatccccgtgcccagcagccccatcagcgccagcagccccacccagatcgacttcagcagcagccccagcaccaacggcatgttcaccctgaccaccaacggcgacctgcccaagcccatcttcatccccaacggcatgcccaacaccgtggtgccctgcggcaccgagaagaacttcaccaacggcatggtgaacggccacatgcccagcctgcccgacagccccttcaccggctacatcatcgccgtgcacagaaagatgatgagaaccgagctgtacttcctgagcccccaggagaacagacccagcctgttcggcatgcccctgatcgtgccctgcaccgtgcacaccagaaagaaggacctgtacgacgccgtgtggatccaggtgagctggctggccagacccctgcccccccaggaggccagcatccacgcccaggacagagacaactgcatgggctaccagtaccccttcaccctgagagtggtgcagaaggacggcaacagctgcgcctggtgcccccagtacagattctgcagaggctgcaagatcgactgcggcgaggacagagccttcatcggcaacgcctacatcgccgtggactggcaccccaccgccctgcacctgagataccagaccagccaggagagagtggtggacaagcacgagagcgtggagcagagcagaagagcccaggccgagcccatcaacctggacagctgcctgagagccttcaccagcgaggaggagctgggcgagagcgagatgtactactgcagcaagtgcaagacccactgcctggccaccaagaagctggacctgtggagactgccccccttcctgatcatccacctgaagagattccagttcgtgaacgaccagtggatcaagagccagaagatcgtgagattcctgagagagagcttcgaccccagcgccttcctggtgcccagagaccccgccctgtgccagcacaagcccctgaccccccagggcgacgagctgagcaagcccagaatcctggccagagaggtgaagaaggtggacgcccagagcagcgccggcaaggaggacatgctgctgagcaagagccccagcagcctgagcgccaacatcagcagcagccccaagggcagccccagcagcagcagaaagagcggcaccagctgccccagcagcaagaacagcagccccaacagcagccccagaaccctgggcagaagcaagggcagactgagactgccccagatcggcagcaagaacaagcccagcagcagcaagaagaacctggacgccagcaaggagaacggcgccggccagatctgcgagctggccgacgccctgagcagaggccacatgagaggcggcagccagcccgagctggtgaccccccaggaccacgaggtggccctggccaacggcttcctgtacgagcacgaggcctgcggcaacggctgcggcgacggctacagcaacggccagctgggcaaccacagcgaggaggacagcaccgacgaccagagagaggacacccacatcaagcccatctacaacctgtacgccatcagctgccacagcggcatcctgagcggcggccactacatcacctacgccaagaaccccaactgcaagtggtactgctacaacgacagcagctgcgaggagctgcaccccgacgagatcgacaccgacagcgcctacatcctgttctacgagcagcagggcatcgactacgcccagttcctgcccaagatcgacggcaagaagatggccgacaccagcagcaccgacgaggacagcgagagcgactacgagaagtacagcatgctgcagtag

SEQ ID NO: 115586 - DNA, 3270 bp, Artificial Sequence
  derived and/or modified sequence
atgccccagagactgccccacgccagacagcacacccccctgcccctgggcagcgccgactacagaagagtggtgagcgtgagaccccagggcccccacagagaccccaaggacagcagagacgccgccaagagagagcagggcagcctggcccccagacccgtgcccgccagcagaggcggcaagaccctgtgcaagggctacagacaggccccccccggcccccccgcccagttccagagacccatctgcagcgccagccccccctgggccagcagattcagcaccccctgccccggcggcgccgtgagagaggacacctaccccgtgggcacccagggcgtgcccagcctggccctggcccagggcggcccccagggcagctggagattcctggagtggaagagcatgcccagactgcccaccgacctggacatcggcggcccctggttcccccactacgacttcgagtggagctgctgggtgagagccatcagccaggaggaccagctggccacctgctggcaggccgagcactgcggcgaggtgcacaacaaggacatgagctggcccgaggagatgagcttcaccgccaacagcagcaagatcgacagacagaaggtgcccaccgagaagggcgccaccggcctgagcaacctgggcaacacctgcttcatgaacagcagcatccagtgcgtgagcaacacccagcccctgacccagtacttcatcagcggcagacacctgtacgagctgaacagaaccaaccccatcggcatgaagggccacatggccaagtgctacggcgacctggtgcaggagctgtggagcggcacccagaagagcgtggcccccctgaagctgagaagaaccatcgccaagtacgcccccaagttcgacggcttccagcagcaggacagccaggagctgctggccttcctgctggacggcctgcacgaggacctgaacagagtgcacgagaagccctacgtggagctgaaggacagcgacggcagacccgactgggaggtggccgccgaggcctgggacaaccacctgagaagaaacagaagcatcatcgtggacctgttccacggccagctgagaagccaggtgaagtgcaagacctgcggccacatcagcgtgagattcgaccccttcaacttcctgagcctgcccctgcccatggacagctacatggacctggagatcaccgtgatcaagctggacggcaccacccccgtgagatacggcctgagactgaacatggacgagaagtacaccggcctgaagaagcagctgagagacctgtgcggcctgaacagcgagcagatcctgctggccgaggtgcacgacagcaacatcaagaacttcccccaggacaaccagaaggtgcagctgagcgtgagcggcttcctgtgcgccttcgagatccccgtgcccagcagccccatcagcgccagcagccccacccagatcgacttcagcagcagccccagcaccaacggcatgttcaccctgaccaccaacggcgacctgcccaagcccatcttcatccccaacggcatgcccaacaccgtggtgccctgcggcaccgagaagaacttcaccaacggcatggtgaacggccacatgcccagcctgcccgacagccccttcaccggctacatcatcgccgtgcacagaaagatgatgagaaccgagctgtacttcctgagcccccaggagaacagacccagcctgttcggcatgcccctgatcgtgccctgcaccgtgcacaccagaaagaaggacctgtacgacgccgtgtggatccaggtgagctggctggccagacccctgcccccccaggaggccagcatccacgcccaggacagagacaactgcatgggctaccagtaccccttcaccctgagagtggtgcagaaggacggcaacagctgcgcctggtgcccccagtacagattctgcagaggctgcaagatcgactgcggcgaggacagagccttcatcggcaacgcctacatcgccgtggactggcaccccaccgccctgcacctgagataccagaccagccaggagagagtggtggacaagcacgagagcgtggagcagagcagaagagcccaggccgagcccatcaacctggacagctgcctgagagccttcaccagcgaggaggagctgggcgagagcgagatgtactactgcagcaagtgcaagacccactgcctggccaccaagaagctggacctgtggagactgccccccttcctgatcatccacctgaagagattccagttcgtgaacgaccagtggatcaagagccagaagatcgtgagattcctgagagagagcttcgaccccagcgccttcctggtgcccagagaccccgccctgtgccagcacaagcccctgaccccccagggcgacgagctgagcaagcccagaatcctggccagagaggtgaagaaggtggacgcccagagcagcgccggcaaggaggacatgctgctgagcaagagccccagcagcctgagcgccaacatcagcagcagccccaagggcagccccagcagcagcagaaagagcggcaccagctgccccagcagcaagaacagcagccccaacagcagccccagaaccctgggcagaagcaagggcagactgagactgccccagatcggcagcaagaacaagcccagcagcagcaagaagaacctggacgccagcaaggagaacggcgccggccagatctgcgagctggccgacgccctgagcagaggccacatgagaggcggcagccagcccgagctggtgaccccccaggaccacgaggtggccctggccaacggcttcctgtacgagcacgaggcctgcggcaacggctgcggcgacggctacagcaacggccagctgggcaaccacagcgaggaggacagcaccgacgaccagagagaggacacccacatcaagcccatctacaacctgtacgccatcagctgccacagcggcatcctgagcggcggccactacatcacctacgccaagaaccccaactgcaagtggtactgctacaacgacagcagctgcgaggagctgcaccccgacgagatcgacaccgacagcgcctacatcctgttctacgagcagcagggcatcgactacgcccagttcctgcccaagatcgacggcaagaagatggccgacaccagcagcaccgacgaggacagcgagagcgactacgagaagtacagcatgctgcagtag

SEQ ID NO: 115587 - DNA, 84 bp, Artificial Sequence
  derived and/or modified sequence
atggacatggtggagaacgccgacagcctgcaggcccaggagagaaaggacatcctgatgaagtacgacaagggccacagatag

SEQ ID NO: 115588 - DNA, 4221 bp, Artificial Sequence
  derived and/or modified sequence
atggatatggtggaaaacgcagacagcttacaggcacaagagagaaaggacatactgatgaagtatgacaaggggcaccgggcaggactgcctgaggacaaagggcctgaaccagtcggcattaacagttcgatcgataggttcggcattctgcacgaaacggagttaccaccagttaccgctcgggaagccaaaaaaatcaggcgcgagatgacaaggacatctaaatggatggaaatgttgggggaatgggaaacctacaaacattcctctaaacttatagacagggtttacaagggaattccaatgaatattcgggggcctgtgtggagtgttctactcaacattcaggaaattaaactcaagaacccgggacgataccagattatgaaagaaaggggtaagcgctcatccgaacatattcaccacatagaccttgacgtgcggacgaccctgcgcaaccatgtgttcttccgcgatcggtacggagccaagcagcgcgagctgttctatatactcttggcctactccgaatacaatcctgaggtcggttactgccgcgacctaagccatatcaccgcgctcttcctcctgtacctgccagaggaggatgccttctgggcactagtgcagctcctcgcatcagaaagacattcactccctggcttccactctcccaatggcgggaccgtgcagggactccaggaccagcaggagcatgtcgtgcctaaatcccagcccaaaacaatgtggcatcaggataaagaaggattgtgcggccagtgtgcctccttggggtgcttacttagaaacctcattgatggtatctctctgggactgacgctgagattgtgggacgtttacctggtcgagggagaacaggttctgatgcctataactagtatcgccctgaaggtgcagcagaagagactgatgaagacctcacgatgtggattgtgggcacggctacgcaaccagttttttgatacctgggccatgaacgacgatactgttctgaagcacttgagggcctcgacaaagaagctcacacgtaaacagggcgacttgcctccccctgccaaacgggaacaagggtccctggctccccgacccgtgcccgcctcccggggggggaagaccctgtgcaaaggctaccgccaagccccccccggaccgccagctcagtttcagagacccatatgttcagcttccccaccctgggcttcacgtttcagtactccgtgtccaggaggcgcagtgcgtgaggatacttacccggtgggcacccagggagtcccttctctggcattggcccagggtgggccccagggttcttggaggttccttgaatggaagtctatgcctcgcctgcccaccgatttggatatcggcggcccctggtttccacactacgacttcgaatggtcgtgttgggttcgcgccatttctcaggaggaccaactcgccacttgctggcaggctgagcactgcggggaggtgcataacaaagacatgagctggcccgaagagatgagtttcaccgcaaacagcagcaaaattgataggcagaaggttcccactgaaaagggcgccaccgggctgtcgaatctagggaacacatgtttcatgaatagtagtatccagtgtgtatctaatacacaacctctgacacagtacttcataagcggccgacacttgtacgagcttaatcggacaaacccaattgggatgaaggggcacatggcaaagtgctacggggatctcgttcaggagttgtggtctggcacccaaaagtcggtggcccccctgaagctgcgcagaaccatcgccaaatacgccccgaaattcgacggttttcaacagcaggacagccaggagctgctggccttcctgctggacgggctgcatgaagaccttaatagggtccacgagaagccgtacgtagaattgaaggatagtgatggtcggcccgattgggaggtcgcggccgaggcctgggacaaccatttgcggcgtaaccggagcattattgttgatctattccacggacagctaagatctcaggtgaagtgtaaaacctgcgggcacatttccgtgcgcttcgacccatttaatttcttatccttaccactccccatggacagctacatggatctggagatcacggttattaagctggacggcactacaccggtgagatatgggcttcgcctgaacatggatgaaaagtataccggactcaagaaacagctgcgtgacctttgtggcctgaattccgagcagatcttactggctgaggtccatgatagcaatattaagaatttcccacaagataaccagaaggtacaactgtccgtgagcgggttcctttgtgccttcgaaatcccagtgcccagctcccccatctcagcttcttctccgactcagattgacttttcttctagccctagtactaacggcatgtttacgttgaccaccaacggcgacctgcccaagcccatcttcattcctaacggcatgccaaatactgtggttccttgtggcaccgaaaaaaactttactaatgggatggtaaatggacacatgcctagtctcccagacagtcccttcacaggctacatcattgccgtgcacaggaaaatgatgagaactgaattatatttcctctcgccccaagaaaaccgacccagtctattcggaatgcccctgattgtgccatgcaccgtccacaccaggaagaaagatctgtatgatgccgtttggattcaggtttcttggctggcccgcccacttccgccccaggaagcctcaattcatgcccaggaccgagataattgcatgggataccagtaccccttcactctgcgagtggtgcagaaagacggcaactcatgtgcatggtgcccgcagtatcggttctgccgaggttgcaagattgattgcggggaagatagagccttcataggaaacgcctacatcgcggtggattggcatccaaccgctctccacctccggtatcagacatcccaggaacgggtcgtggacaaacatgaaagcgtggagcagtcgcgcagggctcaagctgaaccaatcaatctagactcgtgtctgcgggctttcacatcagaagaggaactgggtgaatccgaaatgtactactgcagcaaatgtaagactcactgcctcgcaactaaaaagctggacttgtggcgattacccccatttttaatcatccatctcaaaagattccagttcgtaaatgaccagtggattaaaagtcagaaaattgtcaggttcctgagggagagcttcgacccttccgcctttctggtgccaagggaccccgccctctgccagcacaagcccttaactccacagggggacgagctgtccaagccaaggatattagctcgggaagtgaaaaaggttgatgcgcaatcatccgcaggaaaggaggatatgctgttgagcaagtctccatcatcattaagcgctaatatctcaagtagccctaaggggagcccctctagctctcgaaaatcggggacctcatgcccatcctccaaaaattcctcccctaattcttcaccccggacgttaggccggtctaagggtaggctgcgactgcctcagatcgggtccaaaaacaaaccgtctagcagcaaaaaaaacttagatgccagcaaagagaatggtgcggggcagatctgcgagctagccgatgccttaagccgcgggcacatgcgaggagggtcacagcccgagttggttacacctcaagaccatgaagtcgctcttgccaacggttttctgtatgagcatgaggcatgcgggaatggctgtggtgacggttactccaatggtcaactcggaaaccactcagaggaggattctactgatgaccaacgcgaggatacgcacatcaaacctatttataatctgtacgcaataagctgtcactctggcattctgagcggcggccattatataacttatgccaagaaccccaactgcaaatggtattgctataacgacagcagttgcgaagagctacatcccgacgaaatcgataccgattccgcctacattttgttctacgagcagcagggcatcgactacgcccagtttctcccaaagatcgatggtaagaaaatggcagacacatcctcgaccgacgaggacagtgaaagtgactacgagaaatactcaatgttgcagtag

SEQ ID NO: 115589 - DNA, 3270 bp, Artificial Sequence
  derived and/or modified sequence
atgcctcagagactgcctcacgcacgccaacacactcccttgcccttgggaagcgctgactataggcgggttgtatccgtccgcccccaaggaccacaccgcgatcctaaggactctagggatgccgctaaacgcgagcaggggagcctcgccccccggccggtgcctgcttcacgtggggggaagacactgtgtaaaggatatcgccaagctccccctggcccaccagcacaattccaacgcccaatttgctctgccagtcccccctgggcttctcgcttctctaccccctgccctggaggagctgtgagggaagacacctatccagtgggtacacagggcgtgccgtcgctggctctggcccaaggtggaccccagggctcctggcgtttcttggaatggaaatccatgcccagactgccaacagaccttgatataggggggccgtggtttcctcattatgacttcgagtggtcctgttgggtgcgagctatcagccaggaagaccaactcgctacttgctggcaagccgagcactgcggggaagttcacaacaaagacatgtcttggcccgaggagatgagcttcaccgccaacagttccaaaattgatagacagaaggttccaaccgagaagggggcgacaggactatccaacctaggaaatacttgttttatgaactcttctatccagtgcgtgtccaatacacaacctctgacccaatactttatctccggtcgacatctttacgaattgaacaggactaaccccatagggatgaagggccatatggcgaaatgttatggggacctcgtccaggaactgtggtcaggaacacagaaaagcgttgcgcctctgaagctgagacgcaccatcgctaagtacgcccctaaatttgatgggttccaacagcaagacagccaggagctgctcgcattcctcctagatggtcttcatgaggatctgaatagagtgcacgagaaaccttacgttgagctcaaggatagtgatggtcgtccagattgggaagttgcggctgaggcctgggacaatcatctccggagaaaccggtccatcatcgtcgatctgtttcacggccagctccgctcgcaggttaagtgtaagacttgcggccacatttctgtcagattcgatcccttcaatttcctctctcttcctcttccaatggattcatacatggatctcgaaatcaccgtgattaagttggatggaaccacgccagtgcgctatgggctccggttgaacatggacgagaaatacacaggcctcaaaaagcaattgcgagatctttgcggtcttaattcagagcagatcttgctcgccgaagtgcacgatagcaacatcaagaattttccccaagataatcagaaagtccaattaagtgtgtcaggctttctttgtgccttcgagatacccgtgccttccagcccgatcagcgcaagctctccgacacaaattgattttagcagcagcccttccaccaacggtatgttcacattaaccactaatggagatctgcccaagcctatatttatcccaaacggaatgcccaatactgtcgtgccctgcggcacagagaagaattttacgaacggcatggtaaacggtcatatgccctctctgccagacagcccgtttaccgggtatataattgctgtgcaccggaagatgatgcggacagagctgtattttctgtccccccaagagaatcggccgtccctatttggaatgcccttgatcgtcccctgcacagtgcacacccggaagaaggatttatatgacgccgtgtggatccaggtatcttggctcgcgcgtccactgcctccccaggaagcaagcatccatgcccaggatagggataactgtatggggtatcagtacccttttacattgcgggtagtccaaaaagatggcaactcatgcgcatggtgtccccagtatagattctgtcgcgggtgtaagatagactgtggggaggaccgggcctttattggaaatgcgtatatcgcagtggattggcacccgacggcactgcaccttcgatatcaaacatcacaagagcgagttgtggacaaacatgaaagcgttgagcagtctcggcgagcccaggccgaacctattaacctggactcttgcctgcgtgccttcacaagcgaggaggagttaggcgaaagcgaaatgtactattgttctaagtgtaagacccattgcttggctaccaaaaaactggacttatggcgcttgcctccttttcttatcattcacctgaaaaggtttcagttcgtcaacgatcagtggatcaaatcgcagaagattgttcgcttcctgcgcgaatcctttgatccgtccgctttcctggtgcctcgagatcccgccctgtgtcagcataaaccactcaccccccagggcgatgaactaagcaagccccgtatactcgcccgcgaagtgaaaaaggtggatgcccagtcgtcagccggtaaggaagatatgctactgagcaagtcccctagtagcctatcagccaatatatcgagcagccccaagggctctcccagttcttcccgcaaatctggtacctcctgtccctcctccaaaaattcttctccgaatagctcgcccaggacccttgggcgtagcaaggggaggctgagactgccccagattggatccaagaacaaaccctctagcagcaaaaagaatttagacgcaagtaaagaaaacggagcaggacaaatttgcgaactggctgacgccctgagtagaggccacatgagaggaggcagccaacccgagctggtgacacctcaggatcacgaagttgccctcgccaatgggtttctctacgagcatgaggcctgcgggaatggctgtggggatggatactccaatggacagcttggtaaccactccgaggaagactctaccgatgaccaaagagaagatactcatattaaaccaatatataatctgtacgcgatctcgtgtcattcgggcatcctctctggcgggcactatatcacatacgccaagaaccccaattgcaagtggtactgctataacgattcgtcctgcgaggagctacacccagacgagatcgatacagattcggcgtacatcctgttctacgagcagcagggaattgattacgctcagtttcttccgaagatagatggaaaaaaaatggccgacacatcatccaccgatgaggactcggagtcggattacgagaaatatagtatgctgcagtag

SEQ ID NO: 115590 - DNA, 84 bp, Artificial Sequence
  derived and/or modified sequence
atggacatggttgaaaatgcagatagcctgcaagcacaggagcgcaaagatatcctgatgaaatacgataagggacatcggtag

SEQ ID NO: 115591 - DNA, 4221 bp, Artificial Sequence
  derived and/or modified sequence
atggacatggtggagaatgctgacagcctgcaggcccaggagaggaaggacatcctgatgaagtatgacaagggccaccgggccggcctgcctgaggacaagggccctgagcctgtgggcatcaacagcagcattgaccgcttcggcatcctgcacgagacagagctgccccctgtgacagcccgggaggccaagaagatccggcgggagatgaccaggaccagcaagtggatggagatgctgggggagtgggagacctacaagcacagcagcaagctgattgacagagtgtacaagggcatccccatgaacatccggggccctgtgtggagcgtgctgctgaacatccaggagatcaagctgaagaaccctggccgctaccagatcatgaaggagcggggcaagaggagcagcgagcacatccaccacatcgacctggatgtgaggaccaccctgagaaatcatgtgttcttccgggaccgctacggggccaagcagcgggagctgttctacatcctgctggcctacagcgagtacaaccctgaggtgggctactgccgggacctgagccacatcacagccctcttcctgctgtacctgcctgaagaagatgccttctgggccctggtgcagctgctggccagcgagcggcacagcctgcccggcttccacagccccaatggaggcaccgtgcagggcctgcaggaccagcaggagcacgtggtgcccaagagccagcccaagaccatgtggcaccaggacaaggagggcctgtgtggccagtgtgccagcctgggctgcctgctgaggaacctgattgatggcatcagcctgggcctgaccctgcggctgtgggatgtgtacctggtggagggggagcaggtgctgatgcccatcaccagcatcgccctgaaggtgcagcagaagaggctgatgaagaccagccgctgtggcctgtgggcccggctgaggaaccagttctttgacacctgggccatgaatgatgacacagtgctgaagcacctgcgggccagcaccaagaagctgaccaggaagcagggcgacctgcccccaccagccaagcgggagcagggcagcctggcccccaggcctgtgcctgccagcagaggaggcaagaccctgtgcaagggctaccggcaggcccctcctggccccccagcccagttccagaggcccatctgcagcgccagccccccctgggccagccgcttcagcaccccctgccctgggggcgctgtgcgggaggacacctaccctgtgggcacccagggcgtgcccagcctggccctggcccagggcggcccccagggctcctggaggttcctggagtggaagtccatgccccggctgcccacagacctggacattggaggcccctggttcccccactatgactttgagtggagctgctgggtgcgggccatcagccaggaggaccagctggccacctgctggcaggccgagcactgtggggaggtgcacaacaaggacatgtcctggccagaggagatgtccttcaccgccaacagcagcaagattgaccggcagaaggtgcccacagagaagggggccaccggcctgagcaacctgggcaacacctgcttcatgaacagcagcatccagtgtgtgagcaacacccagcccctgacccagtacttcatcagcggccgccacctgtatgagctgaacagaaccaaccccatcggcatgaagggccacatggccaagtgctatggagacctggtgcaggagctgtggagcggcacccagaagtctgtggcccccctgaagctgcggaggaccatcgccaagtatgcccccaagtttgatggcttccagcagcaggacagccaggagctgctggccttcctgctggatggcctgcacgaggacctgaacagagtgcatgagaagccctacgtggagctgaaggacagtgatggccgcccagactgggaggtggccgctgaggcctgggacaaccacctgcggaggaacagaagcatcatcgtggacctcttccacggccagctgcggagccaggtgaagtgcaagacctgtggccacatctctgtgcgctttgaccccttcaacttcctgagcctgcccctgcccatggacagctacatggacctggagatcaccgtcatcaagctggatggcaccacccctgtgcgctatggcctgcggctgaacatggatgagaagtacacaggcctgaagaagcagctgcgggacctgtgtggcctgaacagcgagcagatcctgctggccgaggtgcatgacagcaacatcaagaacttcccccaggacaaccagaaggtgcagctgtctgtgtctggcttcctgtgtgcctttgagatccctgtgcccagcagccccatcagcgccagcagccccacccagattgacttcagcagcagccccagcaccaacggcatgttcaccctgaccaccaatggagacctgcccaagcccatcttcatccccaacggcatgcccaacacagtggtgccctgtggcacagagaagaacttcaccaacggcatggtgaatggccacatgcccagcctgcctgacagccccttcaccggctacatcatcgctgtgcacaggaagatgatgaggacagagctgtacttcctgagcccccaggagaaccggcccagcctgtttggcatgcccctcatcgtgccctgcaccgtgcacaccaggaagaaggacctgtatgatgctgtgtggatccaggtgtcctggctggcccggcccctgcccccccaggaggccagcatccacgcccaggaccgggacaactgcatgggctaccagtaccccttcaccctgcgggtggtgcagaaggatggcaacagctgtgcctggtgcccccagtaccgcttctgccggggctgcaagattgactgtggagaagatcgggccttcatcggaaatgcctacatcgctgtggactggcaccccacagccctgcacctgcgctaccagaccagccaggagcgggtggtggacaagcatgaatctgtggagcagagccggcgggcccaggccgagcccatcaacctggacagctgcctgcgggccttcaccagcgaggaggagctgggggagagcgagatgtactactgcagcaagtgcaagacccactgcctggccaccaagaagctggacctgtggaggctgccccccttcctgatcatccacctgaagcgcttccagtttgtgaatgaccagtggatcaagagccagaagatcgtgcgcttcctgcgggagagctttgaccccagcgccttcctggtgccccgggaccctgccctgtgccagcacaagcccctgaccccccagggagatgagctgagcaagccccgcatcctggcccgggaggtgaagaaggtggatgcccagagcagcgctgggaaggaggacatgctgctgagcaagagccccagcagcctgagcgccaacatcagcagcagccccaagggcagccccagcagcagcaggaagagcggcaccagctgccccagcagcaagaacagcagccccaacagcagccccaggaccctgggccgcagcaagggccgcctgcggctgccccagatcggcagcaagaacaagcccagcagcagcaagaagaacctggatgccagcaaagaaaatggagctggccagatctgtgagctggctgatgccctgagccggggccacatgaggggcggcagccagcctgagctggtgaccccccaggaccacgaggtggccctggccaacggcttcctgtatgagcacgaggcctgtggaaatggctgtggagatggctacagcaatggccagctgggcaaccacagcgaggaggacagcacagatgaccagcgggaggacacccacatcaagcccatctacaacctgtatgccatcagctgccacagcggcatcctgagcggcggccactacatcacctacgccaagaaccccaactgcaagtggtactgctacaatgacagcagctgtgaggagctgcacccagatgaaattgacacagacagcgcctacatcctcttctatgagcagcagggcattgattatgcccagttcctgcccaagattgatggcaagaagatggctgacaccagcagcacagatgaagattctgagagtgactatgagaagtacagcatgctgcagtag

SEQ ID NO: 115592 - DNA, 3270 bp, Artificial Sequence
  derived and/or modified sequence
atgccccagaggctgccccacgcccggcagcacacccccctgcccctgggcagcgctgactaccgccgggtggtgtctgtgcggccccagggcccccaccgggaccccaaggacagcagagatgctgccaagcgggagcagggcagcctggcccccaggcctgtgcctgccagccggggcggcaagaccctgtgcaagggctaccggcaggcccctcctggccccccagcccagttccagaggcccatctgcagcgccagccccccctgggccagccgcttcagcaccccctgccctggaggagctgtgcgggaggacacctaccctgtgggcacccagggcgtgcccagcctggccctggcccagggcggcccccagggctcctggaggttcctggagtggaagtccatgccccggctgcccacagacctggacatcggcggcccctggttcccccactatgactttgagtggagctgctgggtgcgggccatcagccaggaggaccagctggccacctgctggcaggccgagcactgtggggaggtgcacaacaaggacatgtcctggccagaggagatgtccttcaccgccaacagcagcaagattgaccggcagaaggtgcccacagagaagggggccaccggcctgagcaacctgggcaacacctgcttcatgaacagcagcatccagtgtgtgagcaacacccagcccctgacccagtacttcatcagcggccgccacctgtatgagctgaacagaaccaaccccatcggcatgaagggccacatggccaagtgctacggggacctggtgcaggagctgtggagcggcacccagaagtctgtggcccccctgaagctgcggaggaccatcgccaagtatgcccccaagtttgatggcttccagcagcaggacagccaggagctgctggccttcctgctggatggcctgcacgaggacctgaacagagtgcatgagaagccctacgtggagctgaaggacagtgatggccgcccagactgggaggtggccgctgaggcctgggacaaccacctgcggaggaacagaagcatcatcgtggacctcttccacggccagctgcggagccaggtgaagtgcaagacctgtggccacatctctgtgcgctttgaccccttcaacttcctgagcctgcccctgcccatggacagctacatggacctggagatcaccgtcatcaagctggatggcaccacccctgtgcgctatggcctgcggctgaacatggatgagaagtacacaggcctgaagaagcagctgcgggacctgtgtggcctgaacagcgagcagatcctgctggccgaggtgcatgacagcaacatcaagaacttcccccaggacaaccagaaggtgcagctgtctgtgtctggcttcctgtgtgcctttgagatccctgtgcccagcagccccatcagcgccagcagccccacccagattgacttcagcagcagccccagcaccaacggcatgttcaccctgaccaccaacggggacctgcccaagcccatcttcatccccaacggcatgcccaacacagtggtgccctgtggcacagagaagaacttcaccaacggcatggtgaatggccacatgcccagcctgcctgacagccccttcaccggctacatcatcgctgtgcacaggaagatgatgaggacagagctgtacttcctgagcccccaggagaaccggcccagcctgtttggcatgcccctgattgtgccctgcaccgtgcacaccaggaagaaggacctgtatgatgctgtgtggatccaggtgtcctggctggcccggcccctgcccccccaggaggccagcatccacgcccaggaccgggacaactgcatgggctaccagtaccccttcaccctgcgggtggtgcagaaggatggcaacagctgtgcctggtgcccccagtaccgcttctgccggggctgcaagattgactgtggggaggaccgggccttcatcggaaatgcctacatcgctgtggactggcaccccacagccctgcacctgcgctaccagaccagccaggagcgggtggtggacaagcatgagagcgtggagcagagcagaagagcccaggccgagcccatcaacctggacagctgcctgcgggccttcaccagcgaggaggagctgggggagagcgagatgtactactgcagcaagtgcaagacccactgcctggccaccaagaagctggacctgtggaggctgccccccttcctgatcatccacctgaagcgcttccagtttgtgaatgaccagtggatcaagagccagaagatcgtgcgcttcctgcgggagagctttgaccccagcgccttcctggtgccccgggaccctgccctgtgccagcacaagcccctgaccccccagggagatgagctgagcaagccccgcatcctggcccgggaggtgaagaaggtggatgcccagagcagcgctgggaaggaggacatgctgctgagcaagagccccagcagcctgagcgccaacatcagcagcagccccaagggcagccccagcagcagcaggaagagcggcaccagctgccccagcagcaagaacagcagccccaacagcagccccaggaccctgggccgcagcaagggccgcctgcggctgccccagatcggcagcaagaacaagcccagcagcagcaagaagaacctggatgccagcaaagaaaatggagctggccagatctgtgagctggctgatgccctgagccggggccacatgagaggaggcagccagcctgagctggtgaccccccaggaccacgaggtggccctggccaacggcttcctgtatgaacatgaggcctgtggaaatggctgtggagatggctacagcaatggccagctgggcaaccacagcgaggaggacagcacagatgaccagcgggaggacacccacatcaagcccatctacaacctgtatgccatcagctgccacagcggcatcctgagcggcggccactacatcacctacgccaagaaccccaactgcaagtggtactgctacaatgacagcagctgtgaggagctgcacccagatgaaattgacacagattctgcctacatcctcttctatgagcagcagggcatcgactatgcccagttcctgcccaagattgatggcaagaagatggctgacaccagcagcacagatgaggacagcgagagtgactatgagaagtacagcatgctgcagtag

SEQ ID NO: 115593 - DNA, 84 bp, Artificial Sequence
  derived and/or modified sequence
atggacatggtggagaatgctgacagcctgcaggcccaggagaggaaggacatcctgatgaagtatgacaagggccacaggtag

SEQ ID NO: 115594 - DNA, 4221 bp, Artificial Sequence
  derived and/or modified sequence
atggacatggtggagaacgccgacagcctgcaggcccaggagcggaaagacattctgatgaagtacgacaaggggcaccgggccgggctacctgaggacaaaggaccggagcccgtgggaattaactcaagcattgacaggtttggtatcctgcacgagacggagcttcctcctgtgacagctagagaggcgaaaaaaatccggcgagagatgactcgcacctcaaaatggatggagatgctgggagaatgggagacatataaacactcctctaagttgattgatcgggtttacaaggggatcccaatgaatatccgggggcctgtatggtccgtgttgctgaacatacaggagattaaacttaagaaccctggccggtatcagatcatgaaagagagaggcaagcgtagctcagaacatatccaccacatcgatctggatgttaggacaaccctccgtaaccatgtgttctttagggatagatacggcgccaagcagcgcgagctgttctatatcctactggcttattcggaatataatcccgaagtgggctattgccgggatctgtctcatattacagctctttttcttctgtatctgcctgaggaagacgcattctgggccctcgtgcagttattggccagcgaaaggcacagtctccctggatttcactcacctaatggcggaacagtgcagggacttcaggatcaacaagaacacgtagtccctaagagtcagccgaaaactatgtggcaccaggacaaggaaggcctgtgtggacaatgcgcttcccttggttgcctgctgagaaatttgatagacggcatctctctggggctgacgctgcgactgtgggacgtttatctggtagagggtgagcaggtgctcatgcctataaccagcattgcattaaaagtgcagcagaaacgcttgatgaaaacaagtcgctgcggcctatgggccagactacgaaaccagtttttcgatacgtgggcgatgaatgatgacacggtactcaagcatctgagggcttcaacgaaaaagttgacccgcaagcaaggcgatttgccccctccagccaaaagggaacaggggtccctggcacctcgccccgttcccgcttcaaggggcggtaagacgctctgtaagggataccgccaggccccgccgggtccccccgcccagtttcagagaccaatttgctccgcatccccaccttgggcgtccaggttctccacgccatgtccaggtggcgcagtgagggaagatacgtaccccgttgggacccagggtgtgccctctttggcccttgctcagggcggaccacagggcagctggcgttttctcgagtggaaatccatgcccaggctgcccaccgatctggatatcggcggcccctggttcccccattatgactttgagtggtcctgttgggtcagggctatcagtcaggaagatcagctcgcgacctgctggcaggcagagcactgcggtgaggtccacaacaaagacatgtcttggccagaggagatgagctttacagctaacagttctaagattgaccgccagaaggtgccaacggagaagggagccaccggtttgtctaatcttggtaacacatgtttcatgaactcctcaatccagtgcgtctcaaacacacagcctctcacgcagtattttatttccggcagacatttgtacgaactgaatcgcacaaaccctatcggcatgaagggacacatggcgaagtgttatggtgaccttgtgcaagagctgtggtcagggacacagaagtccgtggcccctctaaagttgcgaagaaccatcgccaaatacgcgcccaaatttgacgggtttcaacagcaggactcccaagagctgctggcgttcctgcttgatgggctgcacgaggacttgaacagagtccatgaaaagccctacgtggaactcaaggacagcgacggcagacccgactgggaggttgcagcggaagcctgggacaatcatcttcggcgcaatcggagcatcatcgttgatttgtttcatggacaattaagatcccaggttaaatgcaaaacatgcgggcatatttccgtgaggtttgatccatttaatttcctctcccttcctctgcctatggattcatacatggacctggagataaccgtcattaagctggatggtacaacgcctgtgcgttacggactgagattaaatatggacgagaaatataccggcctcaaaaaacagctgcgggacctctgcggactcaactcagagcagatattgctcgccgaggttcacgactctaacatcaaaaactttccccaagacaatcagaaagtgcagctgtccgtcagcgggtttctatgcgctttcgagattcccgttccaagctccccaataagtgcctccagccccactcagatcgacttttcctcatcaccatctactaacggcatgtttactctaactacgaacggagatctgcccaaaccaatctttatccctaatgggatgcctaacaccgtggtgccatgcgggacagaaaaaaattttacgaacgggatggtgaatgggcatatgccctctttgccagacagcccgtttacaggctacattatcgccgtgcacaggaaaatgatgagaaccgagctgtacttcctttcaccccaagagaataggccaagcctctttggcatgccattgatagtgccatgcacagttcacacgcggaaaaaggacctgtacgacgcggtttggatccaggtttcatggctggctaggcccttgcccccacaggaggcttcaatacacgctcaggatagagataactgcatgggctaccagtacccttttaccctcagggtagtgcaaaaagatgggaattcctgtgcctggtgccctcaataccgcttctgccgagggtgtaagatagactgtggcgaagatagggcctttattggcaatgcttatatcgcggttgactggcatcctactgcactacatcttagataccaaacaagccaagagagggtggtggacaaacatgaatctgtcgagcagagcagaagggcccaggcagaacctattaatctggactcctgtctccgggcatttacaagcgaagaggagctgggagaatcagaaatgtactactgttctaaatgcaagacgcattgcttagcaacaaagaagttagacctctggaggctgcccccctttctgataattcacctaaagagatttcaatttgtcaatgaccagtggatcaaatcacagaagattgtcagatttctgagagaatccttcgatccctccgccttcctggtgcctcgagatccagctctatgccagcacaagccactgacccctcagggcgacgaactttctaaaccgagaattctcgccagagaggtgaagaaggtggatgcccagtcttcagccggaaaagaggatatgttactgtccaagtctccctcctccctatctgccaacatttcttcatccccgaaggggtcaccttcctcctctcggaaatctggaacatcatgtccctcctcaaagaatagttccccaaattcatcccccaggacactgggcaggtcaaagggtcgcctgaggttacctcaaatcggttccaagaacaagccttcttcaagtaagaaaaacctggatgcatccaaggaaaatggtgctggccagatctgtgaattagctgatgctcttagcagaggacatatgcggggaggtagccagcccgagctggtgacgcctcaggaccacgaggtggcactcgctaatggatttctgtacgagcacgaagcttgcgggaacggctgtggagatggttacagcaatggtcagttggggaaccacagtgaggaagatagtacggacgatcagcgtgaggacacgcacatcaagccgatttacaacctctacgccatatcgtgtcattccggcattctaagcggaggtcactacattacctatgcgaagaatccaaattgtaaatggtattgctataatgactcgtcttgcgaggagctgcatcccgacgagattgatactgactcagcatacatactgttctatgaacagcagggaattgattacgcacaattcttaccgaaaattgacggcaagaagatggctgatacatcttcaacagacgaggacagcgagagcgattacgaaaaatactctatgttgcaatag

SEQ ID NO: 115595 - DNA, 3270 bp, Artificial Sequence
  derived and/or modified sequence
atgccccagcggctgccccacgcccggcagcacacccccctgcccctgggaagtgctgactatcggcgtgtcgtcagcgtgcgacctcagggaccacatagagatccaaaggatagcagagacgccgcaaaacgcgaacaagggagtctggcccctcggcctgtccccgcatcaagagggggaaagacactttgtaaaggatatcgacaggctccaccggggcctcccgcccagttccagcgtcccatctgttccgcctctccaccttgggcctctcggttttcgactccctgtcctggaggggcagtaagagaagatacatacccagtgggtactcagggtgtgcccagtctcgccctggcacaggggggaccccaagggtcctggaggttcctagagtggaaaagcatgccacggctacctacagacctcgacataggtggaccgtggtttccgcactatgattttgaatggtcctgttgggttcgcgccatcagccaggaagatcagctggcaacttgctggcaggctgagcactgtggagaggtgcacaacaaagacatgtcttggccagaggaaatgtctttcactgccaactcgtccaaaatcgatcggcagaaggtgccaaccgagaaaggtgcgacaggactgagtaatcttgggaatacatgtttcatgaactcttccattcaatgtgtaagcaatacccagcccctgacacaatattttatctccggcaggcacttgtacgagctaaacaggacaaatcccataggcatgaagggccacatggccaagtgctatggagatctagtgcaggagctgtggtcaggcacccagaagagtgtagctccgttgaagctcagaaggaccatagctaaatacgcacccaagttcgacggatttcagcaacaagattcacaggaactcctcgccttcctgctggacggactccatgaagacctaaaccgggtccacgaaaagccgtacgtggaactgaaagattccgatggacgtcctgactgggaggtagccgcggaagcgtgggataaccaccttcgaagaaacagatctatcatcgtggacctgttccatggccagctgaggagccaggtgaaatgtaaaacttgtggccatatcagtgtgagattcgatccctttaattttctgtccctgcctctgcctatggactcttatatggacctcgaaatcactgtaattaagctcgatgggaccactcccgttaggtatggcctgcggttgaacatggacgaaaagtacacaggactcaagaaacaattgcgggacctgtgtgggctcaacagtgaacaaattctcctagccgaagtccatgactctaatataaagaatttcccccaggataaccagaaggtgcagctgtctgtctccggtttcctatgtgccttcgaaatccccgtgccttcctcccctatcagcgcaagctctcccacacagatcgacttttccagttcacctagcacaaacgggatgttcaccctgacgacaaatggcgatctgcccaagcccatctttatccccaacggcatgccaaacactgttgtaccgtgtgggaccgaaaagaatttcaccaacggaatggtgaacggccatatgccgtctctcccagattcacccttcaccgggtatattatcgctgtacaccggaaaatgatgcgaaccgagctctacttcttgtcaccacaggagaatagaccatccctctttggaatgccgctgattgttccgtgtactgtacacacccggaaaaaggacctgtacgatgccgtatggatccaagtttcatggctggctcggcctctgccgccccaagaagcctcaatccacgcccaggacagagataactgcatgggctatcagtacccttttactctccgcgtggttcaaaaggacggtaattcctgcgcttggtgcccacagtacaggttttgtcgcggatgcaagattgactgcggcgaggaccgggcgttcatcgggaacgcgtacatcgccgtcgattggcacccaacggcactgcatttgcggtatcagacaagtcaggaaagggtcgtggataaacatgagagtgttgaacaatctcggcgagctcaggccgaacctattaacctggatagttgcctccgtgcattcacctccgaagaagagttaggtgagagcgaaatgtattattgcagcaagtgtaagacccattgcctggctaccaagaaactcgacttgtggaggttaccacctttcctgatcattcacctgaagcgcttccagtttgtcaacgaccagtggatcaaaagccagaagatcgtacggttcctgagggagtccttcgatccatctgctttcctagtgccacgcgaccctgctctgtgccaacataagccccttacgccacaaggagacgaactgtcaaagccacggattctggcccgcgaagtgaaaaaggtagatgcccagtctagcgcaggcaaggaggatatgttgctttctaagagtcccagctcgctgtccgcaaacatctcaagctccccaaagggctcccccagctcgtcccgaaagtcgggcaccagttgccctagctcaaagaattcaagtcccaacagcagcccaaggacacttggtagatccaagggcaggctgcgtctgcctcagatcggaagcaagaataaaccctcatcttcgaagaagaacctcgatgctagcaaagagaatggcgcaggccagatatgcgagttggctgacgctctctctagaggccacatgaggggaggatcgcagcctgagttggtaaccccacaggaccacgaggtcgctttggctaatggattcctatatgagcacgaagcttgcggtaacggctgtggtgatggatacagcaatgggcaattgggcaaccatagtgaggaggacagcaccgacgaccaacgagaggacacccatataaaacccatatacaacctctatgccatatcttgccacagcgggattcttagtggcggccattatatcacatacgccaaaaacccaaattgtaaatggtactgttacaacgattcctcctgtgaggaactccacccggatgagattgatacagattccgcgtatattctcttttatgagcaacaagggatcgattacgcccaatttctgccaaagattgacggcaagaaaatggcagacacgagtagcactgacgaggacagcgaatccgattatgagaaatattcaatgctgcagtag

SEQ ID NO: 115596 - DNA, 84 bp, Artificial Sequence
  derived and/or modified sequence
atggacatggtggagaacgccgacagcctgcaggcccaggagcggaaggacattctgatgaagtatgataagggacatagatag

SEQ ID NO: 115597 - DNA, 4221 bp, Artificial Sequence
  derived and/or modified sequence
atggacatggtggagaacgctgattccctccaggcacaagagcgcaaggatatactcatgaagtacgataagggccatagggccggattgcctgaggacaaaggaccggaacctgtgggaatcaacagttcaatcgacaggttcggcatcctgcacgagactgagcttcctccggtgacagcccgtgaagctaagaaaatacgcagggaaatgacacggacatccaagtggatggaaatgcttggggaatgggagacatacaagcatagctctaaactgatcgatcgagtgtacaaaggaatccccatgaatatccgcggacctgtctggagcgtactcctcaatatccaggagattaagttgaagaacccgggtcgctatcaaattatgaaggagcgcggaaaacgatcctcagaacatattcaccacattgacctagatgtccgaacaactctgagaaaccacgtgttctttagggaccgttatggggcaaagcagcgggagttattctatattctcctcgcgtacagcgaatataatcctgaagtaggctactgcagggacttatcccacataaccgcgctttttctcctgtatctgcccgaggaggatgctttctgggcgctggttcagctcctggccagcgagcgccactcccttcccggtttccacagccctaatggaggcactgttcaggggctgcaggatcaacaggagcacgtcgttcctaaatctcagccgaagaccatgtggcatcaggacaaggagggcctgtgcgggcagtgcgccagcctcggctgcctcctacgcaatctgatagatgggatctccttggggcttacacttagactttgggatgtgtacttagtcgagggagagcaggttttaatgccgatcacttccattgctcttaaggtccagcagaagaggctcatgaagacatcacgatgcggcttgtgggcccgactgcgaaatcagttttttgacacttgggctatgaacgacgatacagtacttaagcacctgcgagccagcacaaaaaaactcacaaggaaacagggcgatctgcccccaccggctaaacgggaacagggtagcctggcccctcgcccagtacctgccagcagaggtggcaagactctgtgtaaaggctacagacaggcccctcctgggccacctgctcagttccagcgcccaatctgtagtgcttctcccccatgggcaagccgattttccactccatgtccaggcggagcagtcagggaggacacctacccggtgggtacacagggtgtaccctcactggcgctcgcccagggcggaccccagggaagctggcgtttcctggaatggaagagcatgccaaggctccccactgatctggacatcggcggtccctggtttccgcactatgactttgaatggtcatgctgggttcgggctatctcacaggaagaccaattggccacctgttggcaggctgagcattgtggcgaagtgcataataaggatatgtcatggcccgaggaaatgtccttcacagccaactcatccaaaattgatcgccagaaggttccgacggagaaaggggcaaccggtctgagtaatttaggaaacacctgttttatgaactctagcattcagtgcgtgtcaaatacacagccactgacgcagtattttatttctgggagacatttgtatgaattgaatagaacaaatccaattggaatgaaggggcacatggccaagtgttacggggatcttgtgcaagagctgtggtccggcactcagaaaagtgtggcgcctcttaaactgaggagaacgatcgctaagtacgctcccaaattcgatggtttccagcagcaggacagccaggaactcttagctttcctcttggacggtttgcatgaagatttaaaccgcgtgcacgagaagccctatgtggaactcaaagactctgacggcaggccagactgggaggtagccgcagaagcctgggacaaccacttgagacggaatcgtagcattattgtggacctctttcacgggcagttacggtcacaggtgaaatgtaagacgtgtggccacatttctgtacggtttgacccctttaactttctgtcattgcccttgcccatggacagctacatggacctagagattacagttataaaactggatggtacgacccccgtgcgatacggtctccgcttaaacatggacgaaaagtacactggactgaaaaaacagctgcgagacctttgtggcctaaactccgagcagatcctgctggccgaagttcacgactccaacatcaaaaactttccccaggacaatcaaaaagtacaactgtccgtgagcggcttcctgtgcgcctttgagattccagtgccctcgtccccaatttctgcctcgtcaccaactcagatcgattttagctcatcgccaagcacgaacggcatgtttacactgacaaccaacggagatctacccaagcctattttcattcctaacggcatgcctaacactgtagttccgtgcggcacagaaaagaactttacaaacggcatggtgaacggtcacatgccttcactgcccgattcaccttttacgggatacatcattgccgtgcatagaaagatgatgcggacagagttgtattttctctcaccacaggaaaaccgacccagtctcttcgggatgcctttgatcgtgccctgcacggtgcacaccagaaagaaggacctctatgacgccgtatggattcaggtgtcctggctggccaggccattacccccacaggaagcttccattcatgcccaggacagagataactgcatgggctaccaatatccattcaccctgagagtggtgcagaaagatggcaactcgtgtgcctggtgccctcagtatcgtttttgccggggttgtaaaattgactgtggcgaggacagagcttttattggaaatgcttatatcgcagtggattggcatcccacggcattacatctacgttatcagacctcacaagaaagagtggtagacaagcacgaatctgttgagcagagtcgcagggcccaagcggaacccattaatcttgatagttgtctgagagctttcacttcggaggaagaattaggcgaatcggaaatgtattattgctcaaaatgcaaaacacattgtctggctaccaaaaaactggatttatggagacttcctccgtttctgatcatacacctgaagagatttcagttcgtgaatgaccagtggattaaaagtcagaagatcgttaggtttctccgagaatcatttgacccatccgcttttctggtgccaagggacccagccttgtgccagcacaaaccactgaccccgcagggggatgaactcagcaagccgaggatcctggctagagaggtcaagaaagtcgatgcccagtcaagtgccggaaaggaagacatgctgttgtccaagtcccctagcagcctctctgccaatatcagctcctcaccaaaaggctccccaagcagctcacggaaatctgggacaagctgtcccagcagcaagaatagcagccccaattcctcccctagaactctcggcagaagtaaggggcgtctgagactgccgcagatcggatcgaagaacaagccaagttcctctaaaaagaacctggatgcctcaaaagaaaatggggcagggcagatctgcgaactcgccgatgccctcagccgaggacacatgcgcggtggctctcagccagaattggtaaccccccaagaccatgaggttgcgctggcaaacggttttctatacgagcatgaagcatgcggaaacggctgtggcgatggctattcaaatggccaactcgggaaccactctgaagaagattcaacagatgaccagagagaggatacccatattaaaccaatctataatttgtacgccatttcatgccacagcggcatcctgagcgggggtcactacatcacctatgcaaagaatccgaactgcaaatggtactgctacaacgactcgtcttgcgaagagctgcaccccgatgagatagataccgacagcgcctatatcttattttacgaacagcagggcattgactatgcacaattccttcctaaaattgacggcaagaagatggccgatacctcttcaaccgacgaagacagcgagagtgattacgagaagtatagcatgctccagtag

SEQ ID NO: 115598 - DNA, 3270 bp, Artificial Sequence
  derived and/or modified sequence
atgccccagcgactcccccacgcgcgacagcatactcctttacccttgggctcggccgactacagaagagtggtgtctgttaggccccaagggcctcaccgggatccgaaagacagccgtgatgctgctaagagagagcagggctctcttgcccctcgtccggttcccgcaagcagaggaggaaagacgctgtgtaagggttacaggcaggcgccacctggtcccccagcccaattccagagacccatatgcagcgccagccccccttgggcctctagattttcaacaccctgtccgggtggcgctgtgagggaggacacgtatccagtggggacccagggcgtgccatcactcgcattggctcaaggaggtcctcaaggttcttggaggtttctggagtggaagagtatgcccaggctgccgaccgatctggatattggcggaccatggttccctcattacgattttgaatggtcatgttgggtgagggcaatcagtcaggaagatcagctggcaacgtgctggcaggctgaacactgcggagaggtccataataaagatatgtcgtggcctgaagagatgtcattcacggcaaacagctccaagatcgacagacaaaaggtccccacagagaagggcgcaaccggcctgtctaatttgggcaatacgtgttttatgaattcatccatacagtgcgtgagtaacacccagcctctgacccagtattttatatcgggaaggcacttatatgagcttaacagaacaaatcctattgggatgaaagggcatatggccaaatgctatggggatctggtgcaagagctgtggtccggaacgcaaaagagcgtagcccctctgaaactgcgacgcaccattgccaaatacgctccgaagtttgatggatttcagcagcaggattcccaggaattattggcctttctgttggatggattgcacgaggatctaaacagggtgcacgagaaaccgtatgttgagctgaaggactccgatgggcgtcccgattgggaagtcgcagccgaagcttgggacaaccacctccgcaggaacagatcgattattgtggacctgtttcacggccagctgaggtcccaagtgaagtgtaaaacgtgcggacacatcagcgttagattcgatccattcaacttcctcagtctgcctttgcctatggactcctatatggacctcgaaataactgttatcaagttggacggtactactcccgttcggtatggattgaggctaaacatggatgagaagtacaccgggctgaaaaagcagctccgcgatctgtgcggactcaattccgagcagatcctcctcgcggaggtacatgactcaaacatcaaaaactttccccaggacaaccagaaggtgcagctgtcagtttcaggattcttatgtgctttcgaaattccagtgccgtccagtcccattagcgccagttcccctactcagatcgatttctctagcagcccctcgaccaacggaatgtttacactgactactaatggagacctgccaaagcccatctttatccctaatggaatgcctaacaccgtagtgccctgcggtacagagaagaatttcacaaatggtatggtgaatggtcacatgccttctttgcccgacagtccttttaccggctatattatagccgtacatcgcaagatgatgcgaaccgagctatacttcctgagtccccaggaaaaccggcctagtctgtttggcatgcctttaatcgtaccctgtacagttcatacacgcaagaaagatttgtatgatgctgtttggatccaggtgtcctggttggccagacctctgccccctcaggaagcctctatccatgcccaggatcgagacaattgtatgggatatcaatacccatttacgctccgagtggtacaaaaagatgggaacagctgcgcatggtgcccgcaataccgattctgtcgcggatgcaaaattgattgcggagaggatagggcattcatcggcaatgcctatatcgccgtcgactggcacccaaccgccctccacctcagatatcagactagtcaagagagggtggtggacaagcacgagtcagtagagcagtctaggagagcacaggccgaacccatcaacttggactcctgcctcagggcttttaccagcgaggaggagcttggcgaaagtgagatgtactactgttccaaatgtaaaactcactgtctggccactaagaagttggacctgtggagattgcctccattcttgatcattcaccttaaacggtttcagttcgtcaacgaccagtggattaagagtcagaaaatcgtccgcttcctcagggaatccttcgatccgtcagctttcctggtcccacgcgatcccgcactctgccaacataagcccctcacgccacagggtgatgagctcagtaagcctagaatcctcgctcgcgaagtgaagaaggtggacgcccaatcctctgcagggaaggaggacatgctcctttctaaatcaccatcctccttatccgctaacatttcctcaagcccgaaaggaagtccttcgtctagccgcaagtcaggaacttcttgcccgtctagtaaaaattcgagtcccaattcctctccgaggactcttggcagatcgaagggacgactgagattgccccagataggctctaaaaacaagcctagctctagcaaaaagaacctcgacgcctctaaggagaacggagccggacaaatttgcgagcttgctgatgccctgagcagaggccacatgaggggtggatcacagccagagctggtgactccacaggaccatgaagtggctctggcaaacgggtttctctacgagcatgaggcatgtggtaatggttgcggagacggatactccaacggacaactaggtaaccactccgaggaggattccacagacgatcagagagaggatactcatattaaacctatctataatctgtatgccatatcttgccattctggcatactgtccggtggccactatataacttatgcaaagaacccgaattgcaagtggtactgctacaatgattcctcatgtgaggaactgcatcccgacgagatcgatacggactcagcctatatactgttctatgagcagcaggggatcgattatgcccagtttttaccgaagatagatggtaagaaaatggccgatacaagtagtacagacgaggacagcgaatctgattacgagaagtattcgatgctgcagtag

SEQ ID NO: 115599 - DNA, 84 bp, Artificial Sequence
  derived and/or modified sequence
atggacatggtggagaacgccgactcattacaggcccaggagagaaaggatattttaatgaagtacgataaagggcaccgctag

SEQ ID NO: 115600 - DNA, 7976 bp, Artificial Sequence
  derived and/or modified sequence
ctaaaaataccattaagtaatagtattagcttttgtattctgagattcaacagcagcagtcacttccctccactcctatgtgtatcccaggaccaccctgggcggggagggctgaggtcagggaggtctgaagctggtcctgggctccgggggtgacagtgatgaggaactgggtgcacacatgagtggggcagccgggcctggccagagaagcaacacacacgtgcacagacatgtttatccacatacacatgtgcacgcatgtgcacaaacacattgcaggcaggcatgttgacgcctcaggcagcggaggaccctgactctgggccctgctgacccaggcaaggccccattgtgatgcgtgccatgacctcagaatgtcactggtgcttagcacctatccgctctccagactgcgtctgtgttctacggcagttacacacacgcagtggtattcacaagcggttttgtggactcaaaggttttctccctgagaggcataacccaggccagctgattcatcagaatcaggtgagtgtgacctgctctcttccctccaggctgacttggggacagtggctatggtatgggcggtgttggcctctgggcagctacagaggagggtcatccctgagcactcaccgggcgcccgttctacactgcccatgtagacgattttctctttcgtcttcatggtggcttcgtagagtgggtgctgttcccgaatgtacccattcgacaggtgagccgtctggggtcagagaggcagtaactggcctgggaatccagacaagaccctgggttttgctctcagccctgctgtgtgccatgctagacttcaggcctcaaccctgagacctccctgctctagatcccaaatctgcccagatttccgatcccaatggggcagagcctggccctggcagagacactgggatggatccactgtgggtggggaggagggaagggtcctcagaacacacctggggcctaagctgggtcttgatggtcactgtgggacccactggacacacacagtcccttgtctgggagtggcatggggagccttctgcccttgggcagttgtggaaagtgaaggagccctggagagctggctgaggggagactatcttcccttgtgttcaaaggggtccaggcactggggctctccccaagtatttcttattctgtctggcctcgctttccttttgccctgagtattctcaggagggacggtccatctagatgtcctccaggagcaaggacccactgttcttcatcagtgacccaggaaaatgaagccccctcctgtggggacagctcagaatggtggagtccacagtccctccctgagagacatggtttccatgagcacagtggctgctttggagacagtaatcattttcatccccaaaaccaaacacactcctgctcaaatggtgttattgctaaagcagcttcactggttagactgaagggccatggtagcccaagtgatgagcggggtagaatggagcagtcaggagagatcttgttccccgtaggaaactgggcatctctgtggccctgaacatcccaggaggccgatcgtacagagacctctggtgcctgaccgcagttcacatccacatccctggaatagaccatcacaggctcttcacccttggcaggtggacaccattcaacctgccggggcaggatggacatggtagagaatgcagatagtttgcaggcacaggagcggaaggacatacttatgaagtatgacaagggacaccgagctgggctgccagaggacaaggggcctgagcccgttggaatcaacagcagcattgatcgttttggcattttgcatgagacggagctgcctcctgtgactgcacgggaggcgaagaaaattcggcgggagatgacacgaacgagcaagtggatggaaatgctgggagaatgggagacatataagcacagtagcaaactcatagatcgagtgtacaagggaattcccatgaacatccggggcccggtgtggtcagtcctcctgaacattcaggaaatcaagttgaaaaaccccggaagataccagatcatgaaggagaggggcaagaggtcatctgaacacatccaccacatcgacctggacgtgaggacgactctccggaaccatgtcttctttagggatcgatatggagccaagcagagggaactattctacatcctcctggcctattcggagtataacccggaggtgggctactgcagggacctgagccacatcaccgccttgttcctcctttatctgcctgaggaggacgcattctgggcactggtgcagctgctggccagtgagaggcactccctgccaggattccacagcccaaatggtgggacagtccaggggctccaagaccaacaggagcatgtggtacccaagtcacaacccaagaccatgtggcatcaggacaaggaaggtctatgcgggcagtgtgcctcgttaggctgccttctccggaacctgattgacgggatctctctcgggctcaccctgcgcctgtgggacgtgtatttggtggaaggagaacaggtgttgatgccaataaccagcattgctcttaaggttcagcagaagcgcctcatgaagacatccaggtgtggcctgtgggcacgtctgcggaaccaattcttcgatacctgggccatgaacgatgacaccgtgctcaagcatcttagggcctctacgaagaaactaacaaggaagcaaggggacctgccacccccagccaaacgcgagcaagggtccttggcacccaggcctgtgccggcttcacgtggtgggaagaccctctgcaaggggtataggcaggcccctccaggcccaccagcccagttccagcggcccatttgctcagcttccccgccatgggcatctcgtttttccacgccctgtcctggtggggctgtccgggaagacacgtaccctgtgggcactcagggtgtgcccagcctggccctggctcagggaggacctcagggttcctggagattcctggagtggaagtcaatgccccggctcccaacggacctggatatagggggcccttggttcccccattatgattttgaatggagctgctgggtccgtgccatatcccaggaggaccagctggccacctgctggcaggctgaacactgcggagaggttcacaacaaagatatgagttggcctgaggagatgtcttttacagcaaatagtagtaaaatagatagacaaaaggttcccacagaaaagggagccacaggtctaagcaacctgggaaacacatgcttcatgaactcaagcatccagtgcgttagtaacacacagccactgacacagtattttatctcagggagacatctttatgaactcaacaggacaaatcccattggtatgaaggggcatatggctaaatgctatggtgatttagtgcaggaactctggagtggaactcagaagagtgttgccccattaaagcttcggcggaccatagcaaaatatgctcccaagtttgatgggtttcagcaacaagactcccaagaacttctggcttttctcttggatggtcttcatgaagatctcaaccgagtccatgaaaagccatatgtggaactgaaggacagtgatggccgaccagactgggaagtagctgcagaggcctgggacaaccatctaagaagaaatagatcaattattgtggatttgttccatgggcagctaagatctcaagtcaaatgcaagacatgtgggcatataagtgtccgatttgaccctttcaattttttgtctttgccactaccaatggacagttacatggacttagaaataacagtgattaagttagatggtactacccctgtacggtatggactaagactgaatatggatgaaaagtacacaggtttaaaaaaacagctgagggatctctgtggacttaattcagaacaaatcctactagcagaagtacatgattccaacataaagaactttcctcaggataaccaaaaagtacaactctcagtgagcggatttttgtgtgcatttgaaattcctgtcccttcatctccaatttcagcttctagtccaacacaaatagatttctcctcttcaccatctacaaatggaatgttcaccctaactaccaatggggacctacccaaaccaatattcatccccaatggaatgccaaacactgttgtgccatgtggaactgagaagaacttcacaaatggaatggttaatggtcacatgccatctcttcctgacagcccctttacaggttacatcattgcagtccaccgaaaaatgatgaggacagaactgtatttcctgtcacctcaggagaatcgccccagcctctttggaatgccattgattgttccatgcactgtgcatacccggaagaaagacctatatgatgcggtttggattcaagtatcctggttagcaagaccactcccacctcaggaagctagtattcatgcccaggatcgtgataactgtatgggctatcaatatccattcactctacgagttgtgcagaaagatgggaactcctgtgcttggtgcccacagtatagattttgcagaggctgtaaaattgattgtggggaagacagagctttcattggaaatgcctatattgctgtggattggcaccccacagcccttcaccttcgctatcaaacatcccaggaaagggttgtagataagcatgagagtgtggagcagagtcggcgagcgcaagccgagcccatcaacctggacagctgtctccgtgctttcaccagtgaggaagagctaggggaaagtgagatgtactactgttccaagtgtaagacccactgcttagcaacaaagaagctggatctctggaggcttccacccttcctgattattcaccttaagcgatttcaatttgtaaatgatcagtggataaaatcacagaaaattgtcagatttcttcgggaaagttttgatccgagtgcttttttggtaccacgagacccggccctctgccagcataaaccactcacaccccagggggatgagctctccaagcccaggattctggcaagagaggtgaagaaagtggatgcgcagagttcggctggaaaagaggacatgctcctaagcaaaagcccatcctcactcagcgctaacatcagcagcagcccaaaaggttctccttcttcatcaagaaaaagtggaaccagctgtccctccagcaaaaacagcagccctaatagcagcccacggactttggggaggagcaaagggaggctccggctgccccagattggcagcaaaaataagccgtcaagtagtaagaagaacttggatgccagcaaagagaatggggctgggcagatctgtgagctggctgacgccttgagccgagggcatatgcgggggggcagccaaccagagctggtcactcctcaggaccatgaggtagctttggccaatggattcctttatgagcatgaagcatgtggcaatggctgtggcgatggctacagcaatggtcagcttggaaaccacagtgaagaagacagcactgatgaccaaagagaagacactcatattaagcctatttataatctatatgcaatttcatgccattcaggaattctgagtgggggccattacatcacttatgccaaaaacccaaactgcaagtggtactgttataatgacagcagctgtgaggaacttcaccctgatgaaattgacaccgactctgcctacattcttttctatgagcagcaggggatagactacgcacaatttctgccaaagattgatggcaaaaagatggcagacacaagcagtacggatgaagactctgagtctgattacgaaaagtactctatgttacagtaaagctaccactctggctgctagacagcttggtggcgagggagatgactccttgtagctgatacttggcaaaagtgtcactgaaagacaagctaaatgtagttattttatcctgttagaacaaaaattctaattaaaatagttaacttgaagagtagaaacaattgtattttgaagtctcatacaagctgtctgatagagaactttcaggcagatcccaccattagcctgtaaacaaaaggtgtggcaccagccacctgggaccaaataagaattgaattgtgcttgtccagatatgaacaaatatgtagtgagtatagagtttaccaataatcataacaaatattaaagatttccttggagtcagaggaaaaaacaaacaattataatgttgtctagggacgacatgatacgctacctcctttttcctgaagttttattccattatattgacaagatggagaaagcaagatcatgaaggtgtgcaaatgattcttacggcatggacaaggatttttcaatttattttttaaactgtttccataccctttctttttcttgctttttgtttttgccattgtgtttacgtttgagacacaaccagtcattggtggcaggggcatagagtggtcagtctgaaagggaggctctcttaagagctatgtgccttccaaccagagggagacccagtagaaagaaaaacatcctgggaaatccagctaccagggccctcccagtggaggcatcttacatttaggctacttcaagtatcctcagaaatgtattctgcacccccggccccgcccatgctgagggaaggggagcagttgccaatatttgcaccatcttcacatgcacatgttgcaacaagagcttctgggaaggtaagcggcatcggagctagatcacgtttcacaattagtggttattcttttctgtgtttgttttgcactttaaaaaagagagaacacatgcaaatgaacttgcttgtgtgtatttgatggctctaagggctataaattacaaacaaaacacatcccagacattaggagttcataagtatatttaatgaaattggtggttttaggaagtcaactttagttttgctttgtttgcatgtccactggtttttttattttgatatttgtctttttttaaattttacagtagtcattgaaagttatgtttctttgcttacttcattttttccctctaattatttaagattggaacaaaagtataaatattatttatttgaggtagaatttttttcatgtagtttcttaatatatacttgaaggaaatgtttcaccttatttttggtctttgtttattcatttagaccctgcaagttgattctcattgccagattccattaccctttcttcctcataggtagtaattaccaatgtaactaagcatttgtgttctgatatctgaggccagtaactattaatatctagttctcagagcatttggaaaggttatcttaaatggctacctaaattgaaatccttttcagaaaaaatataattgcaagtaggtaggagtggcctaaattgtctaatgtaataaagtcagacaaaatgcacactttatagtttcaagattttcagtaaataaaatctgtccattcctacctggacatgtcccattaaaaagtggaagattttaaataatttctttacagatgttttatttaaacaggtagcacaatctactaatgttgtgtgatttgtgttatactggttgtaattaatttttttaattcatgaactagcggaaaatttattaaattaactattaactacattcaccttgtaaattactgtataaaacttgttgacaatgcactgactttagaaagatgttaatgtacataaatagagtgtaaataaaatagtgttgatgtactgaaatatgaactgtatcaaaagtattggtaattgtatatggggtgtacctgtttatctgttaactattatccaaacaaattaaatactgtggttgcctctatgtgctgtttttcctcatacaagtaaacacagaaagtcaaatt

SEQ ID NO: 115601 - DNA, 8182 bp, Artificial Sequence
  derived and/or modified sequence
ctaaaaataccattaagtaatagtattagcttttgtattctgagattcaacagcagcagtcacttccctccactcctatgtgtatcccaggaccaccctgggcggggagggctgaggtcagggaggtctgaagctggtcctgggctccgggggtgacagtgatgaggaactgggtgcacacatgagtggggcagccgggcctggccagagaagcaacacacacgtgcacagacatgtttatccacatacacatgtgcacgcatgtgcacaaacacattgcaggcaggcatgttgacgcctcaggcagcggaggaccctgactctgggccctgctgacccaggcaaggccccattgtgatgcgtgccatgacctcagaatgtcactggtgcttagcacctatccgctctccagactgcgtctgtgttctacggcagttacacacacgcagtggtattcacaagcggttttgtggactcaaaggttttctccctgagaggcataacccaggccagctgattcatcagaatcaggtgagtgtgacctgctctcttccctccaggctgacttggggacagtggctatggtatgggcggtgttggcctctgggcagctacagaggagggtcatccctgagcactcaccgggcgcccgttctacactgcccatgtagacgattttctctttcgtcttcatggtggcttcgtagagtgggtgctgttcccgaatgtacccattcgacaggtgagccgtctggggtcagagaggcagtaactggcctgggaatccagacaagaccctgggttttgctctcagccctgctgtgtgccatgctagacttcaggcctcaaccctgagacctccctgctctagatcccaaatctgcccagatttccgatcccaatggggcagagcctggccctggcagagacactgggatggatccactgtgggtggggaggagggaagggtcctcagaacacacctggggcctaagctgggtcttgatggtcactgtgggacccactggacacacacagtcccttgtctgggagtggcatggggagccttctgcccttgggcagttgtggaaagtgaaggagccctggagagctggctgaggggagactatcttcccttgtgttcaaaggggtccaggcactggggctctccccaagtatttcttattctgtctggcctcgctttccttttgccctgagtattctcaggagggacggtccatctagatgtcctccaggagcaaggacccactgttcttcatcagtgacccaggaaaatgaagccccctcctgtggggacagctcagaatggtggagtccacagtccctccctgagagacatggtttccatgagcacagtggctgctttggagacagtaatcattttcatccccaaaaccaaacacactcctgctcaaatggtgttattgctaaagcagcttcactggttagactgaagggccatggtagcccaagtgatgagcggggtagaatggagcagtcaggagagatcttgttccccgtaggaaactgggcatctctgtggccctgaacatcccaggaggccgatcgtacagagacctctggtgcctgaccgcagttcacatccacatccctggaatagaccatcacaggctcttcacccttggcaggtggacaccattcaacctgccggggcaggatggacatggtagagaatgcagatagtttgcaggcacaggagcggaaggacatacttatgaagtatgacaagggacaccgagctgggctgccagaggacaaggggcctgagcccgttggaatcaacagcagcattgatcgttttggcattttgcatgagacggagctgcctcctgtgactgcacgggaggcgaagaaaattcggcgggagatgacacgaacgagcaagtggatggaaatgctgggagaatgggagacatataagcacagtagcaaactcatagatcgagtgtacaagggaattcccatgaacatccggggcccggtgtggtcagtcctcctgaacattcaggaaatcaagttgaaaaaccccggaagataccagatcatgaaggagaggggcaagaggtcatctgaacacatccaccacatcgacctggacgtgaggacgactctccggaaccatgtcttctttagggatcgatatggagccaagcagagggaactattctacatcctcctggcctattcggagtataacccggaggtgggctactgcagggacctgagccacatcaccgccttgttcctcctttatctgcctgaggaggacgcattctgggcactggtgcagctgctggccagtgagaggcactccctgccaggattccacagcccaaatggtgggacagtccaggggctccaagaccaacaggagcatgtggtacccaagtcacaacccaagaccatgtggcatcaggacaaggaaggtctatgcgggcagtgtgcctcgttaggctgccttctccggaacctgattgacgggatctctctcgggctcaccctgcgcctgtgggacgtgtatttggtggaaggagaacaggtgttgatgccaataaccagcattgctcttaaggttcagcagaagcgcctcatgaagacatccaggtgtggcctgtgggcacgtctgcggaaccaattcttcgatacctgggccatgaacgatgacaccgtgctcaagcatcttagggcctctacgaagaaactaacaaggaagcaaggggacctgccacccccaggcccaacagccctgggacgaaggtgtgtggcaggaagcccccagccagtctgaaccctgggggcagtcccaggagccacccaccatgccccaacggcttccccatgccaggcagcacacacccctccctctgggatcagcagactacaggcgtgtcgtcagtgtcagaccacaggggccacacagagaccccaaggactccagagatgcagccaaacgcgagcaagggtccttggcacccaggcctgtgccggcttcacgtggtgggaagaccctctgcaaggggtataggcaggcccctccaggcccaccagcccagttccagcggcccatttgctcagcttccccgccatgggcatctcgtttttccacgccctgtcctggtggggctgtccgggaagacacgtaccctgtgggcactcagggtgtgcccagcctggccctggctcagggaggacctcagggttcctggagattcctggagtggaagtcaatgccccggctcccaacggacctggatatagggggcccttggttcccccattatgattttgaatggagctgctgggtccgtgccatatcccaggaggaccagctggccacctgctggcaggctgaacactgcggagaggttcacaacaaagatatgagttggcctgaggagatgtcttttacagcaaatagtagtaaaatagatagacaaaaggttcccacagaaaagggagccacaggtctaagcaacctgggaaacacatgcttcatgaactcaagcatccagtgcgttagtaacacacagccactgacacagtattttatctcagggagacatctttatgaactcaacaggacaaatcccattggtatgaaggggcatatggctaaatgctatggtgatttagtgcaggaactctggagtggaactcagaagagtgttgccccattaaagcttcggcggaccatagcaaaatatgctcccaagtttgatgggtttcagcaacaagactcccaagaacttctggcttttctcttggatggtcttcatgaagatctcaaccgagtccatgaaaagccatatgtggaactgaaggacagtgatggccgaccagactgggaagtagctgcagaggcctgggacaaccatctaagaagaaatagatcaattattgtggatttgttccatgggcagctaagatctcaagtcaaatgcaagacatgtgggcatataagtgtccgatttgaccctttcaattttttgtctttgccactaccaatggacagttacatggacttagaaataacagtgattaagttagatggtactacccctgtacggtatggactaagactgaatatggatgaaaagtacacaggtttaaaaaaacagctgagggatctctgtggacttaattcagaacaaatcctactagcagaagtacatgattccaacataaagaactttcctcaggataaccaaaaagtacaactctcagtgagcggatttttgtgtgcatttgaaattcctgtcccttcatctccaatttcagcttctagtccaacacaaatagatttctcctcttcaccatctacaaatggaatgttcaccctaactaccaatggggacctacccaaaccaatattcatccccaatggaatgccaaacactgttgtgccatgtggaactgagaagaacttcacaaatggaatggttaatggtcacatgccatctcttcctgacagcccctttacaggttacatcattgcagtccaccgaaaaatgatgaggacagaactgtatttcctgtcacctcaggagaatcgccccagcctctttggaatgccattgattgttccatgcactgtgcatacccggaagaaagacctatatgatgcggtttggattcaagtatcctggttagcaagaccactcccacctcaggaagctagtattcatgcccaggatcgtgataactgtatgggctatcaatatccattcactctacgagttgtgcagaaagatgggaactcctgtgcttggtgcccacagtatagattttgcagaggctgtaaaattgattgtggggaagacagagctttcattggaaatgcctatattgctgtggattggcaccccacagcccttcaccttcgctatcaaacatcccaggaaagggttgtagataagcatgagagtgtggagcagagtcggcgagcgcaagccgagcccatcaacctggacagctgtctccgtgctttcaccagtgaggaagagctaggggaaagtgagatgtactactgttccaagtgtaagacccactgcttagcaacaaagaagctggatctctggaggcttccacccttcctgattattcaccttaagcgatttcaatttgtaaatgatcagtggataaaatcacagaaaattgtcagatttcttcgggaaagttttgatccgagtgcttttttggtaccacgagacccggccctctgccagcataaaccactcacaccccagggggatgagctctccaagcccaggattctggcaagagaggtgaagaaagtggatgcgcagagttcggctggaaaagaggacatgctcctaagcaaaagcccatcctcactcagcgctaacatcagcagcagcccaaaaggttctccttcttcatcaagaaaaagtggaaccagctgtccctccagcaaaaacagcagccctaatagcagcccacggactttggggaggagcaaagggaggctccggctgccccagattggcagcaaaaataagccgtcaagtagtaagaagaacttggatgccagcaaagagaatggggctgggcagatctgtgagctggctgacgccttgagccgagggcatatgcgggggggcagccaaccagagctggtcactcctcaggaccatgaggtagctttggccaatggattcctttatgagcatgaagcatgtggcaatggctgtggcgatggctacagcaatggtcagcttggaaaccacagtgaagaagacagcactgatgaccaaagagaagacactcatattaagcctatttataatctatatgcaatttcatgccattcaggaattctgagtgggggccattacatcacttatgccaaaaacccaaactgcaagtggtactgttataatgacagcagctgtgaggaacttcaccctgatgaaattgacaccgactctgcctacattcttttctatgagcagcaggggatagactacgcacaatttctgccaaagattgatggcaaaaagatggcagacacaagcagtacggatgaagactctgagtctgattacgaaaagtactctatgttacagtaaagctaccactctggctgctagacagcttggtggcgagggagatgactccttgtagctgatacttggcaaaagtgtcactgaaagacaagctaaatgtagttattttatcctgttagaacaaaaattctaattaaaatagttaacttgaagagtagaaacaattgtattttgaagtctcatacaagctgtctgatagagaactttcaggcagatcccaccattagcctgtaaacaaaaggtgtggcaccagccacctgggaccaaataagaattgaattgtgcttgtccagatatgaacaaatatgtagtgagtatagagtttaccaataatcataacaaatattaaagatttccttggagtcagaggaaaaaacaaacaattataatgttgtctagggacgacatgatacgctacctcctttttcctgaagttttattccattatattgacaagatggagaaagcaagatcatgaaggtgtgcaaatgattcttacggcatggacaaggatttttcaatttattttttaaactgtttccataccctttctttttcttgctttttgtttttgccattgtgtttacgtttgagacacaaccagtcattggtggcaggggcatagagtggtcagtctgaaagggaggctctcttaagagctatgtgccttccaaccagagggagacccagtagaaagaaaaacatcctgggaaatccagctaccagggccctcccagtggaggcatcttacatttaggctacttcaagtatcctcagaaatgtattctgcacccccggccccgcccatgctgagggaaggggagcagttgccaatatttgcaccatcttcacatgcacatgttgcaacaagagcttctgggaaggtaagcggcatcggagctagatcacgtttcacaattagtggttattcttttctgtgtttgttttgcactttaaaaaagagagaacacatgcaaatgaacttgcttgtgtgtatttgatggctctaagggctataaattacaaacaaaacacatcccagacattaggagttcataagtatatttaatgaaattggtggttttaggaagtcaactttagttttgctttgtttgcatgtccactggtttttttattttgatatttgtctttttttaaattttacagtagtcattgaaagttatgtttctttgcttacttcattttttccctctaattatttaagattggaacaaaagtataaatattatttatttgaggtagaatttttttcatgtagtttcttaatatatacttgaaggaaatgtttcaccttatttttggtctttgtttattcatttagaccctgcaagttgattctcattgccagattccattaccctttcttcctcataggtagtaattaccaatgtaactaagcatttgtgttctgatatctgaggccagtaactattaatatctagttctcagagcatttggaaaggttatcttaaatggctacctaaattgaaatccttttcagaaaaaatataattgcaagtaggtaggagtggcctaaattgtctaatgtaataaagtcagacaaaatgcacactttatagtttcaagattttcagtaaataaaatctgtccattcctacctggacatgtcccattaaaaagtggaagattttaaataatttctttacagatgttttatttaaacaggtagcacaatctactaatgttgtgtgatttgtgttatactggttgtaattaatttttttaattcatgaactagcggaaaatttattaaattaactattaactacattcaccttgtaaattactgtataaaacttgttgacaatgcactgactttagaaagatgttaatgtacataaatagagtgtaaataaaatagtgttgatgtactgaaatatgaactgtatcaaaagtattggtaattgtatatggggtgtacctgtttatctgttaactattatccaaacaaattaaatactgtggttgcctctatgtgctgtttttcctcatacaagtaaacacagaaagtc

SEQ ID NO: 115602 - DNA, 572 bp, Artificial Sequence
  derived and/or modified sequence
gtctgtgttctacggcagttacacacacgcagtggtattcacaagcggttttgtggactcaaaggttttctccctgagaggcataacccaggccagctgattcatcagaatcaggaaactgggcatctctgtggccctgaacatcccaggaggccgatcgtacagagacctctggtgcctgaccgcagttcacatccacatccctggaatagaccatcacaggctcttcacccttggcaggtggacaccattcaacctgccggggcaggatggacatggtagagaatgcagatagtttgcaggcacaggagcggaaggacatacttatgaagtatgacaagggacaccgagctgggctgccagaggacaaggggagcccgttggaatcaacagcagcattgatcgttttggcattttgcatgagacggagctgcctcctgtgactgcacgggaggcgaagaaaattcggcgggagatgacaccgtgctcaagcatcttagggcctctacgaagaaactaacaaggaagcaaggggacctgccacccccagccaaacgcgagcaagggtcctt

SEQ ID NO: 115603 - protein, 457 aa, Artificial Sequence
  derived and/or modified sequence
MVSKLTSLQQELLSALLSSGVTKEVLVQALEELLPSPNFGVKLETLPLSPGSGAEPDTKPVFHTLTNGHAKGRLSGDEGSEDGDDYDTPPILKELQALNTEEAAEQRAEVDRMLSEDPWRAAKMIKGYMQQHNIPQREVVDVTGLNQSHLSQHLNKGTPMKTQKRAALYTWYVRKQREILRQFSQQSHGPGQSDDACSEPTNKKMRRNRFKWGPASQQILYQAYDRQKNPSKEEREALVEECNRAECLQRGVSPSKAHGLGSNLVTEVRVYNWFANRRKEEAFRQKLAMDAYSSNQTHSLNPLLSHGSPHHQPSSSPPNKLSGVRYSQQGNNEITSSSTISHHGNSAMVTSQSVLQQVSPASLDPGHNLLSPDGKMISVSGGGLPPVSTLTNIHSLSHHNPQQSQNLIMTPLSGVMAIAQMSSTSLVMPTHHLLRAQQQGPCFPHHHPLGSCHGKAQ

SEQ ID NO: 115604 - DNA, 1374 bp, Artificial Sequence
  derived and/or modified sequence
atggtgagcaagctgaccagcctgcagcaggagctgctgagcgccctgctgagcagcggcgtgaccaaggaggtgctggtgcaggccctggaggagctgctgcccagccccaacttcggcgtgaagctggagaccctgcccctgagccccggcagcggcgccgagcccgacaccaagcccgtgttccacaccctgaccaacggccacgccaagggcagactgagcggcgacgagggcagcgaggacggcgacgactacgacaccccccccatcctgaaggagctgcaggccctgaacaccgaggaggccgccgagcagagagccgaggtggacagaatgctgagcgaggacccctggagagccgccaagatgatcaagggctacatgcagcagcacaacatcccccagagagaggtggtggacgtgaccggcctgaaccagagccacctgagccagcacctgaacaagggcacccccatgaagacccagaagagagccgccctgtacacctggtacgtgagaaagcagagagagatcctgagacagttcagccagcagagccacggccccggccagagcgacgacgcctgcagcgagcccaccaacaagaagatgagaagaaacagattcaagtggggccccgccagccagcagatcctgtaccaggcctacgacagacagaagaaccccagcaaggaggagagagaggccctggtggaggagtgcaacagagccgagtgcctgcagagaggcgtgagccccagcaaggcccacggcctgggcagcaacctggtgaccgaggtgagagtgtacaactggttcgccaacagaagaaaggaggaggccttcagacagaagctggccatggacgcctacagcagcaaccagacccacagcctgaaccccctgctgagccacggcagcccccaccaccagcccagcagcagcccccccaacaagctgagcggcgtgagatacagccagcagggcaacaacgagatcaccagcagcagcaccatcagccaccacggcaacagcgccatggtgaccagccagagcgtgctgcagcaggtgagccccgccagcctggaccccggccacaacctgctgagccccgacggcaagatgatcagcgtgagcggcggcggcctgccccccgtgagcaccctgaccaacatccacagcctgagccaccacaacccccagcagagccagaacctgatcatgacccccctgagcggcgtgatggccatcgcccagatgagcagcaccagcctggtgatgcccacccaccacctgctgagagcccagcagcagggcccctgcttcccccaccaccaccccctgggcagctgccacggcaaggcccagtag

SEQ ID NO: 115605 - DNA, 1374 bp, Artificial Sequence
  derived and/or modified sequence
atggtatctaaactgacaagtctacagcaggaactgctgtccgcactgctgtcttccggagttaccaaagaggtactggtccaggctctggaagaattgctcccaagcccaaatttcggagtgaaactggagacattgccattgagccccggaagcggagccgagccagatactaaacccgtctttcacaccttgactaatggacatgccaagggaaggctgagcggcgatgagggaagcgaagatggcgatgactatgacacccctcccattctgaaggagcttcaagccctgaataccgaggaggccgccgagcaacgcgctgaagttgatcgcatgttgtccgaggacccatggcgggccgcaaagatgatcaaaggatatatgcagcaacacaatattcctcagagagaggtggtggatgtcactggactcaatcaatctcatctgagccagcatcttaacaaaggaactccgatgaagacacaaaaacgagccgccctgtacacctggtatgtgaggaaacagagagaaattttgcggcagttctctcaacaaagccacggacctggacaaagtgacgatgcttgtagcgaacccacaaacaagaaaatgcgtcggaacagattcaagtgggggccagcctcccagcagatcctgtatcaagcctacgacagacaaaaaaatccctcaaaagaggaacgggaagccctcgtggaagaatgcaatagagccgaatgcctgcagcgcggcgtgagcccatctaaggcgcacggactcggatccaatctggtcactgaggtcagagtttataattggttcgcaaacagacgaaaggaggaagccttcaggcagaaactggccatggatgcttattcaagcaatcaaacccactcgctcaacccactgttgagtcacggaagtcctcaccaccagccctcttcctcacccccaaataaactttctggtgtgagatattcacaacagggcaacaatgaaattacgtcctctagcactatctcacatcatggaaactcggccatggtcacaagtcaaagcgtcctgcagcaagtatccccggcctctctcgatcccgggcacaaccttctaagccctgatggaaaaatgatcagcgtcagcggcggaggactccctccagtcagtactttaactaacatccactccttgtcacaccacaatccgcaacagagtcagaatctcatcatgacccctttgtcaggagtgatggccatcgcccagatgagctccacgagtctggtcatgccaacccaccacctgctgagagcccagcagcagggtccctgttttccgcaccatcacccactcggaagctgccacggaaaagcccaatag

SEQ ID NO: 115606 - DNA, 1546 bp, Artificial Sequence
  derived and/or modified sequence
ggggagtaacaggtgtctggaggctgaagggtggaggggttcctggatttggggtttgcttgtgaaactcccctccaccctcctctctcgcacccacccaccccctcacccccttctttttccgtccttggaaaatggtgtccaagctcacgtcgctccagcaagaactcctgagcgccctgctgagctccggggtcaccaaggaggtgctggttcaggccttggaggagttgctgccatccccgaacttcggggtgaagctggagacgctgcccctgtcccctggcagcggggccgagcccgacaccaagccggtcttccatactctcaccaacggccacgccaagggccgcttgtccggcgacgagggctccgaggacggcgacgactatgacacacctcccatcctcaaggagctgcaggcgctcaacaccgaggaggcggcggagcagcgggcggaggtggaccggatgctcagtgaggacccttggagggctgctaaaatgatcaagggttacatgcagcaacacaacatcccccagagggaggtggtcgatgtcaccggcctgaaccagtcgcacctctcccagcatctcaacaagggcacccctatgaagacccagaagcgtgccgctctgtacacctggtacgtcagaaagcaacgagagatcctccgacagttcagtcaacagagccatgggcctgggcagtccgatgatgcctgctctgagcccaccaacaagaagatgcgccgcaaccggttcaaatgggggcccgcgtcccagcaaatcttgtaccaggcctacgatcggcaaaagaaccccagcaaggaagagagagaggccttagtggaggaatgcaacagggcagaatgtttgcagcgaggggtgtccccctccaaagcccacggcctgggctccaacttggtcactgaggtccgtgtctacaactggtttgcaaaccgcaggaaggaggaggcattccggcaaaagctggccatggacgcctatagctccaaccagactcacagcctgaaccctctgctctcccacggctccccccaccaccagcccagctcctctcctccaaacaagctgtcaggagtgcgctacagccagcagggaaacaatgagatcacttcctcctcaacaatcagtcaccatggcaacagcgccatggtgaccagccagtcggttttacagcaagtctccccagccagcctggacccaggccacaatctcctctcacctgatggtaaaatgatctcagtctcaggaggaggtttgcccccagtcagcaccttgacgaatatccacagcctctcccaccataatccccagcaatctcaaaacctcatcatgacacccctctctggagtcatggcaattgcacaaatgtcctctacaagcctggtgatgcccacacaccacttacttcgtgcgcaacaacaaggaccctgttttccacaccatcaccctctgggcagctgtcatggaaaagcccagtgacctgaccggcacctgcgagaggtccctgcttacctgac

SEQ ID NO: 115607 - DNA, 1374 bp, Artificial Sequence
  derived and/or modified sequence
atggtgtccaagctgaccagcctgcagcaggagctgctgagcgccctgctgagcagtggagtgaccaaggaggtgctggtgcaggccctggaggagctgctgcccagccccaactttggagtgaagctggagaccctgcccctgagccctggcagcggggctgagccagacaccaagcctgtgttccacaccctgaccaatggacatgccaagggccgcctgtctggagatgagggctctgaagatggagatgattatgacaccccacccatcctgaaggagctgcaggccctgaacacagaggaggccgctgagcagagagctgaggtggacaggatgctgtctgaggacccctggagggctgccaagatgatcaagggctacatgcagcagcacaacatcccccagcgggaggtggtggatgtgacaggcctgaaccagagccacctgagccagcacctgaacaagggcacccccatgaagacccagaagagagctgccctgtacacctggtacgtgaggaagcagcgggagatcctgcggcagttcagccagcagagccacggccctggccagagtgatgatgcctgcagcgagcccaccaacaagaagatgagaagaaaccgcttcaagtggggccctgccagccagcagatcctgtaccaggcctatgaccggcagaagaaccccagcaaggaggagcgggaggccctggtggaggagtgcaacagagctgagtgcctgcagaggggcgtgagccccagcaaggcccacggcctgggcagcaacctggtgacagaggtgcgggtgtacaactggtttgccaacagaaggaaggaggaggccttccggcagaagctggccatggatgcctacagcagcaaccagacccacagcctgaaccccctgctgagccacggcagcccccaccaccagcccagcagcagcccccccaacaagctgagcggcgtgcgctacagccagcagggcaacaatgagatcaccagcagcagcaccatcagccaccacggcaacagcgccatggtgaccagccagagcgtgctgcagcaggtgtccccagccagcctggaccccggccacaacctgctgagcccagatggcaagatgatctctgtgtctgggggcggcctgccccctgtgtccaccctgaccaacatccacagcctgagccaccacaacccccagcagagccagaacctgatcatgacccccctgtctggagtgatggccatcgcccagatgagcagcaccagcctggtgatgcccacccaccacctgctgcgggcccagcagcagggcccctgcttcccccaccaccaccccctgggcagctgccacggcaaggcccagtag

SEQ ID NO: 115608 - DNA, 1374 bp, Artificial Sequence
  derived and/or modified sequence
atggtgagcaagctgaccagcctgcagcaggagctgctgagcgccctactctcctctggcgtgaccaaggaagtgctagtccaggcactcgaagagttactcccctctccaaactttggggtcaagctggagacccttccgctgagtcctggtagcggagcagaaccagatacaaaacctgtttttcatactctcaccaatgggcacgctaaggggaggttgtccggagacgaaggcagcgaggatggcgacgactatgatacgccacctatcctgaaggagctgcaggccctgaacacagaagaggccgctgaacaaagagcagaagttgataggatgctgagcgaggatccatggagagcagccaagatgattaaaggctatatgcaacagcataacatccctcagagggaagtggtcgacgtgactggcctcaaccaaagtcacttgtcgcagcacttaaacaaaggtacccctatgaaaacacagaaacgggcagccctgtacacttggtacgtccgcaagcagagggagatccttcgccagttctcacagcagagccacggcccaggccagtccgatgacgcatgttcagaacctacaaacaagaagatgcgccggaataggtttaaatggggcccagcctcccaacagattctctaccaagcatatgacagacagaagaatcccagcaaggaagagcgcgaggccctcgtcgaagagtgcaatcgtgccgagtgtttgcagaggggtgtttcgccttcaaaggcccatgggctggggtctaatcttgttacagaagtcagggtttacaattggtttgcaaataggagaaaggaggaggcttttcgccaaaaactggccatggacgcctatagctcgaatcagacacattcccttaaccccctgctatctcacggcagccctcatcaccagccaagttcaagccctcctaacaagctgagtggggtcagatatagccaacaggggaacaatgagatcactagtagcagtactatatcacaccacggaaactctgcgatggtgaccagccagtcggtactgcagcaagtgtctccagcctcacttgacccagggcacaatctcctttctcctgatggcaagatgatctccgtgagcggaggtggcttgccacctgtgagcaccctaaccaatattcactcactgagccatcataatcctcagcaatcccagaatctgatcatgactcccttgagcggggtgatggctatcgcccagatgtccagtacctccttagtgatgcctactcatcacctgctccgcgctcagcaacagggaccttgttttccacatcaccaccccctgggctcttgtcatggaaaggctcagtag

SEQ ID NO: 115609 - DNA, 1374 bp, Artificial Sequence
  derived and/or modified sequence
atggtaagtaagctgacctccttgcaacaggagctgctctctgcgttgctatcttcgggagtgaccaaggaagtgctggttcaggccctggaggaactgcttccaagcccaaatttcggggtcaaactagagacgctaccattgagtccaggaagcggcgctgaacccgacaccaaacctgtgttccacaccttaactaatggacacgctaagggccgtctgtcaggcgatgagggatccgaggacggagacgactacgacactcctcccatcttgaaggagcttcaagccttaaatacagaggaagccgcagaacagcgggctgaggtggacaggatgttgtcagaggatccctggcgagctgccaaaatgattaagggatatatgcagcaacataatataccacagagggaggttgtggatgtgacgggcttgaatcagagccacttgtcccaacacctgaataaagggactccaatgaagacacagaagagagccgcactttatacctggtacgtacgcaaacaacgggagatcctgagacagttctcccaacaaagtcatggccctgggcagtccgacgacgcgtgctctgagcctactaataaaaagatgcgacgaaatcggttcaagtgggggcctgcctcacagcagattctttaccaagcctatgacaggcagaagaatccgtctaaggaagagagggaggccctcgtcgaagagtgtaatagagctgagtgccttcagcgcggagtgagcccttccaaggcccacggcctgggctctaacctggttactgaagtcagagtttacaattggttcgccaaccgacggaaagaagaagcattccggcagaaactggctatggacgcatacagttctaatcagacgcactcactgaatcccctgctcagtcacggtagcccccaccaccaacctagcagttcacctcctaacaagttatccggggtcagatactctcagcagggcaataatgaaataacttccagctcaacaatttctcatcacggtaatagcgcaatggtcacatctcaatctgtccttcagcaggtgagtccagcaagcctcgatcctggtcacaacctcctcagtcctgacgggaagatgataagcgtgagcggaggcggtctgccacctgtcagtacactaacaaatatacattccttgtcccaccacaacccacagcagtcccagaatctgatcatgactccactttcaggggttatggccatcgctcagatgagctccacttcccttgttatgccaacccaccatttactcagggctcagcaacaggggccatgcttccctcaccatcaccctctgggctcgtgtcacggcaaagctcagtag

SEQ ID NO: 115610 - protein, 1186 aa, Artificial Sequence
  derived and/or modified sequence
MCEVMPTINEGDRLGPPHGADADANFEQLMVNMLDEREKLLESLRESQETLAATQSRLQDAIHERDQLQRHLNSALPQEFATLTRELSMCREQLLEREEEISELKAERNNTRLLLEHLECLVSRHERSLRMTVVKRQAQSPSGVSSEVEVLKALKSLFEHHKALDEKVRERLRAALERVTTLEEQLAGAHQQVSALQQGAGVRDGAAEEEGTVELGPKRLWKEDTGRVEELQELLEKQNFELSQARERLVTLTTTVTELEEDLGTARRDLIKSEELSSKHQRDLREALAQKEDMEERITTLEKRYLAAQREATSIHDLNDKLENELANKESLHRQCEEKARHLQELLEVAEQKLQQTMRKAETLPEVEAELAQRIAALTKAEERHGNIEEHLRQLEGQLEEKNQELARVRQREKMNEDHNKRLSDTVDRLLSESNERLQLHLKERMAALEEKGRLSEEIEKLRQEVDQLKGRGGPFVDGVHSRSHMGSAADVRFSLGTTTHAPPGVHRRYSALREESAKDWETSPLPGMLAPAAGPAFDSDPEISDVDEDEPGGLVGSADVVSPSGHSDAQTLAMMLQEQLDAINEEIRMIQEEKESTELRAEEIETRVTSGSMEALNLKQLRKRGSIPTSLTALSLASASPPLSGRSTPKLTSRSAAQDLDRMGVMTLPSDLRKHRRKLLSPVSREENREDKATIKCETSPPSSPRTLRLEKLGHPALSQEEGKSALEDQGSNPSSSNSSQDSLHKGAKRKGIKSSIGRLFGKKEKGRLIQLSRDGATGHVLLTDSEFSMQEPMVPAKLGTQAEKDRRLKKKHQLLEDARRKGMPFAQWDGPTVVSWLELWVGMPAWYVAACRANVKSGAIMSALSDTEIQREIGISNALHRLKLRLAIQEMVSLTSPSAPPTSRTSSGNVWVTHEEMETLETSTKTDSEEGSWAQTLAYGDMNHEWIGNEWLPSLGLPQYRSYFMECLVDARMLDHLTKKDLRVHLKMVDSFHRTSLQYGIMCLKRLNYDRKELEKRREESQHEIKDVLVWTNDQVVHWVQSIGLRDYAGNLHESGVHGALLALDENFDHNTLALILQIPTQNTQARQVMEREFNNLLALGTDRKLDDGDDKVFRRAPSWRKRFRPREHHGRGGMLSASAETLPAGFRVSTLGTLQPPPAPPKKIMPEAHSHYLYGHMLSAFRD

SEQ ID NO: 115611 - protein, 1185 aa, Artificial Sequence
  derived and/or modified sequence
MCEVMPTINEGDRLGPPHGADADANFEQLMVNMLDEREKLLESLRESQETLAATQSRLQDAIHERDQLQRHLNSALPQEFATLTRELSMCREQLLEREEEISELKAERNNTRLLLEHLECLVSRHERSLRMTVVKRQAQSPSGVSSEVEVLKALKSLFEHHKALDEKVRERLRAALERVTTLEEQLAGAHQQVSALQQGAGVRDGAAEEEGTVELGPKRLWKEDTGRVEELQELLEKQNFELSQARERLVTLTTTVTELEEDLGTARRDLIKSEELSSKHQRDLREALAQKEDMEERITTLEKRYLAAQREATSIHDLNDKLENELANKESLHRQCEEKARHLQELLEVAEQKLQQTMRKAETLPEVEAELAQRIAALTKAEERHGNIEEHLRQLEGQLEEKNQELARTAVQVRQREKMNEDHNKRLSDTVDRLLSESNERLQLHLKERMAALEEKNTLIQELESSQRQIEEQHHHKGRLSEEIEKLRQEVDQLKGRGGPFVDGVHSRSHMGSAADVRFSLGTTTHAPPGVHRRYSALREESAKLALPLTVTLRSPTWMRMSQGVCCNLEYHSSGTLCGSSGPLPVPEMIQEEKESTELRAEEIETRVTSGSMEALNLKQLRKRGSIPTSLTALSLASASPPLSGRSTPKLTSRSAAQDLDRMGVMTLPSDLRKHRRKLLSPVSREENREDKATIKCETSPPSSPRTLRLEKLGHPALSQEEGKSALEDQGSNPSSSNSSQDSLHKGAKRKGIKSSIGRLFGKKEKGRLIQLSRDGATGHVLLTDSEFSMQEPMVPAKLGTQAEKDRRLKKKHQLLEDARRKGMPFAQWDGPTVVSWLELWVGMPAWYVAACRANVKSGAIMSALSDTEIQREIGISNALHRLKLRLAIQEMVSLTSPSAPPTSRTSSGNVWVTHEEMETLETSTKTDSEEGSWAQTLAYGDMNHEWIGNEWLPSLGLPQYRSYFMECLVDARMLDHLTKKDLRVHLKMVDSFHRTSLQYGIMCLKRLNYDRKELEKRREESQHEIKDVLVWTNDQVVHWVQSIGLRDYAGNLHESGVHGALLALDENFDHNTLALILQIPTQNTQARQVMEREFNNLLALGTDRKLDDGDDKVFRRAPSWRKRFRPREHHGRGGMLSASAETLPAGFRVSTLGTLQPPPAPPKKIMPEAHSHYLYGHMLSAFRD

SEQ ID NO: 115612 - DNA, 3561 bp, Artificial Sequence
  derived and/or modified sequence
atgtgcgaggtgatgcccaccatcaacgagggcgacagactgggccccccccacggcgccgacgccgacgccaacttcgagcagctgatggtgaacatgctggacgagagagagaagctgctggagagcctgagagagagccaggagaccctggccgccacccagagcagactgcaggacgccatccacgagagagaccagctgcagagacacctgaacagcgccctgccccaggagttcgccaccctgaccagagagctgagcatgtgcagagagcagctgctggagagagaggaggagatcagcgagctgaaggccgagagaaacaacaccagactgctgctggagcacctggagtgcctggtgagcagacacgagagaagcctgagaatgaccgtggtgaagagacaggcccagagccccagcggcgtgagcagcgaggtggaggtgctgaaggccctgaagagcctgttcgagcaccacaaggccctggacgagaaggtgagagagagactgagagccgccctggagagagtgaccaccctggaggagcagctggccggcgcccaccagcaggtgagcgccctgcagcagggcgccggcgtgagagacggcgccgccgaggaggagggcaccgtggagctgggccccaagagactgtggaaggaggacaccggcagagtggaggagctgcaggagctgctggagaagcagaacttcgagctgagccaggccagagagagactggtgaccctgaccaccaccgtgaccgagctggaggaggacctgggcaccgccagaagagacctgatcaagagcgaggagctgagcagcaagcaccagagagacctgagagaggccctggcccagaaggaggacatggaggagagaatcaccaccctggagaagagatacctggccgcccagagagaggccaccagcatccacgacctgaacgacaagctggagaacgagctggccaacaaggagagcctgcacagacagtgcgaggagaaggccagacacctgcaggagctgctggaggtggccgagcagaagctgcagcagaccatgagaaaggccgagaccctgcccgaggtggaggccgagctggcccagagaatcgccgccctgaccaaggccgaggagagacacggcaacatcgaggagcacctgagacagctggagggccagctggaggagaagaaccaggagctggccagagtgagacagagagagaagatgaacgaggaccacaacaagagactgagcgacaccgtggacagactgctgagcgagagcaacgagagactgcagctgcacctgaaggagagaatggccgccctggaggagaagggcagactgagcgaggagatcgagaagctgagacaggaggtggaccagctgaagggcagaggcggccccttcgtggacggcgtgcacagcagaagccacatgggcagcgccgccgacgtgagattcagcctgggcaccaccacccacgccccccccggcgtgcacagaagatacagcgccctgagagaggagagcgccaaggactgggagaccagccccctgcccggcatgctggcccccgccgccggccccgccttcgacagcgaccccgagatcagcgacgtggacgaggacgagcccggcggcctggtgggcagcgccgacgtggtgagccccagcggccacagcgacgcccagaccctggccatgatgctgcaggagcagctggacgccatcaacgaggagatcagaatgatccaggaggagaaggagagcaccgagctgagagccgaggagatcgagaccagagtgaccagcggcagcatggaggccctgaacctgaagcagctgagaaagagaggcagcatccccaccagcctgaccgccctgagcctggccagcgccagcccccccctgagcggcagaagcacccccaagctgaccagcagaagcgccgcccaggacctggacagaatgggcgtgatgaccctgcccagcgacctgagaaagcacagaagaaagctgctgagccccgtgagcagagaggagaacagagaggacaaggccaccatcaagtgcgagaccagcccccccagcagccccagaaccctgagactggagaagctgggccaccccgccctgagccaggaggagggcaagagcgccctggaggaccagggcagcaaccccagcagcagcaacagcagccaggacagcctgcacaagggcgccaagagaaagggcatcaagagcagcatcggcagactgttcggcaagaaggagaagggcagactgatccagctgagcagagacggcgccaccggccacgtgctgctgaccgacagcgagttcagcatgcaggagcccatggtgcccgccaagctgggcacccaggccgagaaggacagaagactgaagaagaagcaccagctgctggaggacgccagaagaaagggcatgcccttcgcccagtgggacggccccaccgtggtgagctggctggagctgtgggtgggcatgcccgcctggtacgtggccgcctgcagagccaacgtgaagagcggcgccatcatgagcgccctgagcgacaccgagatccagagagagatcggcatcagcaacgccctgcacagactgaagctgagactggccatccaggagatggtgagcctgaccagccccagcgccccccccaccagcagaaccagcagcggcaacgtgtgggtgacccacgaggagatggagaccctggagaccagcaccaagaccgacagcgaggagggcagctgggcccagaccctggcctacggcgacatgaaccacgagtggatcggcaacgagtggctgcccagcctgggcctgccccagtacagaagctacttcatggagtgcctggtggacgccagaatgctggaccacctgaccaagaaggacctgagagtgcacctgaagatggtggacagcttccacagaaccagcctgcagtacggcatcatgtgcctgaagagactgaactacgacagaaaggagctggagaagagaagagaggagagccagcacgagatcaaggacgtgctggtgtggaccaacgaccaggtggtgcactgggtgcagagcatcggcctgagagactacgccggcaacctgcacgagagcggcgtgcacggcgccctgctggccctggacgagaacttcgaccacaacaccctggccctgatcctgcagatccccacccagaacacccaggccagacaggtgatggagagagagttcaacaacctgctggccctgggcaccgacagaaagctggacgacggcgacgacaaggtgttcagaagagcccccagctggagaaagagattcagacccagagagcaccacggcagaggcggcatgctgagcgccagcgccgagaccctgcccgccggcttcagagtgagcaccctgggcaccctgcagcccccccccgccccccccaagaagatcatgcccgaggcccacagccactacctgtacggccacatgctgagcgccttcagagactag

SEQ ID NO: 115613 - DNA, 3558 bp, Artificial Sequence
  derived and/or modified sequence
atgtgcgaggtgatgcccaccatcaacgagggcgacagactgggccccccccacggcgccgacgccgacgccaacttcgagcagctgatggtgaacatgctggacgagagagagaagctgctggagagcctgagagagagccaggagaccctggccgccacccagagcagactgcaggacgccatccacgagagagaccagctgcagagacacctgaacagcgccctgccccaggagttcgccaccctgaccagagagctgagcatgtgcagagagcagctgctggagagagaggaggagatcagcgagctgaaggccgagagaaacaacaccagactgctgctggagcacctggagtgcctggtgagcagacacgagagaagcctgagaatgaccgtggtgaagagacaggcccagagccccagcggcgtgagcagcgaggtggaggtgctgaaggccctgaagagcctgttcgagcaccacaaggccctggacgagaaggtgagagagagactgagagccgccctggagagagtgaccaccctggaggagcagctggccggcgcccaccagcaggtgagcgccctgcagcagggcgccggcgtgagagacggcgccgccgaggaggagggcaccgtggagctgggccccaagagactgtggaaggaggacaccggcagagtggaggagctgcaggagctgctggagaagcagaacttcgagctgagccaggccagagagagactggtgaccctgaccaccaccgtgaccgagctggaggaggacctgggcaccgccagaagagacctgatcaagagcgaggagctgagcagcaagcaccagagagacctgagagaggccctggcccagaaggaggacatggaggagagaatcaccaccctggagaagagatacctggccgcccagagagaggccaccagcatccacgacctgaacgacaagctggagaacgagctggccaacaaggagagcctgcacagacagtgcgaggagaaggccagacacctgcaggagctgctggaggtggccgagcagaagctgcagcagaccatgagaaaggccgagaccctgcccgaggtggaggccgagctggcccagagaatcgccgccctgaccaaggccgaggagagacacggcaacatcgaggagcacctgagacagctggagggccagctggaggagaagaaccaggagctggccagaaccgccgtgcaggtgagacagagagagaagatgaacgaggaccacaacaagagactgagcgacaccgtggacagactgctgagcgagagcaacgagagactgcagctgcacctgaaggagagaatggccgccctggaggagaagaacaccctgatccaggagctggagagcagccagagacagatcgaggagcagcaccaccacaagggcagactgagcgaggagatcgagaagctgagacaggaggtggaccagctgaagggcagaggcggccccttcgtggacggcgtgcacagcagaagccacatgggcagcgccgccgacgtgagattcagcctgggcaccaccacccacgccccccccggcgtgcacagaagatacagcgccctgagagaggagagcgccaagctggccctgcccctgaccgtgaccctgagaagccccacctggatgagaatgagccagggcgtgtgctgcaacctggagtaccacagcagcggcaccctgtgcggcagcagcggccccctgcccgtgcccgagatgatccaggaggagaaggagagcaccgagctgagagccgaggagatcgagaccagagtgaccagcggcagcatggaggccctgaacctgaagcagctgagaaagagaggcagcatccccaccagcctgaccgccctgagcctggccagcgccagcccccccctgagcggcagaagcacccccaagctgaccagcagaagcgccgcccaggacctggacagaatgggcgtgatgaccctgcccagcgacctgagaaagcacagaagaaagctgctgagccccgtgagcagagaggagaacagagaggacaaggccaccatcaagtgcgagaccagcccccccagcagccccagaaccctgagactggagaagctgggccaccccgccctgagccaggaggagggcaagagcgccctggaggaccagggcagcaaccccagcagcagcaacagcagccaggacagcctgcacaagggcgccaagagaaagggcatcaagagcagcatcggcagactgttcggcaagaaggagaagggcagactgatccagctgagcagagacggcgccaccggccacgtgctgctgaccgacagcgagttcagcatgcaggagcccatggtgcccgccaagctgggcacccaggccgagaaggacagaagactgaagaagaagcaccagctgctggaggacgccagaagaaagggcatgcccttcgcccagtgggacggccccaccgtggtgagctggctggagctgtgggtgggcatgcccgcctggtacgtggccgcctgcagagccaacgtgaagagcggcgccatcatgagcgccctgagcgacaccgagatccagagagagatcggcatcagcaacgccctgcacagactgaagctgagactggccatccaggagatggtgagcctgaccagccccagcgccccccccaccagcagaaccagcagcggcaacgtgtgggtgacccacgaggagatggagaccctggagaccagcaccaagaccgacagcgaggagggcagctgggcccagaccctggcctacggcgacatgaaccacgagtggatcggcaacgagtggctgcccagcctgggcctgccccagtacagaagctacttcatggagtgcctggtggacgccagaatgctggaccacctgaccaagaaggacctgagagtgcacctgaagatggtggacagcttccacagaaccagcctgcagtacggcatcatgtgcctgaagagactgaactacgacagaaaggagctggagaagagaagagaggagagccagcacgagatcaaggacgtgctggtgtggaccaacgaccaggtggtgcactgggtgcagagcatcggcctgagagactacgccggcaacctgcacgagagcggcgtgcacggcgccctgctggccctggacgagaacttcgaccacaacaccctggccctgatcctgcagatccccacccagaacacccaggccagacaggtgatggagagagagttcaacaacctgctggccctgggcaccgacagaaagctggacgacggcgacgacaaggtgttcagaagagcccccagctggagaaagagattcagacccagagagcaccacggcagaggcggcatgctgagcgccagcgccgagaccctgcccgccggcttcagagtgagcaccctgggcaccctgcagcccccccccgccccccccaagaagatcatgcccgaggcccacagccactacctgtacggccacatgctgagcgccttcagagactag

SEQ ID NO: 115614 - DNA, 3561 bp, Artificial Sequence
  derived and/or modified sequence
atgtgcgaggtgatgccgaccattaatgaaggtgatcgcttaggccccccacacggcgctgacgcagatgcaaacttcgaacaattgatggtaaatatgctggacgagcgcgagaaactactggagagcctaagggaatctcaggagacactggccgctactcaaagccgtttgcaggatgctattcacgaaagagatcagctgcagaggcatttgaatagtgccttgccccaggaatttgctaccctcacacgcgaattgagcatgtgtagagagcagctactggaaagagaagaggagatcagtgagctgaaagcagagaggaacaatactcggctgctcctagagcacctcgagtgcctggtgtcgcgtcacgagaggagtctccgtatgaccgtggttaaacgtcaggcacagtccccgtctggagtatccagtgaagtggaggtcctgaaagcattgaaaagtcttttcgagcaccacaaagccctcgacgaaaaagtaagggagaggctccgcgcagccctggagcgcgtaacaaccctggaagaacagctcgcgggcgctcatcagcaggtgagcgcacttcagcagggggcgggtgttcgggacggcgctgcagaagaggaaggtaccgtggagctaggcccaaagcgcctgtggaaggaggacactgggcgcgtggaagagctacaggaactgctcgaaaaacagaatttcgagctgtcccaggcccgtgagcgactggtcacattaaccaccacagtcaccgaacttgaggaggatttggggacagcacggcgcgacctaataaaatcagaagagctctcctctaaacaccagcgcgatctccgtgaagcgctggcccagaaggaggatatggaagagcggatcactacactagagaaacgatatcttgctgctcaaagagaagccacctcaatccatgacctcaacgataaactggagaacgagctagccaataaagagagtctgcaccggcagtgtgaggagaaagcacgacacctgcaggaacttctcgaagtggcagagcagaaacttcagcagactatgcgaaaggccgagacactccctgaggtggaggccgaactggcccaacggatcgcggctctaactaaagccgaggaaaggcatggcaatattgaggagcacctgcgacaactggagggacagctggaggagaagaaccaagaactcgcgcgcgtgcgtcagcgcgaaaagatgaacgaggatcataacaaaaggctgtccgacacagtggacagattgctttccgaatctaatgagcggctacaactgcatctaaaagagcggatggctgcactggaagaaaaggggcggttgagtgaagaaatcgagaagctgcggcaggaagtggatcagctcaagggccggggtggtccatttgtggatggagtccacagccggtcccacatgggcagcgcggccgatgtcaggttttcattgggaacgaccacccacgcaccccccggtgtccaccgcaggtattcagctttacgcgaggagtcggccaaagattgggaaacttctccgctgcctggcatgctggcgcctgcagcgggaccagccttcgacagcgacccggagatttctgacgtagatgaagatgagccgggcggactggtgggttcagccgacgtggtttcgccctctggacacagtgacgcccagactcttgcaatgatgctccaggaacagttggacgctattaatgaagaaatccgcatgatacaggaggagaaggaatctacagagctgcgcgctgaagaaattgaaaccagagttacttccggcagtatggaggcactgaacttgaagcagctgcggaaacgtggcagcatacccacatctctcaccgccctgagccttgcttctgcctcacctcccctgtctggtaggtcaactcccaagctaacatcacggagcgccgcacaagatctggatagaatgggcgtgatgacactaccaagtgatctgcggaagcacagacggaagctcttatcacccgtgtctagggaggaaaaccgtgaggataaggccactatcaagtgtgaaaccagccctcctagctccccaagaacactgaggctggaaaagcttggtcaccccgccctcagccaggaagagggcaaatctgccttggaggaccagggctctaatccatcatcgtctaacagcagccaggatagcctacacaagggagctaagaggaagggcatcaagtcatcaatcggccggttgttcggtaagaaagagaaggggcggctcatccagctcagtcgtgacggagctacaggccatgttctgttaaccgactcggaatttagcatgcaggagcccatggtgcccgctaaactgggcactcaggcagagaaggaccggcgtctcaagaaaaaacaccagttgctggaggacgcccgcaggaagggcatgccctttgcacaatgggacggccctaccgttgtgagctggctggagctgtgggtgggaatgccggcttggtatgttgctgcatgcagagccaacgtgaaatccggcgcgataatgtccgccttaagtgacacagagatccagagggagatcggtatctcaaacgccctgcacaggctcaagctgcgcctggcaattcaggagatggtctcccttacatcccccagtgctccccctacctcacggaccagttccggaaatgtatgggttacccacgaggagatggaaaccctggagacatcgaccaagaccgattccgaggaagggagctgggctcagactctcgcctacggtgatatgaaccatgaatggataggcaacgagtggctgccctctttgggcttgccacagtatcggtcctatttcatggagtgcctcgtggacgctagaatgctggaccacctcactaagaaggaccttcgggtccatctgaagatggtggactcatttcatcgcacctcactccaatacggaatcatgtgcctgaagagactcaactatgacagaaaagaactggaaaagaggcgggaagagagtcagcacgaaatcaaagacgtgttggtgtggacgaacgaccaagtggtgcactgggtccagtctattggactgagggactatgccggcaacctgcatgagagcggagttcacggtgccctgttggcattggacgaaaatttcgaccacaacacacttgccctcatcttgcaaatccccacacaaaacactcaagcaaggcaagtcatggagcgtgagtttaataatctactcgcactcggaaccgatcggaaactggatgatggggatgataaagtgttccgcagggccccaagctggcggaagcgattcagacccagagaacatcacggccggggcggtatgctgagtgcttccgcagaaaccctcccggcgggcttcagagtatccaccctgggaaccttacagccacctcctgccccccctaaaaaaataatgccagaggcacactcacactacctgtatgggcacatgctgagcgcttttcgtgattag

SEQ ID NO: 115615 - DNA, 6434 bp, Artificial Sequence
  derived and/or modified sequence
cgcgcttgggcggcggaggctgcagctacctcggcgccggctcggctctaggacgtgtcgggctgcacgggtcgggggcggctccctgctgcttccgagcctagccgcctggccttcggcatttgcagacacactgccctccagaaacgatgggtgtcgctagatccagctgggactctgccagcctccggcactcagtctaagagaagggccatcttccagccctgctgtccctgcctgtcatggccacattcggctgctgtctgcatgtctggggacacagggcacccagccccagccctgagaagttaagccaggccttctggctcagttccacaggggcactccagaccccaggcccctttcagagcaaaagcaactgatgctatgggagaagcccctgcccacctgtccactcgcctggcactgcccactctgagacccatgcactgggttcccctggaggtgccaaccctgtgagtccctccctgtcccctgacgctgagaaggccctgccaacccccaccatgtgtgaggtgatgcccacaatcaatgagggggaccgcctgggtccccctcatggcgccgatgctgacgccaacttcgagcagctgatggtgaacatgctggacgagcgggagaagttgctggagtctcttcgggagagtcaggagaccttggcggccacacagagccggctccaggatgccatacacgagcgggaccagctccagcgccaccttaactccgccctcccccaggaatttgccaccttaacccgggagctgagcatgtgtcgggagcagcttctagagcgggaggaagagatatcagaactgaaagcagaacggaataacacacggctgcttctggaacatctggagtgcctggtgtcccgccatgaacggtcactgcggatgactgtggtgaagcgccaggcccagtcaccttcgggggtctccagtgaggtggaggtgctgaaggccctcaagtcactgtttgagcaccacaaggccctggatgagaaggtgcgagagcggctccgggcagcgctggagcgagtcaccaccttggaggagcagctggcaggtgcccaccagcaggtgtctgccctgcagcagggggcaggggtgcgggatggagcggcagaagaggaggggactgtggagctggggccgaaacgcctgtggaaggaggatacgggccgggtagaggagctgcaggagctcctggagaagcagaactttgagttgagccaggcccgggagcgactggtcaccctaacaacaaccgtgactgaactcgaggaggacctgggcacggcccgccgggacctcatcaagtcggaggagctgagcagcaagcatcagcgggacctccgggaggctctggcccagaaggaggacatggaagagcggattactacactggagaagcgctacctggctgctcagcgtgaggcaacatccatccatgacctcaatgacaagctggagaatgagctggccaacaaggagtccctgcaccgccagtgtgaggagaaggcccgacacctgcaggagctgctggaggtggcagagcagaagctgcagcagacgatgcgcaaggcagagacgctgccagaggtggaggctgagctggcccagagaattgcagccctcaccaaggctgaagaacggcatggcaacattgaggagcacctgcggcagctggagggacagctggaggagaagaaccaggagctggcacgggtgcgccagcgggaaaagatgaatgaggaccacaacaagcggctgtcggacacagtggaccggctgctcagcgagtccaacgagcgtctgcagctccacctgaaggagcgcatggctgccctggaggagaagggccgcctgtctgaagagattgagaagctgcgccaagaggtggaccagctgaagggccgaggggggccgtttgtggatggcgtccactccaggtcgcacatgggcagtgcagcagacgtgcggttctccctgggcacaaccacacacgcacccccaggcgtgcatcgccgctactcggcattgagggaagagtctgccaaggactgggagacttctccactgcctgggatgctggccccggcagctggccctgcctttgacagtgaccctgagatctccgacgtggatgaggatgagccagggggtctggtgggctctgcggatgttgtctcccccagcggccactcagatgcccagaccctggccatgatgctgcaggagcagctggatgccatcaatgaggaaatcaggatgattcaggaagagaaggagtccacggagctccgcgcggaggagattgagacgcgtgtaaccagtggcagcatggaagccctaaacctgaagcagctgcgcaagcgtggttccatccccacctctctgacggccctgtccctggccagcgcgtccccaccactcagcggccgctccacacctaagctcacctcccgcagtgctgcccaggacctggaccgaatgggggtcatgaccctgcccagtgacttaagaaagcataggaggaagctgctgtcgccagtgtctcgggaagagaaccgagaggataaagccaccataaaatgtgagacttctcctccttcctcacccaggacgctgcggctagagaagcttggccacccagccctgagccaggaagaaggcaagagtgccttggaggatcagggcagcaaccccagcagcagcaacagcagccaggactccctgcacaagggcgccaagcgcaagggcatcaagtcgtccattggccgcctgtttgggaagaaggagaagggcaggctgatccagctgagtcgggatggagccacaggccatgttctgctaacagactccgaattcagtatgcaggagcctatggtgcctgccaagctggggacccaggcagagaaggaccggcggctaaagaagaaacaccagctgcttgaagatgcccgcaggaaaggaatgccctttgcccagtgggatggtcctactgtggtctcctggttggagctctgggtggggatgcctgcctggtatgtggcagcctgccgggccaacgtcaagagtggtgccatcatgtccgctctgtcggacacagagatccagcgggagatcggcatcagcaatgccctgcaccggctcaagctccgcctggccattcaggagatggtgtcattgaccagcccctctgccccacccacctccaggacttcttctgggaatgtctgggtcacccatgaagagatggaaactctggaaacatctactaaaacagacagtgaggagggcagctgggctcagaccctggcctatggggacatgaaccatgagtggattgggaatgaatggctacccagcctggggctcccgcagtaccgcagctacttcatggagtgcctggtggacgcccgcatgctggaccacctcaccaagaaggacctgcgggtccacctgaagatggtggacagcttccatcgaaccagtcttcagtatggcatcatgtgtctgaagaggctgaattatgaccggaaggagctggagaagaggcgagaggagagccagcatgagatcaaggatgtgttagtctggaccaacgaccaggtggttcattgggtccagtctattgggctccgggactacgcaggaaacctgcatgagagtggtgtgcatggagccttgctggccctggacgagaacttcgaccacaacacactggccctgatcctccagatccccacacagaacacccaggcacgccaagtgatggaaagagagttcaataacctgttggccttgggcacagaccggaagctggatgacggggatgacaaggtgtttcgccgcgcgccctcctggaggaagcgcttccggccgcgggagcaccacggtcgcggcggcatgctcagcgcttccgcggagaccctcccggcgggcttccgtgtgtccaccctggggaccctgcagcccccaccggccccgccaaagaagatcatgcctgaagctcactcccactatctctacggacacatgctctccgccttccgggactagccatggcccccagggctggcttcctccttctgggtttcacaggctcctctggccctgacccctcttgctcgttccccttccttccgcagctcctagtctcgtccgtgactttccggttgccctggatctcagaatatattcgtccaccccctcggcaccccattaccccgagtcccaccgtgtgtccgttgtaagtccggtggatgtggctggggtttcctggtattgtggaggcacccaggttgtccatgcttgggattctgggggaaggagagaagggcagctcagggtggatgtgaagccacccttcctcttctggacccagcctggtctgcactgcaacctccaccaggaccaggatcctgggccacaggctgggatggtccttccaagaaagggtcatttcagacgcagccctgcttgggctattcaatcttagggtgtctatccacgtctggctgtgccaaatggtctggcagctggttttggcatccccagcatcaccactctcccaacccatcaccgtgactgcagttcctgcccccattctcttggggtcagggaggggctgggaagggctactgaaggccccattctcccacaggatggtgaggctgggaggaggaagactgaggtagagattccaggccctggcataagctgaatcccaaatttgagtttgggaagaaccagagagaaatggatccctgagctctgagccaagggtgaggatggggaaactctaagctcccacctaataagaagcataggcagaccagccagagggagagccaatggcctctggtagccttaagcccaaagggcagtgggaatgtcccctgccccaaccatcgggtggagctcctgctgggctatggggaagggaggttgtgcggatcttgactctagggcagaacagatctaaccatgcattgctagctctgctcccagcatcccttccccttctctcctcctctgcctcacttctttagtaatcccaaccctataaaaatgaacctaatgggtggattgaatatacattgagcccaaagtcaagtttggggaaaaggcagactaaggcctcctttctctgacctcccaggaagaaaatagcttctcctacagtgattcatgtcccaggtccaggaaatccaatgttggtgaaggcagccactctcttgcttgtccccaaatcacctaaccctcatccagggctattttggtgggcagggactgcctcctcccggaattcctaagatccgcccagctgccaccattttcattgctttccccagcagcatgatgggaacccaagctgagggatacaggtcctgatttggtaggaatattattcccaagaaatacccgctcctcacctactccctcatcctaccaaggtgcctgaaaatgttcaagacttatgttcagggtgggatgatggaaccgagggcttcatcaaagtgagaggaaaggaaaagcatctggcatgtgtttcttggataggggccagtgcagtgccatcctacaggtggctggagcagctgctttgcaacctgatcaccttgagttctgagcagggactaggcttgcaggtgagataatgggccagggcacccagtccagaaggagcaatggcacctgggcagtgccagggcttaaagcccgctgctccttttcggtagaggagaggcccatcactggtgtggtggggtgggctctcccttaggcttgggcaaggcagccacctgcccttgctctcccttagtgttccctggcctccctgccatcaggttgctgggagtggagatggagggattattgagcagaaaatgagttggatggagataaacagctcccatccctgggtaatggatggtaagatgatggagattcctaagattggtggagttgggcaatgcatagccatctgactccttcagggtgctcttgatgggctggctgtaagggagactcagtcccagcctctcccctctacaactcctgccactgttggccatgtcgtaaggcagcagctgtgccaggatagctgggtccattcagagcaccttgagaagtgttgcagggaggtgttaagaagagaactctgtgcaaacagtgatggaaggctgttgtcttggtgtatcccttgcctcatagtcaatatattttttttttggcgagtcaccagtgacccgagccctccacaccagcctcctgtatctcatcaggtcccttctcagtactgtatttgctcagtgcatcaggaatgggtgtatgggtgtgtgtgggtgggtgtgagtgtgggtgtgtacgtaccaataaacaacctggttttaagacaatgta

SEQ ID NO: 115616 - DNA, 3558 bp, Artificial Sequence
  derived and/or modified sequence
atgtgtgaggtcatgcctactataaacgaaggcgacaggttaggtcccccccatggtgccgacgccgacgcgaacttcgagcagctgatggtgaatatgctcgacgaacgagaaaagttactggagagcctgagggagtcccaagaaaccctggcagcgactcagtcccgcttgcaagatgccattcatgagagagatcagctccaaagacatctcaactccgccctcccgcaggaattcgcgacattgaccagggagttgagcatgtgtcgggagcagctcttggagagggaggaggagataagcgaactcaaggctgaacggaacaacactcgtctgctcctagagcacctggaatgccttgtgagccggcacgaacgctctttgaggatgactgtggttaaacgtcaagcccagagtcccagcggcgtgtcctccgaggtggaggtgcttaaagcactgaagtctctgtttgagcatcataaagctctggatgagaaggtgcgtgaacggcttagagcagccttggagcgcgttacgactctggaagagcagctagctggggcccaccagcaggtcagcgcactgcagcagggtgcaggagtccgcgatggggctgctgaggaagagggaacggttgagctcggccctaagcggttgtggaaagaggacacagggcgggtcgaggaactgcaagagctcttggagaagcagaattttgagctctctcaggcaagagagaggttagtgaccctaaccaccactgttaccgaactggaggaggacctgggcaccgcccggagggatcttattaagagtgaggaactgtcttctaaacaccagagggacctcagggaggctctggcacagaaagaggacatggaggagcggattaccacattggagaaacgctatcttgcagcccagcgggaagctacctcaatccacgatctgaatgataagctggaaaacgaactagcaaacaaagaatccctgcataggcaatgtgaggagaaggcccgacacctgcaagaattgctagaagtagcggaacagaagctgcagcagactatgcgcaaagccgaaaccttgcctgaagtggaagccgaactggcacagaggatcgcagccttgacaaaagcagaagaacgacatggaaacattgaagagcacttgcgacagcttgagggtcaactggaggaaaaaaaccaggaactggcaaggactgcagtccaggttcggcaacgtgaaaaaatgaatgaggatcacaacaagcggctctcggacactgtcgataggctgctgtctgagtctaacgagaggcttcaactgcatctcaaggaacgtatggccgctttggaggaaaagaacaccttgattcaggagctggagtcctctcaacgtcagattgaagagcaacatcaccacaaaggacgcctgtccgaggagatcgagaagcttcgacaggaagttgatcagttgaaggggcgcggtggcccattcgtggacggagtccacagtagatcacatatgggatctgctgctgacgtgcgctttagtctcggcacaacaacccacgcccctccaggtgtgcaccggaggtactccgcactacgcgaggaatccgccaagctagctcttcctttgactgtgacccttcgctcaccgacgtggatgcgcatgtcccagggagtgtgttgcaaccttgaatatcacagtagcggcaccctgtgcgggtcctctgggccactgccagtgccagagatgatccaggaggaaaaggaatctaccgaacttcgagctgaagagattgaaacaagagtcacttcaggatcaatggaggccctgaacttaaagcaacttcgtaaacgggggtccatcccaacttctttgaccgccctctcactggcctcggcctcaccaccattgagtggcaggtcaacgcctaagctcacctcacgttccgctgcacaggatttagaccggatgggggtcatgacactgccaagcgatttacgaaaacacagacggaagctgctaagcccggtttcccgggaagaaaaccgtgaggacaaagcaaccattaagtgcgagactagtcctccgagctccccacgcacactacgccttgaaaaattgggccacccagccttaagccaggaggaagggaaatccgctctggaagaccagggcagtaacccgtcttcttccaattcctctcaggatagtcttcataagggggctaaaagaaagggcatcaagagttctatcggccgccttttcggtaagaaggagaaaggacgcctgatccaactctctagagacggtgccactggtcacgtgctcctcaccgatagtgaatttagcatgcaggagcccatggtacccgctaaactcggcacacaagccgagaaggatcggcgattgaaaaaaaaacaccaactgcttgaggacgcccgtcgcaagggcatgccctttgcccaatgggacggcccaactgtggtgtcatggctcgagctttgggtcgggatgcccgcctggtatgtggccgcatgcagagcaaatgtcaagagtggcgctattatgagcgcgttgtccgataccgaaatccagcgcgaaattggtattagcaatgcccttcaccgcctgaaactaagactcgctatccaagaaatggtgtccttgaccagtcctagtgcaccacccacctcacgaacaagctccggtaacgtgtgggtcacacacgaggaaatggaaaccctggaaacaagtactaaaacagactcagaggaggggtcctgggcccagactctggcctacggggacatgaaccatgagtggatcgggaatgaatggttaccctctctgggtcttccacaataccgaagctatttcatggagtgcctggtggacgctcgcatgcttgaccaccttacaaaaaaggatcttagagttcatttgaaaatggtggatagctttcatcggactagcttacagtacggaatcatgtgtctcaagcgcctgaactatgacaggaaagagctggaaaaaaggcgcgaagagagccagcacgagattaaggatgtgttggtgtggaccaacgaccaggttgtgcattgggttcagtctattggcttaagggactatgccggaaatcttcatgaatctggcgtgcacggcgcactcctggcattggacgaaaactttgatcataatactcttgctctgatcttacagattcccacccagaacacccaggctcgtcaggtgatggagcgggaattcaacaacctgttggctctcgggacagaccggaaactggacgacggggatgataaggtgttccgcagagcacccagctggagaaagaggtttagaccacgggagcaccacggtaggggcgggatgcttagtgccagtgcagagactctgcctgcgggctttagggtgagtacactgggcaccctacagccccctccggcgcccccaaagaagatcatgcccgaagcacactcccattatctttacggccacatgctctctgccttcagggattag

SEQ ID NO: 115617 - DNA, 3561 bp, Artificial Sequence
  derived and/or modified sequence
atgtgtgaggtgatgcccaccatcaatgaaggagaccggctgggccccccccacggggctgatgctgatgccaactttgagcagctgatggtgaacatgctggatgagcgggagaagctgctggagagcctgcgggagagccaggagaccctggccgccacccagagccggctgcaggatgccatccacgagcgggaccagctgcagaggcacctgaacagcgccctgccccaggagtttgccaccctgacccgggagctgtccatgtgccgggagcagctgctggagcgggaggaggagatcagcgagctgaaggccgagaggaacaacacccggctgctgctggagcacctggagtgcctggtgtccagacatgagaggagcctgaggatgacagtggtgaagaggcaggcccagagccccagcggcgtgagcagcgaggtggaggtgctgaaggccctgaagagcctgtttgagcaccacaaggccctggatgagaaggtgcgggagcggctgcgggccgccctggagcgggtgaccaccctggaggagcagctggccggggcccaccagcaggtgtctgccctgcagcagggcgctggggtgagagatggagctgctgaggaggagggcaccgtggagctgggccccaagaggctgtggaaggaggacaccggccgggtggaggagctgcaggagctgctggagaagcagaactttgagctgagccaggcccgggagcggctggtgaccctgaccaccaccgtgacagagctggaggaggacctgggcacagcccggcgggacctgatcaagtctgaggagctgagcagcaagcaccagagggacctgcgggaggccctggcccagaaggaggacatggaggagcgcatcaccaccctggagaagcgctacctggccgcccagcgggaggccaccagcatccatgacctgaatgacaagctggagaatgagctggccaacaaggagagcctgcaccggcagtgtgaggagaaggcccggcacctgcaggagctgctggaggtggccgagcagaagctgcagcagaccatgaggaaggccgagaccctgcctgaggtggaggccgagctggcccagagaattgctgccctgaccaaggccgaggagagacatggcaacatcgaggagcacctgcggcagctggagggccagctggaggagaagaaccaggagctggcccgggtgcggcagcgggagaagatgaatgaagaccacaacaagaggctgagtgacacagtggaccggctgctgtctgagagcaatgaaaggctgcagctgcacctgaaggagaggatggccgccctggaggagaagggccgcctgtctgaggagattgagaagctgcggcaggaggtggaccagctgaagggccggggcggcccctttgtggatggagtgcacagccgcagccacatgggcagcgctgctgatgtgcgcttcagcctgggcaccaccacccacgcccctcctggggtgcaccggcgctacagcgccctgcgggaggagagcgccaaggactgggagaccagccccctgcccggcatgctggccccagctgctggccctgcctttgacagcgaccctgagatcagtgatgtggatgaagatgagcccggcggcctggtgggcagcgcagatgtggtgagccccagcggccacagtgatgcccagaccctggccatgatgctgcaggagcagctggatgccatcaatgaggagatccgcatgatccaggaggagaaggagagcacagagctgcgggcagaggagattgagaccagggtgaccagcggctccatggaggccctgaacctgaagcagctgaggaagaggggcagcatccccaccagcctgacagccctgagcctggccagcgccagcccccccctgagcggccgcagcacccccaagctgaccagccgctctgctgcccaggacctggacaggatgggcgtgatgaccctgcccagcgacctgaggaagcacaggaggaagctgctgagccctgtgtcccgggaggagaaccgggaggacaaggccaccatcaagtgtgagaccagcccccccagcagccccaggaccctgcggctggagaagctgggccacccagccctgagccaggaggagggcaagagcgccctggaggaccagggcagcaaccccagcagcagcaacagcagccaggacagcctgcacaagggggccaagaggaagggcatcaagagcagcatcggccgcctgtttgggaagaaggagaagggccgcctcatccagctgagcagagatggagccactggacatgtgctgctgacagattctgagttctccatgcaggagcccatggtgcctgccaagctgggcacccaggccgagaaggaccggcggctgaagaagaagcaccagctgctggaggatgcccggaggaagggcatgccctttgcccagtgggatggccccaccgtggtgtcctggctggagctgtgggtgggcatgcctgcctggtacgtggccgcctgccgggccaacgtgaagagcggggccatcatgtctgccctgagtgacacagagatccagcgggagatcggcatcagcaatgccctgcaccggctgaagctgcggctggccatccaggagatggtgtccctgaccagccccagcgccccacccaccagcaggaccagcagtggaaatgtgtgggtgacccatgaggagatggagaccctggagaccagcaccaagacagacagcgaggagggctcctgggcccagaccctggcctatggagacatgaaccacgagtggattggaaatgagtggctgcccagcctgggcctgccccagtaccgcagctacttcatggagtgcctggtggatgccaggatgctggaccacctgaccaagaaggacctgcgggtgcacctgaagatggtggacagcttccacaggaccagcctgcagtatggcatcatgtgcctgaagaggctgaactatgacaggaaggagctggagaagagaagagaggagagccagcacgagatcaaggatgtgctggtgtggaccaatgaccaggtggtgcactgggtgcagagcatcggcctgcgggactatgccggcaacctgcatgaaagtggagtgcacggggccctgctggccctggatgagaactttgaccacaacaccctggccctgatcctgcagatccccacccagaacacccaggcccggcaggtgatggagcgggagttcaacaacctgctggccctgggcacagacaggaagctggatgatggagatgacaaggtgttcagaagagcccccagctggaggaagcgcttccggccccgggagcaccacggccggggcggcatgctgagcgccagcgctgagaccctgcctgctggcttccgggtgtccaccctgggcaccctgcagcccccaccagccccacccaagaagatcatgcctgaggcccacagccactacctgtatggccacatgctgagcgccttccgggactag

SEQ ID NO: 115618 - DNA, 3558 bp, Artificial Sequence
  derived and/or modified sequence
atgtgtgaggtgatgcccaccatcaatgaaggagaccggctgggccccccccacggggctgatgctgatgccaactttgagcagctgatggtgaacatgctggatgagcgggagaagctgctggagagcctgcgggagagccaggagaccctggccgccacccagagccggctgcaggatgccatccacgagcgggaccagctgcagaggcacctgaacagcgccctgccccaggagtttgccaccctgacccgggagctgtccatgtgccgggagcagctgctggagcgggaggaggagatcagcgagctgaaggccgagaggaacaacacccggctgctgctggagcacctggagtgcctggtgtccagacatgagaggagcctgaggatgacagtggtgaagaggcaggcccagagccccagcggcgtgagcagcgaggtggaggtgctgaaggccctgaagagcctgtttgagcaccacaaggccctggatgagaaggtgcgggagcggctgcgggccgccctggagcgggtgaccaccctggaggagcagctggccggggcccaccagcaggtgtctgccctgcagcagggcgctggggtgagagatggagctgctgaggaggagggcaccgtggagctgggccccaagaggctgtggaaggaggacaccggccgggtggaggagctgcaggagctgctggagaagcagaactttgagctgagccaggcccgggagcggctggtgaccctgaccaccaccgtgacagagctggaggaggacctgggcacagcccggcgggacctgatcaagtctgaggagctgagcagcaagcaccagagggacctgcgggaggccctggcccagaaggaggacatggaggagcgcatcaccaccctggagaagcgctacctggccgcccagcgggaggccaccagcatccatgacctgaatgacaagctggagaatgagctggccaacaaggagagcctgcaccggcagtgtgaggagaaggcccggcacctgcaggagctgctggaggtggccgagcagaagctgcagcagaccatgaggaaggccgagaccctgcctgaggtggaggccgagctggcccagagaattgctgccctgaccaaggccgaggagagacatggcaacatcgaggagcacctgcggcagctggagggccagctggaggagaagaaccaggagctggccaggacagctgtgcaggtgcggcagcgggagaagatgaatgaagaccacaacaagaggctgagtgacacagtggaccggctgctgtctgagagcaatgaaaggctgcagctgcacctgaaggagaggatggccgccctggaggagaagaacaccctcatccaggagctggagagcagccagaggcagatcgaggagcagcaccaccacaagggccgcctgtctgaggagattgagaagctgcggcaggaggtggaccagctgaagggccggggcggcccctttgtggatggagtgcacagccgcagccacatgggcagcgctgctgatgtgcgcttcagcctgggcaccaccacccacgcccctcctggggtgcaccggcgctacagcgccctgcgggaggagagcgccaagctggccctgcccctgactgtgaccctgcggagccccacctggatgaggatgagccagggcgtgtgctgcaacctggagtaccacagcagcggcaccctgtgtggcagcagcggccccctgcctgtgcctgagatgatccaggaggagaaggagagcacagagctgcgggcagaggagattgagaccagggtgaccagcggctccatggaggccctgaacctgaagcagctgaggaagaggggcagcatccccaccagcctgacagccctgagcctggccagcgccagcccccccctgagcggccgcagcacccccaagctgaccagccgctctgctgcccaggacctggacaggatgggcgtgatgaccctgcccagcgacctgaggaagcacaggaggaagctgctgagccctgtgtcccgggaggagaaccgggaggacaaggccaccatcaagtgtgagaccagcccccccagcagccccaggaccctgcggctggagaagctgggccacccagccctgagccaggaggagggcaagagcgccctggaggaccagggcagcaaccccagcagcagcaacagcagccaggacagcctgcacaagggggccaagaggaagggcatcaagagcagcatcggccgcctgtttgggaagaaggagaagggccgcctcatccagctgagcagagatggagccaccggccacgtgctgctgacagacagcgagttctccatgcaggagcccatggtgcctgccaagctgggcacccaggccgagaaggaccggcggctgaagaagaagcaccagctgctggaggatgcccggaggaagggcatgccctttgcccagtgggatggccccaccgtggtgtcctggctggagctgtgggtgggcatgcctgcctggtacgtggccgcctgccgggccaacgtgaagagcggggccatcatgtctgccctgagtgacacagagatccagcgggagatcggcatcagcaatgccctgcaccggctgaagctgcggctggccatccaggagatggtgtccctgaccagccccagcgccccacccaccagcaggaccagcagtggaaatgtgtgggtgacccatgaggagatggagaccctggagaccagcaccaagacagattctgaggagggctcctgggcccagaccctggcctacggggacatgaaccacgagtggattggaaatgagtggctgcccagcctgggcctgccccagtaccgcagctacttcatggagtgcctggtggatgccaggatgctggaccacctgaccaagaaggacctgcgggtgcacctgaagatggtggacagcttccacaggaccagcctgcagtatggcatcatgtgcctgaagaggctgaactatgacaggaaggagctggagaagaggcgggaggagagccagcacgagatcaaggatgtgctggtgtggaccaatgaccaggtggtgcactgggtgcagagcatcggcctgcgggactatgccggcaacctgcacgagagcggcgtgcatggagccctgctggccctggatgaaaattttgaccacaacaccctggccctgatcctgcagatccccacccagaacacccaggcccggcaggtgatggagcgggagttcaacaacctgctggccctgggcacagacaggaagctggatgatggagatgacaaggtgttccggcgggcccccagctggaggaagcgcttccggccccgggagcaccacggccggggcggcatgctgagcgccagcgctgagaccctgcctgctggcttccgggtgtccaccctgggcaccctgcagcccccaccagccccacccaagaagatcatgcctgaggcccacagccactacctgtatggccacatgctgagcgccttccgggactag

SEQ ID NO: 115619 - DNA, 3561 bp, Artificial Sequence
  derived and/or modified sequence
atgtgcgaggtgatgcccaccatcaacgagggcgaccggctgggcccaccccatggtgccgacgccgatgctaacttcgagcagctaatggtgaatatgctggatgagagagagaaactcctggaatccttgagggaaagccaagagactttggcagctacacagtcacggctgcaggacgctatacacgaacgcgatcagttgcagagacatttaaattctgccttaccacaggagtttgcaaccctgacgcgagagctgagcatgtgtcgcgagcagttgctggagcgggaggaggagatatctgagcttaaggcagaacgcaacaacacgaggctcctgttggagcatctggaatgcctcgtgtctagacatgaacgcagcctgaggatgacagttgtgaagcgccaggcgcagtcaccgagcggtgtgtctagcgaggtcgaagtcctgaaggccctcaagtctctgtttgagcaccacaaagctttggacgagaaagtgagagaaaggttacgcgcggcactcgaacgggtgaccacactcgaagaacagttggctggcgctcaccagcaagtgtccgccttacagcagggagccggcgtccgtgatggggcagcggaggaggaaggcacagtagagttggggccaaagcggctgtggaaagaggacacaggacgagtcgaggaactgcaggagttgttggagaagcagaacttcgagctgagtcaagcccgtgagcgattagtaactctcaccacaacagtgacagagcttgaggaagatttgggtactgctcggcgagacttgattaagtctgaggagctttctagcaaacaccagcgcgatctacgtgaggcgttggcgcagaaagaagatatggaggagcggattacaaccctggagaagcgctacctggccgcccagagagaagcaacctctattcatgacctgaatgacaaactcgagaatgagttggctaacaaagaaagcttacacaggcagtgtgaagaaaaagcgaggcacttacaagagttgctagaggtcgcagagcagaagttgcaacagactatgaggaaagctgaaaccctgccagaggtggaagctgagctggcccagaggatcgctgccctaacaaaagccgaagagcgccacggaaatattgaagagcacttgagacagctcgaaggacagcttgaggaaaagaatcaggagctagcgcgcgtgaggcaaagggagaaaatgaatgaggaccataacaaaagactgtccgacaccgtggatagactgctgtcagagagcaacgaacgccttcagctgcatctgaaggagagaatggccgccctggaagagaaaggtcgcctgagcgaagagatcgagaaactgcgccaagaggtcgaccagctgaaggggcgcggagggccttttgtggacggagttcattcacggagtcacatggggtccgctgccgacgtccgcttctcattaggcacaaccactcatgcaccccccggagtccatcgccgctactcagcgctacgcgaagagtcggcaaaagactgggaaacttctcctctgccaggcatgctggcccctgccgccgggcccgccttcgacagtgatcccgaaatttccgatgtcgatgaagacgaacctggggggctagtcggcagtgccgatgtagttagtccatccggacattcagacgcccagactctggctatgatgctgcaagagcagctggatgctataaatgaggaaatcagaatgatccaggaagaaaaggaatctactgagctcagagccgaggagatcgaaactagagtcacatctggttccatggaggctctaaatctcaaacagctcaggaagaggggatcaatcccaacctcactgaccgctttaagtctagcctccgcaagtcctccgctctccggcagatctacccccaagctcacctccaggagtgctgcccaagacttagaccggatgggagtgatgacactgccctcggacctgagaaagcaccgtcgtaagctgctcagtcctgtatcccgagaggaaaaccgtgaggacaaggcaacaatcaagtgtgagacctctcccccgagttcacccaggacgctcaggctggagaaactgggacaccctgcgctcagccaggaggagggcaaaagcgcattggaggaccagggatctaatccgtcgagttccaattcgtcccaggatagtttgcataagggtgccaaaagaaagggcatcaagtctagtatcggtcgtctcttcgggaaaaaagagaaaggccgattgatccagctatccagggatggggctaccggccatgttctattgactgatagcgaattttccatgcaagagcccatggtgccagctaagctgggtactcaggccgagaaagacaggaggcttaaaaagaagcaccaacttctcgaggacgcacgccggaaaggaatgccttttgcacagtgggacggccccacagtggtgtcttggttggaattatgggtcggtatgccggcttggtatgttgccgcatgcagagctaatgttaaatctggggccataatgagcgcactcagcgacacagagatccagcgggagattgggatttctaatgcactacatagacttaaactgcgcctcgccattcaggagatggtgtcgctcacgagcccctctgcaccccccacatcaagaacatcgtcaggcaatgtatgggtgactcatgaggagatggaaactctggagacatccactaaaactgacagcgaggaaggaagttgggcccaaactctcgcctacggagacatgaatcatgaatggatcgggaatgagtggctacccagtctggggcttccacagtacagaagctatttcatggagtgcctcgtagacgcccggatgctcgatcatttgacgaagaaggatctaagagttcacctgaaaatggtagattcgttccataggacctctctgcagtacgggatcatgtgtctgaaaagactcaattacgacagaaaggagttagagaagcgaagggaggagtctcaacatgagataaaagatgtactggtgtggacaaatgaccaggttgtgcactgggtgcagagtattggccttagggactatgctggcaatcttcatgagtctggagttcacggggcattattggcactcgacgaaaactttgatcataataccttagcactcatcttgcagattcccacccagaatacacaggctcggcaagtgatggagcgtgagttcaataacttgctcgccctcggcaccgaccgaaaactagacgatggagacgacaaggttttccggcgtgccccttcttggcgaaaacggttccgcccaagggaacatcacggccgcgggggaatgctttctgctagcgccgagactcttcctgctggcttcagagtgagtactctcggaacattgcaaccaccccccgccccccctaaaaagatcatgcctgaggcccattcacactacctgtacgggcacatgctatccgcatttagagattag

SEQ ID NO: 115620 - DNA, 3558 bp, Artificial Sequence
  derived and/or modified sequence
atgtgcgaggtgatgcccaccatcaacgagggcgaccggctgggccctccacacggggcagacgccgatgccaacttcgagcagttgatggtgaatatgctcgacgagcgcgaaaaactgctggagagtttgagagagtctcaggagacccttgcggcgacacagtctcgactgcaggacgcaatccacgagagagaccagctgcaacgccatctcaactcagcattacctcaggagttcgcaacccttactagagaattaagcatgtgtcgggaacaactgctggaacgggaggaagagatctcagagctcaaagctgagaggaacaatacccgcttgttgcttgaacacctcgagtgtctggtcagcaggcatgagcggagtttgcgaatgacagtggtgaaacgacaagctcagtccccatcaggagtgagcagcgaagtggaggtcctcaaagcccttaagagcctatttgagcaccacaaggcactcgacgagaaagtccgggagaggctgcgggccgccctcgaacgagtgacgactctggaagaacaactggccggggctcatcaacaggtgagcgcacttcagcagggcgctggagtcagggacggtgccgccgaggaagaggggaccgtcgagttgggccccaaaaggttatggaaagaagacacggggcgggttgaggaacttcaggagcttcttgagaaacagaattttgagctgtctcaggcccgggaacggctggtaaccctgaccactacagttactgaacttgaggaagacctgggtaccgctaggagagacctaatcaagagtgaggagctgtctagtaagcatcagcgagatctgagagaagccttggctcagaaagaggacatggaggaaagaattacaactctggagaagagatacctggccgcacaacgagaggcaacaagtatccacgatctcaatgataagctcgagaatgagctggccaataaggagagcctgcacagacagtgcgaggaaaaagcccgccacctccaggaactgttggaggttgccgagcaaaaactccagcagaccatgaggaaagccgagacactgccagaggttgaagccgagctcgcccagagaattgccgccctgactaaagctgaagagaggcatggaaacattgaggagcacctgcgacagctggaaggacagctggaggaaaaaaaccaggaactggccagaactgccgtgcaggtgcgccaacgggagaagatgaacgaggatcacaacaagaggctgagtgataccgtggacaggctcttatccgagtcaaatgaaagactacagctgcatttaaaagagcgtatggccgcgctggaagagaagaatactcttatacaggaactggagtcgagccaaaggcaaatcgaagagcagcatcaccacaagggacggctgagtgaggaaatcgagaagcttcgccaggaagtggaccagttaaaaggaagaggtgggcctttcgttgacggcgtacactctcgaagtcacatgggttccgctgctgacgtgcgtttttccctcgggactacaacacacgcccctccaggggtgcatcggcggtattctgctctccgtgaggaaagcgctaagttagccttaccactgacagttaccttgcgcagccctacctggatgagaatgtcacaaggcgtgtgctgcaacctggaatatcactcctctggaacgctgtgcggcagtagcggccctcttcccgtccccgagatgattcaggaggagaaagaaagtactgaactgagagcggaagaaatcgagacgagggtgaccagtgggtcaatggaagcgctgaatttgaaacagctccgcaagcgaggatctatcccgacgtccctcaccgcactgtctctggcctccgcaagtccccctctaagcggaaggtccactccgaagttgactagtcgaagcgctgcgcaggatctcgaccgaatgggcgtgatgacattaccaagtgatctacggaaacacaggaggaaattactgagccctgtgtcgcgcgaggaaaacagagaggacaaagcgacgatcaaatgcgagacttcccctccttcctctcccaggacgctccggttagagaaactcggacacccagcgctcagtcaggaggagggaaagtccgcccttgaggaccaggggtccaatccaagctcctcaaattcctctcaggattcacttcacaagggcgccaaaaggaaggggataaaaagctctattggtcgcctgtttggcaaaaaggaaaaggggagactgatacagctctctagggacggagcaactggtcacgtgttacttaccgattcagaattctccatgcaggaaccgatggtccccgctaagcttggtacacaggccgaaaaggaccggcgtctgaaaaagaaacatcaattgcttgaggatgcccggagaaaaggcatgcccttcgctcagtgggatggcccaaccgtcgtgagctggcttgagttatgggtgggtatgccagcatggtacgtggccgcatgtcgcgcgaacgttaaatccggggcgatcatgagcgctttatcagatacagaaattcagcgcgagattggtatctctaacgctttgcatagattaaaattgcggctggccatccaagaaatggtgagcctgacttcgccgagcgcccctccaacatctcgaacatcttcaggcaatgtctgggtgacccatgaggagatggaaactcttgagacatccaccaagaccgattctgaggagggatcctgggcgcagactcttgcctacggtgatatgaatcatgagtggatcgggaatgagtggcttccctccttaggcctcccacagtatagatcttactttatggaatgtctggtagacgcccgaatgctggaccatctgacaaagaaggatctgcgcgttcacctcaaaatggtcgactccttccaccgcacatccctccagtatggaatcatgtgcttgaaacgcttgaattatgacagaaaggaactggagaagcggagggaagagtcacagcacgaaattaaggacgttctggtgtggactaatgaccaggtggttcactgggtgcagagcattggattacgcgactacgcggggaatctccatgaatccggggttcacggcgcattactcgcccttgacgagaatttcgaccacaatacactggctctgatactgcagatacccactcagaacacccaggctcggcaggttatggaacgtgagttcaataacctgctcgcactcggaacagatcggaagctggacgacggggacgacaaggtgtttagacgcgcaccaagctggaggaaacgctttcgcccgcgggaacatcacggaagaggggggatgctgtctgcatccgctgaaaccctgcctgctgggttccgcgtctcaactctgggcacccttcagccacctccagcaccccccaaaaaaattatgccagaagctcactcacactacctctacggtcatatgttgtccgccttccgagactag

SEQ ID NO: 115621 - DNA, 3561 bp, Artificial Sequence
  derived and/or modified sequence
atgtgtgaagtgatgcccacaattaatgagggcgatagactgggcccaccccacggagccgacgcagatgccaactttgagcagttaatggtcaacatgcttgacgagcgggagaagttactagaatctctccgcgagtcccaggagactctcgcagccacacagtctaggctgcaggatgctatacatgaacgcgatcagctccagcgccaccttaacagcgccctacctcaggagttcgctacactcactagggagttgtcaatgtgccgggagcagctcttggagagagaggaagaaatttcggagcttaaagccgaaagaaataatacacgactgctcctcgagcatctcgaatgcttggtctcccggcatgagcgctctctgagaatgaccgttgtgaaaaggcaggcacagagcccttctggggtttccagcgaggtcgaggtcctgaaagccttaaagtccttattcgaacatcacaaggccttggacgagaaggtacgtgagcgcctccgcgctgcactggaaagggtcaccacattagaagagcagttagctggtgcacaccagcaagtgtctgcactgcaacagggtgccggagtgagggatggagctgcagaggaggagggcacagtggaattgggtccaaagagactgtggaaagaagatacgggtagggttgaagagttacaggaattgctcgaaaagcagaattttgagctgagtcaggcacgcgagaggctggtcaccctgacaactaccgtcaccgagttagaggaagatctcgggacagctagaagggatctgataaaatcagaggagctgtcttctaagcatcagagggacctgagggaggcactggcccagaaagaagatatggaggaaaggataacaacgctggaaaagagatacttagcagcccagagagaggcgaccagtatccatgatctgaatgacaaactggaaaatgaactggccaataaggagtccctgcaccggcagtgcgaggagaaggccagacacttacaggagctcctggaggttgctgagcagaagctgcaacagaccatgcggaaagcagaaaccttaccggaggtcgaagcagagctcgcccagagaatcgctgcattaaccaaagccgaagagaggcatggtaatatcgaggaacacctccggcagctggagggacagctcgaggagaagaaccaagaactggctagagttaggcaacgcgagaagatgaacgaggatcacaataagagactgtcagacaccgtggaccggttgctgtctgaatctaacgagaggctgcagctgcacctcaaggagaggatggccgctcttgaggagaaaggtaggctgtcagaggagatagagaagctgcgccaggaggtggatcagctcaaaggcagagggggtccttttgttgacggcgtgcatagcagatcacacatgggtagtgccgctgatgttcgcttctctcttggcactaccacgcatgctcctcccggagtgcatcgtcgctacagcgcgctgcgtgaggagtcggctaaagactgggagacttcccccctcccaggaatgttagcacccgctgccggtccagcattcgactctgatcctgaaatttcagatgtcgatgaagacgagccagggggactggtgggctcggccgacgtggtttccccgtccgggcattcggacgctcagacactcgccatgatgctgcaagaacagcttgatgctatcaatgaagaaattcgcatgatacaagaagagaaagaatccactgagctgagggccgaggagatcgagactagggtcacaagcggaagcatggaggcactaaatctgaaacagctccgaaaacggggaagcatcccaacctctctcacggcactatcactcgccagcgcctctccaccgttatctgggagaagcaccccgaaattgacctctcgcagtgccgctcaggaccttgacaggatgggggtgatgaccctcccctcagacctgcggaagcacagaagaaaactgctgtcccccgtgtcccgggaggagaatagggaagacaaggctactatcaagtgtgagacatctcctccgtcttcaccacgtactctgaggctggagaagctcggacaccccgcactgtctcaggaggaaggaaaaagtgccttggaggaccagggatcgaaccccagttccagcaacagttcccaagattccctgcacaagggcgctaagcggaagggcatcaagagctctattggcagattattcggcaaaaaagaaaagggcaggctgatacagctttccagggatggcgctacgggtcacgtcctgctgacagattctgagtttagtatgcaggagcccatggtgccagctaagcttggaactcaagccgaaaaggatcggcgactgaagaaaaaacatcagctgctggaggacgccagaagaaaggggatgccatttgctcagtgggacggcccaactgtcgttagctggttggagttatgggtaggcatgcccgcttggtatgtggccgcatgtcgggctaatgtcaaaagcggcgctatcatgtctgctttgtccgacacagaaatccaaagagagatcgggatctcaaatgcattgcaccgccttaagttgcggctagccatccaggagatggtgagcttgacttcccccagcgctccgccaacctccaggaccagttctggtaatgtgtgggtcacccacgaggaaatggagaccctcgaaacatccacgaagacagatagcgaggaggggagctgggcccagaccctggcgtacggggacatgaaccacgagtggattggtaacgagtggctcccctctctgggattaccccagtatcgatcatatttcatggagtgcctcgtcgacgctcggatgttagaccacttgactaaaaaggatctgcgcgtgcatctgaaaatggtggattcattccaccggacctcattgcagtacgggatcatgtgtctgaaaagattgaattacgatcggaaggagttggagaagaggagagaggaaagccaacatgaaattaaagacgtgctcgtgtggacaaacgaccaggttgtccactgggttcagtccatcggactgagggactatgctggaaacctgcacgaaagtggggtgcatggggctcttcttgcgctggacgagaacttcgatcataacaccttagccctgattttacaaatcccaacccagaatacccaagccagacaggtaatggaacgcgagttcaataatctacttgccttgggcaccgacagaaaactcgacgacggggatgataaagtgttccgccgagccccttcctggcgtaaacggttccggccacgggagcaccacggtcgtggcggtatgttgagcgctagcgccgagaccctgcccgcaggcttccgagtgtcaactctcggcactttgcaacccccaccagcaccccctaagaaaatcatgcctgaagcacacagccactatttatatggccacatgctcagtgccttcagggactag

SEQ ID NO: 115622 - DNA, 3558 bp, Artificial Sequence
  derived and/or modified sequence
atgtgtgaagtgatgcctacaatcaatgaaggagataggctcggtccgccacatggagcggacgcggatgctaattttgagcagcttatggtgaacatgctagatgagagggaaaagctgttggagtcccttagagagtcccaggaaacactcgccgctactcaaagtaggcttcaggacgccatccatgagagggatcaattgcaaagacacttaaattccgcactgcctcaagagttcgctaccctcacccgagagttgagcatgtgccgagagcaactgctcgagagggaggaggaaatttcggaactcaaggcagaacgcaataacaccaggctgttactggaacatctggagtgcctggtttccaggcacgagaggagtcttcgaatgacagtggtgaagaggcaggctcaatcacctagcggagtctcctcggaagtagaggtcctgaaagcattgaaaagtttgttcgagcaccacaaggctctcgatgagaaggtacgcgagcgactgcgtgccgctttagaacgagtgactaccctcgaagagcaactggccggtgctcaccaacaggtcagcgctctgcagcagggcgctggggtgcgggatggagcagctgaggaggaaggtaccgtggagctcgggccaaaaagattatggaaagaggacactggacgggtggaagagctacaggaattgctggagaaacagaacttcgagctgtcccaagcaagggagcgtctcgttaccctgacaaccaccgtgactgagctagaggaggaccttggtactgctcggagggacttgatcaagtcagaggagttgagcagtaagcatcagcgtgatctccgggaggcacttgcccaaaaggaggatatggaagaacgaatcaccacacttgagaagcggtacctggccgcacaacgggaagcaacctccattcacgatttgaacgacaaattggagaacgagttagccaataaagaaagcttgcacaggcaatgcgaggagaaagccagacatctccaggagctgctggaagttgcagagcagaaactacagcagaccatgagaaaagccgagactttacctgaggttgaagctgaacttgcacagagaatagctgccctcaccaaagctgaagaacgtcacggcaacatcgaggagcacctgaggcagctggaaggacaactggaagaaaaaaaccaggagcttgctcggaccgccgtgcaagtaaggcaacgggagaagatgaacgaagaccacaacaaacggctgtctgatacagttgaccggcttctgtccgagtcaaacgagaggctgcagcttcacttaaaggagagaatggccgctctggaagagaaaaacaccctgatccaggagctcgagtcatcacagaggcagattgaggagcagcaccaccacaaggggcgactttcggaagagatagagaaactgaggcaagaggttgaccagcttaagggtcgagggggaccatttgtggatggtgtccatagtagaagtcacatgggatcggccgcagatgtcaggtttagccttgggacaacaacacacgctccccctggagtgcaccgacgctatagcgcccttagggaagagtcggcaaagctggccttgcctctgacagtgacactgaggtctcctacttggatgcggatgagccaaggtgtctgttgcaatttagaatatcacagttcaggaaccttgtgcggctccagtgggcctctgcctgtccccgaaatgattcaagaggagaaagagtcaaccgagctgagagccgaagaaatcgagactagagtgacctccggcagcatggaagccctgaacctgaaacaattgcggaagcggggatcaatccccacaagcctgaccgcgctttctcttgcatccgcctccccgcctcttagcggaaggtcaacccctaagttaacaagcagatcagccgctcaggatctggatcggatgggagtcatgacattgcctagtgacctccgcaagcatcggcgaaaactgctctcaccagtcagccgggaagagaaccgcgaggataaagcaactattaaatgcgaaacgagcccgccatcttcccccagaaccctgcggctggagaagctgggacatccagcactctcacaggaggaaggtaaatcagcactcgaggatcaaggaagtaatccctcatcctctaactcatctcaggatagccttcacaaaggggcaaaaagaaagggcattaagtcatcaatcggcagattattcggcaagaaggagaagggtaggctaatccaactgagtagggacggggctacagggcacgttcttcttacagattctgagttctccatgcaggagcctatggtaccagcgaagttgggcacacaggcggagaaggacaggcggctgaaaaagaagcaccagctcttagaggatgcaaggcgaaagggcatgccctttgctcagtgggacggacccactgttgtatcatggctcgaattgtgggtcggaatgcccgcatggtacgtagctgcatgtcgggcaaatgttaagagcggggctattatgtccgctctgtccgacacggagatccagcgggaaattgggattagcaatgctttgcataggcttaaactaagattggctatccaggagatggtctctctgaccagccccagtgcgcctcctacatctcgcacgtcgagtggaaacgtctgggttactcatgaggagatggagaccctagaaactagtaccaaaaccgactctgaggaggggagctgggcccagactcttgcgtatggcgacatgaaccacgagtggataggaaatgagtggcttccttctctgggattaccacaatataggagttacttcatggaatgcctcgttgacgctcgaatgctggaccacctgacaaaaaaagaccttagagttcacttgaagatggtggatagctttcatcgcacatccttgcagtatggcattatgtgcttgaagcggttgaattacgatagaaaggaactcgagaaaagaagagaagaatctcaacacgagattaaggatgtgctcgtttggacgaacgatcaggtcgtccactgggtgcagagcatcgggttgagagactacgccggaaatctccatgagtccggggttcatggtgctctcctcgctctggatgaaaatttcgatcacaatacacttgcacttatcctccaaatacccacacagaatacccaggcaaggcaggtgatggagagagagtttaataacttactcgccctgggaacagataggaagctggatgatggagacgataaagtgttccggagggctccatcatggagaaaacgattccgacccagggaacatcacggcagggggggaatgctttcagctagcgccgagactctgcccgcaggatttagggtatctacactagggaccctgcagcctccgccagcaccacccaagaagatcatgcccgaagcacactcccactatctgtacgggcatatgctgtctgcattccgtgactag

SEQ ID NO: 115623 - DNA, 6344 bp, Artificial Sequence
  derived and/or modified sequence
atgtctgagagccccaaggacgagggctccgaagagtgtctgtttctgcagcgcctatgggagtggggggcagtggggggaactcagggaagctgcctacaacttgaggccttccccaggctggaggaggaggacagggaaggccgaggggagctgtcctccggctgccatcaccctgatgaggcggccctgccccgggctgtggtctccgcaggggctggcaaccttgcctttgtccagctctctccgtggccaggcctgccatctgcctgcccacactcctccccggcaaagccccttgcaaatgcttgctttggggactggcagctttcgcctctgaatcaggacctagcatcagtactctggggagggggtccaggtgccaaccctgtgagtccctccctgtcccctgacgctgagaaggccctgccaacccccaccatgtgtgaggtgatgcccacaatcaatgagggggaccgcctgggtccccctcatggcgccgatgctgacgccaacttcgagcagctgatggtgaacatgctggacgagcgggagaagttgctggagtctcttcgggagagtcaggagaccttggcggccacacagagccggctccaggatgccatacacgagcgggaccagctccagcgccaccttaactccgccctcccccaggaatttgccaccttaacccgggagctgagcatgtgtcgggagcagcttctagagcgggaggaagagatatcagaactgaaagcagaacggaataacacacggctgcttctggaacatctggagtgcctggtgtcccgccatgaacggtcactgcggatgactgtggtgaagcgccaggcccagtcaccttcgggggtctccagtgaggtggaggtgctgaaggccctcaagtcactgtttgagcaccacaaggccctggatgagaaggtgcgagagcggctccgggcagcgctggagcgagtcaccaccttggaggagcagctggcaggtgcccaccagcaggtgtctgccctgcagcagggggcaggggtgcgggatggagcggcagaagaggaggggactgtggagctggggccgaaacgcctgtggaaggaggatacgggccgggtagaggagctgcaggagctcctggagaagcagaactttgagttgagccaggcccgggagcgactggtcaccctaacaacaaccgtgactgaactcgaggaggacctgggcacggcccgccgggacctcatcaagtcggaggagctgagcagcaagcatcagcgggacctccgggaggctctggcccagaaggaggacatggaagagcggattactacactggagaagcgctacctggctgctcagcgtgaggcaacatccatccatgacctcaatgacaagctggagaatgagctggccaacaaggagtccctgcaccgccagtgtgaggagaaggcccgacacctgcaggagctgctggaggtggcagagcagaagctgcagcagacgatgcgcaaggcagagacgctgccagaggtggaggctgagctggcccagagaattgcagccctcaccaaggctgaagaacggcatggcaacattgaggagcacctgcggcagctggagggacagctggaggagaagaaccaggagctggcacggacggctgtgcaggtgcgccagcgggaaaagatgaatgaggaccacaacaagcggctgtcggacacagtggaccggctgctcagcgagtccaacgagcgtctgcagctccacctgaaggagcgcatggctgccctggaggagaagaacacgttgatccaggagttggagagctcccagcggcagattgaggagcagcaccaccacaagggccgcctgtctgaagagattgagaagctgcgccaagaggtggaccagctgaagggccgaggggggccgtttgtggatggcgtccactccaggtcgcacatgggcagtgcagcagacgtgcggttctccctgggcacaaccacacacgcacccccaggcgtgcatcgccgctactcggcattgagggaagagtctgccaagctggccctgcctttgacagtgaccctgagatctccgacgtggatgaggatgagccagggggtctgctgcaacttagagtaccacagttcagggaccctctgtgggtcatcaggcccgctgccagtgccggagatgattcaggaagagaaggagtccacggagctccgcgcggaggagattgagacgcgtgtaaccagtggcagcatggaagccctaaacctgaagcagctgcgcaagcgtggttccatccccacctctctgacggccctgtccctggccagcgcgtccccaccactcagcggccgctccacacctaagctcacctcccgcagtgctgcccaggacctggaccgaatgggggtcatgaccctgcccagtgacttaagaaagcataggaggaagctgctgtcgccagtgtctcgggaagagaaccgagaggataaagccaccataaaatgtgagacttctcctccttcctcacccaggacgctgcggctagagaagcttggccacccagccctgagccaggaagaaggcaagagtgccttggaggatcagggcagcaaccccagcagcagcaacagcagccaggactccctgcacaagggcgccaagcgcaagggcatcaagtcgtccattggccgcctgtttgggaagaaggagaagggcaggctgatccagctgagtcgggatggagccacaggccatgttctgctaacagactccgaattcagtatgcaggagcctatggtgcctgccaagctggggacccaggcagagaaggaccggcggctaaagaagaaacaccagctgcttgaagatgcccgcaggaaaggaatgccctttgcccagtgggatggtcctactgtggtctcctggttggagctctgggtggggatgcctgcctggtatgtggcagcctgccgggccaacgtcaagagtggtgccatcatgtccgctctgtcggacacagagatccagcgggagatcggcatcagcaatgccctgcaccggctcaagctccgcctggccattcaggagatggtgtcattgaccagcccctctgccccacccacctccaggacttcttctgggaatgtctgggtcacccatgaagagatggaaactctggaaacatctactaaaacagacagtgaggagggcagctgggctcagaccctggcctatggggacatgaaccatgagtggattgggaatgaatggctacccagcctggggctcccgcagtaccgcagctacttcatggagtgcctggtggacgcccgcatgctggaccacctcaccaagaaggacctgcgggtccacctgaagatggtggacagcttccatcgaaccagtcttcagtatggcatcatgtgtctgaagaggctgaattatgaccggaaggagctggagaagaggcgagaggagagccagcatgagatcaaggatgtgttagtctggaccaacgaccaggtggttcattgggtccagtctattgggctccgggactacgcaggaaacctgcatgagagtggtgtgcatggagccttgctggccctggacgagaacttcgaccacaacacactggccctgatcctccagatccccacacagaacacccaggcacgccaagtgatggaaagagagttcaataacctgttggccttgggcacagaccggaagctggatgacggggatgacaaggtgtttcgccgcgcgccctcctggaggaagcgcttccggccgcgggagcaccacggtcgcggcggcatgctcagcgcttccgcggagaccctcccggcgggcttccgtgtgtccaccctggggaccctgcagcccccaccggccccgccaaagaagatcatgcctgaagctcactcccactatctctacggacacatgctctccgccttccgggactagccatggcccccagggctggcttcctccttctgggtttcacaggctcctctggccctgacccctcttgctcgttccccttccttccgcagctcctagtctcgtccgtgactttccggttgccctggatctcagaatatattcgtccaccccctcggcaccccattaccccgagtcccaccgtgtgtccgttgtaagtccggtggatgtggctggggtttcctggtattgtggaggcacccaggttgtccatgcttgggattctgggggaaggagagaagggcagctcagggtggatgtgaagccacccttcctcttctggacccagcctggtctgcactgcaacctccaccaggaccaggatcctgggccacaggctgggatggtccttccaagaaagggtcatttcagacgcagccctgcttgggctattcaatcttagggtgtctatccacgtctggctgtgccaaatggtctggcagctggttttggcatccccagcatcaccactctcccaacccatcaccgtgactgcagttcctgcccccattctcttggggtcagggaggggctgggaagggctactgaaggccccattctcccacaggatggtgaggctgggaggaggaagactgaggtagagattccaggccctggcataagctgaatcccaaatttgagtttgggaagaaccagagagaaatggatccctgagctctgagccaagggtgaggatggggaaactctaagctcccacctaataagaagcataggcagaccagccagagggagagccaatggcctctggtagccttaagcccaaagggcagtgggaatgtcccctgccccaaccatcgggtggagctcctgctgggctatggggaagggaggttgtgcggatcttgactctagggcagaacagatctaaccatgcattgctagctctgctcccagcatcccttccccttctctcctcctctgcctcacttctttagtaatcccaaccctataaaaatgaacctaatgggtggattgaatatacattgagcccaaagtcaagtttggggaaaaggcagactaaggcctcctttctctgacctcccaggaagaaaatagcttctcctacagtgattcatgtcccaggtccaggaaatccaatgttggtgaaggcagccactctcttgcttgtccccaaatcacctaaccctcatccagggctattttggtgggcagggactgcctcctcccggaattcctaagatccgcccagctgccaccattttcattgctttccccagcagcatgatgggaacccaagctgagggatacaggtcctgatttggtaggaatattattcccaagaaatacccgctcctcacctactccctcatcctaccaaggtgcctgaaaatgttcaagacttatgttcagggtgggatgatggaaccgagggcttcatcaaagtgagaggaaaggaaaagcatctggcatgtgtttcttggataggggccagtgcagtgccatcctacaggtggctggagcagctgctttgcaacctgatcaccttgagttctgagcagggactaggcttgcaggtgagataatgggccagggcacccagtccagaaggagcaatggcacctgggcagtgccagggcttaaagcccgctgctccttttcggtagaggagaggcccatcactggtgtggtggggtgggctctcccttaggcttgggcaaggcagccacctgcccttgctctcccttagtgttccctggcctccctgccatcaggttgctgggagtggagatggagggattattgagcagaaaatgagttggatggagataaacagctcccatccctgggtaatggatggtaagatgatggagattcctaagattggtggagttgggcaatgcatagccatctgactccttcagggtgctcttgatgggctggctgtaagggagactcagtcccagcctctcccctctacaactcctgccactgttggccatgtcgtaaggcagcagctgtgccaggatagctgggtccattcagagcaccttgagaagtgttgcagggaggtgttaagaagagaactctgtgcaaacagtgatggaaggctgttgtcttggtgtatcccttgcctcatagtcaatatattttttttttggcgagtcaccagtgacccgagccctccacaccagcctcctgtatctcatcaggtcccttctcagtactgtatttgctcagtgcatcaggaatgggtgtatgggtgtgtgtgggtgggtgtgagtgtgggtgtgtacgtaccaataaacaacctggttttaagacaatgt

SEQ ID NO: 115624 - protein, 692 aa, Artificial Sequence
  derived and/or modified sequence
MGSAADVRFSLGTTTHAPPGVHRRYSALREESAKDWETSPLPGMLAPAAGPAFDSDPEISDVDEDEPGGLVGSADVVSPSGHSDAQTLAMMLQEQLDAINEEIRMIQEEKESTELRAEEIETRVTSGSMEALNLKQLRKRGSIPTSLTALSLASASPPLSGRSTPKLTSRSAAQDLDRMGVMTLPSDLRKHRRKLLSPVSREENREDKATIKCETSPPSSPRTLRLEKLGHPALSQEEGKSALEDQGSNPSSSNSSQDSLHKGAKRKGIKSSIGRLFGKKEKGRLIQLSRDGATGHVLLTDSEFSMQEPMVPAKLGTQAEKDRRLKKKHQLLEDARRKGMPFAQWDGPTVVSWLELWVGMPAWYVAACRANVKSGAIMSALSDTEIQREIGISNALHRLKLRLAIQEMVSLTSPSAPPTSRTSSGNVWVTHEEMETLETSTKTTLAYGDMNHEWIGNEWLPSLGLPQYRSYFMECLVDARMLDHLTKKDLRVHLKMVDSFHRTSLQYGIMCLKRLNYDRKELEKRREESQHEIKDVLVWTNDQVVHWVQSIGLRDYAGNLHESGVHGALLALDENFDHNTLALILQIPTQNTQARQVMEREFNNLLALGTDRKLDDGDDKVFRRAPSWRKRFRPREHHGRGGMLSASAETLPAGFRVSTLGTLQPPPAPPKKIMPEAHSHYLYGHMLSAFRD

SEQ ID NO: 115625 - DNA, 6395 bp, Artificial Sequence
  derived and/or modified sequence
atgtctgagagccccaaggacgagggctccgaagagtgtctgtttctgcagcgcctatgggagtggggggcagtggggggaactcagggaagctgcctacaacttgaggccttccccaggctggaggaggaggacagggaaggccgaggggagctgtcctccggctgccatcaccctgatgaggcggccctgccccgggctgtggtctccgcaggggctggcaaccttgcctttgtccagctctctccgtggccaggcctgccatctgcctgcccacactcctccccggcaaagccccttgcaaatgcttgctttggggactggcagctttcgcctctgaatcaggacctagcatcagtactctggggagggggtccaggtgccaaccctgtgagtccctccctgtcccctgacgctgagaaggccctgccaacccccaccatgtgtgaggtgatgcccacaatcaatgagggggaccgcctgggtccccctcatggcgccgatgctgacgccaacttcgagcagctgatggtgaacatgctggacgagcgggagaagttgctggagtctcttcgggagagtcaggagaccttggcggccacacagagccggctccaggatgccatacacgagcgggaccagctccagcgccaccttaactccgccctcccccaggaatttgccaccttaacccgggagctgagcatgtgtcgggagcagcttctagagcgggaggaagagatatcagaactgaaagcagaacggaataacacacggctgcttctggaacatctggagtgcctggtgtcccgccatgaacggtcactgcggatgactgtggtgaagcgccaggcccagtcaccttcgggggtctccagtgaggtggaggtgctgaaggccctcaagtcactgtttgagcaccacaaggccctggatgagaaggtgcgagagcggctccgggcagcgctggagcgagtcaccaccttggaggagcagctggcaggtgcccaccagcaggtgtctgccctgcagcagggggcaggggtgcgggatggagcggcagaagaggaggggactgtggagctggggccgaaacgcctgtggaaggaggatacgggccgggtagaggagctgcaggagctcctggagaagcagaactttgagttgagccaggcccgggagcgactggtcaccctaacaacaaccgtgactgaactcgaggaggacctgggcacggcccgccgggacctcatcaagtcggaggagctgagcagcaagcatcagcgggacctccgggaggctctggcccagaaggaggacatggaagagcggattactacactggagaagcgctacctggctgctcagcgtgaggcaacatccatccatgacctcaatgacaagctggagaatgagctggccaacaaggagtccctgcaccgccagtgtgaggagaaggcccgacacctgcaggagctgctggaggtggcagagcagaagctgcagcagacgatgcgcaaggcagagacgctgccagaggtggaggctgagctggcccagagaattgcagccctcaccaaggctgaagaacggcatggcaacattgaggagcacctgcggcagctggagggacagctggaggagaagaaccaggagctggcacggacggctgtgcaggtgcgccagcgggaaaagatgaatgaggaccacaacaagcggctgtcggacacagtggaccggctgctcagcgagtccaacgagcgtctgcagctccacctgaaggagcgcatggctgccctggaggagaagaacacgttgatccaggagttggagagctcccagcggcagattgaggagcagcaccaccacaagggccgcctgtctgaagagattgagaagctgcgccaagaggtggaccagctgaagggccgaggggggccgtttgtggatggcgtccactccaggtcgcacatgggcagtgcagcagacgtgcggttctccctgggcacaaccacacacgcacccccaggcgtgcatcgccgctactcggcattgagggaagagtctgccaaggactgggagacttctccactgcctgggatgctggccccggcagctggccctgcctttgacagtgaccctgagatctccgacgtggatgaggatgagccagggggtctggtgggctctgcggatgttgtctcccccagcggccactcagatgcccagaccctggccatgatgctgcaggagcagctggatgccatcaatgaggaaatcaggatgattcaggaagagaaggagtccacggagctccgcgcggaggagattgagacgcgtgtaaccagtggcagcatggaagccctaaacctgaagcagctgcgcaagcgtggttccatccccacctctctgacggccctgtccctggccagcgcgtccccaccactcagcggccgctccacacctaagctcacctcccgcagtgctgcccaggacctggaccgaatgggggtcatgaccctgcccagtgacttaagaaagcataggaggaagctgctgtcgccagtgtctcgggaagagaaccgagaggataaagccaccataaaatgtgagacttctcctccttcctcacccaggacgctgcggctagagaagcttggccacccagccctgagccaggaagaaggcaagagtgccttggaggatcagggcagcaaccccagcagcagcaacagcagccaggactccctgcacaagggcgccaagcgcaagggcatcaagtcgtccattggccgcctgtttgggaagaaggagaagggcaggctgatccagctgagtcgggatggagccacaggccatgttctgctaacagactccgaattcagtatgcaggagcctatggtgcctgccaagctggggacccaggcagagaaggaccggcggctaaagaagaaacaccagctgcttgaagatgcccgcaggaaaggaatgccctttgcccagtgggatggtcctactgtggtctcctggttggagctctgggtggggatgcctgcctggtatgtggcagcctgccgggccaacgtcaagagtggtgccatcatgtccgctctgtcggacacagagatccagcgggagatcggcatcagcaatgccctgcaccggctcaagctccgcctggccattcaggagatggtgtcattgaccagcccctctgccccacccacctccaggacttcttctgggaatgtctgggtcacccatgaagagatggaaactctggaaacatctactaaaacaaccctggcctatggggacatgaaccatgagtggattgggaatgaatggctacccagcctggggctcccgcagtaccgcagctacttcatggagtgcctggtggacgcccgcatgctggaccacctcaccaagaaggacctgcgggtccacctgaagatggtggacagcttccatcgaaccagtcttcagtatggcatcatgtgtctgaagaggctgaattatgaccggaaggagctggagaagaggcgagaggagagccagcatgagatcaaggatgtgttagtctggaccaacgaccaggtggttcattgggtccagtctattgggctccgggactacgcaggaaacctgcatgagagtggtgtgcatggagccttgctggccctggacgagaacttcgaccacaacacactggccctgatcctccagatccccacacagaacacccaggcacgccaagtgatggaaagagagttcaataacctgttggccttgggcacagaccggaagctggatgacggggatgacaaggtgtttcgccgcgcgccctcctggaggaagcgcttccggccgcgggagcaccacggtcgcggcggcatgctcagcgcttccgcggagaccctcccggcgggcttccgtgtgtccaccctggggaccctgcagcccccaccggccccgccaaagaagatcatgcctgaagctcactcccactatctctacggacacatgctctccgccttccgggactagccatggcccccagggctggcttcctccttctgggtttcacaggctcctctggccctgacccctcttgctcgttccccttccttccgcagctcctagtctcgtccgtgactttccggttgccctggatctcagaatatattcgtccaccccctcggcaccccattaccccgagtcccaccgtgtgtccgttgtaagtccggtggatgtggctggggtttcctggtattgtggaggcacccaggttgtccatgcttgggattctgggggaaggagagaagggcagctcagggtggatgtgaagccacccttcctcttctggacccagcctggtctgcactgcaacctccaccaggaccaggatcctgggccacaggctgggatggtccttccaagaaagggtcatttcagacgcagccctgcttgggctattcaatcttagggtgtctatccacgtctggctgtgccaaatggtctggcagctggttttggcatccccagcatcaccactctcccaacccatcaccgtgactgcagttcctgcccccattctcttggggtcagggaggggctgggaagggctactgaaggccccattctcccacaggatggtgaggctgggaggaggaagactgaggtagagattccaggccctggcataagctgaatcccaaatttgagtttgggaagaaccagagagaaatggatccctgagctctgagccaagggtgaggatggggaaactctaagctcccacctaataagaagcataggcagaccagccagagggagagccaatggcctctggtagccttaagcccaaagggcagtgggaatgtcccctgccccaaccatcgggtggagctcctgctgggctatggggaagggaggttgtgcggatcttgactctagggcagaacagatctaaccatgcattgctagctctgctcccagcatcccttccccttctctcctcctctgcctcacttctttagtaatcccaaccctataaaaatgaacctaatgggtggattgaatatacattgagcccaaagtcaagtttggggaaaaggcagactaaggcctcctttctctgacctcccaggaagaaaatagcttctcctacagtgattcatgtcccaggtccaggaaatccaatgttggtgaaggcagccactctcttgcttgtccccaaatcacctaaccctcatccagggctattttggtgggcagggactgcctcctcccggaattcctaagatccgcccagctgccaccattttcattgctttccccagcagcatgatgggaacccaagctgagggatacaggtcctgatttggtaggaatattattcccaagaaatacccgctcctcacctactccctcatcctaccaaggtgcctgaaaatgttcaagacttatgttcagggtgggatgatggaaccgagggcttcatcaaagtgagaggaaaggaaaagcatctggcatgtgtttcttggataggggccagtgcagtgccatcctacaggtggctggagcagctgctttgcaacctgatcaccttgagttctgagcagggactaggcttgcaggtgagataatgggccagggcacccagtccagaaggagcaatggcacctgggcagtgccagggcttaaagcccgctgctccttttcggtagaggagaggcccatcactggtgtggtggggtgggctctcccttaggcttgggcaaggcagccacctgcccttgctctcccttagtgttccctggcctccctgccatcaggttgctgggagtggagatggagggattattgagcagaaaatgagttggatggagataaacagctcccatccctgggtaatggatggtaagatgatggagattcctaagattggtggagttgggcaatgcatagccatctgactccttcagggtgctcttgatgggctggctgtaagggagactcagtcccagcctctcccctctacaactcctgccactgttggccatgtcgtaaggcagcagctgtgccaggatagctgggtccattcagagcaccttgagaagtgttgcagggaggtgttaagaagagaactctgtgcaaacagtgatggaaggctgttgtcttggtgtatcccttgcctcatagtcaatatattttttttttggcgagtcaccagtgacccgagccctccacaccagcctcctgtatctcatcaggtcccttctcagtactgtatttgctcagtgcatcaggaatgggtgtatgggtgtgtgtgggtgggtgtgagtgtgggtgtgtacgtaccaataaacaacctggttttaagacaatgt

SEQ ID NO: 115626 - protein, 801 aa, Artificial Sequence
  derived and/or modified sequence
MWKTTFAWHTEDMDLYSINYLHFGEPKSWYAIPPEHGKRLERLAQGFFPSSSQGCDAFLRHKMTLISPSVLKKYGIPFDKITQEAGEFMITFPYGYHAGFNHGFNCAESTNFATVRWIDYGKVAKLCTCRKDMVKISMDIFVRKFQPDRYQLWKQGKDIYTIDHTKPTPASTPEVKAWLQRRRKVRKASRSFQCARSTSKRPKADEEEEVSDEVDGAEVPNPDSVTDDLKVSEKSEAAVKLRNTEASSEEESSASRMQVEQNLSDHIKLSGNSCLSTSVTEDIKTEDDKAYAYRSVPSISSEADDSIPLSSGYEKPEKSDPSELSWPKSPESCSSVAESNELPEVLSIEEEVEETESWAKPLIHLWQTKSPNFAAEQEYNATVARMKPHCAICTLLMPYHKPDSSNEENDARWETKLDEVVTSEGKTKPLIPEMCFIYSEENIEYSPPNAFLEEDGTSLLISCAKCCVRVHASCYGIPSHEICDGWLCARCKRNAWTAECCLCNLRGGALKQTKNNKWAHVMCAVAVPEVRFTNVPERTQIDVGRIPLQRLKLKCIFCRHRVKRVSGACIQCSYGRCPASFHVTCAHAAGVLMEPDDWPYVVNITCFRHKVNPNVKSKACEKVISVGQTVITKHRNTRYYSCRVMAVTSQTFYEVMFDDGSFSRDTFPEDIVSRDCLKLGPPAEGEVVQVKWPDGKLYGAKYFGSNIAHMYQVEFEDGSQIAMKREDIYTLDEELPKRVKARFSTASDMRFEDTFYGADIIQGERKRQRVLSSRFKNEYVADPVYRTFLKSSFQKKCQKRQ

SEQ ID NO: 115627 - DNA, 3021 bp, Artificial Sequence
  derived and/or modified sequence
gtgcgcgtgcgcagcgaacagctgtcacctagtgcggaacaagtctcccaaatttcccaaatctccctgggccggaggccactgtcttctcttcctcctccaccgagtcgtgctctcgccccaacccgcgcgccagacactgccctaaccatcatggaggtggccgaggtggaaagtcctctgaaccccagctgtaagataatgaccttcagaccctccatggaggagttccgggagttcaacaaataccttgcatacatggagtctaaaggagcccatcgtgcgggtcttgcaaagatattgtactccaagatacttggattacgaagatttggagcgcaagtactggaagaacttaacttttgtggcacctatctatggtgcagatattaatgggagcatatatgatgagggtgtggatgaatggaacatagctcgcctcaatacagtcttggatgtggttgaagaagagtgtggcatttctattgagggtgtaaataccccatatctctattttggcatgtggaagaccacgtttgcatggcacaccgaagacatggacctctatagcattaattatctccactttggagagcccaagtcttggtatgctatacctccggagcatggaaaacgacttgaaagactagctcaaggttttttcccaagcagctcccaagggtgtgatgcatttcttcgccacaagatgacattgatttctccatcagtattgaagaaatatggtattccctttgacaagataacccaggaggctggagaattcatgatcactttcccatatggctaccatgctggttttaatcatggtttcaactgtgcagaatctacaaattttgctactgtcagatggattgactatggaaaagttgccaaattgtgcacttgcaggaaagacatggtgaagatttcaatggatatctttgtgaggaaatttcagccagacagatatcagctttggaaacaaggaaaggatatatacaccattgatcacacgaagcctactccagcatccacccctgaagtaaaagcatggctgcagaggaggaggaaagtaagaaaagcatcccgaagcttccagtgtgctaggtctacctctaaaaggcctaaggctgatgaggaagaggaagtgtcagatgaagtcgatggggcagaggtccctaaccccgactcagtcacagatgacctcaaggtcagtgaaaagtcagaagcagcagtgaagctgaggaacacagaagcatcttcagaagaagagtcatctgctagcaggatgcaggtggagcagaatttatcagatcatatcaaactctcaggaaacagctgcttaagtacatctgtaacagaagacataaaaactgaggatgacaaagcttatgcatatagaagtgtaccttctatatccagtgaggctgatgattccattccattgtctagtggctatgagaagcccgagaaatcagacccatccgagctttcatggccaaagtcacctgagtcatgctcatcagtggcagagagtaatgaattgcctgaggttctgtccattgaggaggaagtggaagaaacagagtcttgggcgaaacctctcatccacctttggcagacgaagtcccctaacttcgcagctgagcaagagtataatgcaacagtggccaggatgaagccacactgtgccatctgcactctgctcatgccgtaccacaagccagatagcagcaatgaagaaaatgatgctagatgggagacaaaattagatgaagtcgttacatcggagggaaagactaagcccctcataccagagatgtgttttatttatagtgaagaaaatatagaatattctccacccaatgccttccttgaagaggatggaacaagtctccttatttcctgtgcaaagtgctgcgtacgggttcatgcaagttgttatggtattccttctcatgagatctgtgatggatggctgtgtgcccggtgcaaaagaaatgcgtggacagcagaatgctgtctctgcaatttgagaggaggtgctcttaagcaaacgaagaacaataagtgggcccatgtcatgtgcgccgttgcggtcccagaagttcgattcactaatgtcccagaaaggacacaaatagatgtaggcagaatacctttacagaggttaaaattgaaatgcatcttctgcagacaccgggttaagagggtctctggagcctgcatccagtgttcctacggtcgctgcccggcctccttccatgtcacttgtgcccatgctgctggggtactgatggagcctgatgactggccttatgtggtgaacattacatgctttcgacataaggtcaaccccaacgtgaagtccaaggcttgcgagaaggtcatttccgtgggtcaaacggtcatcacgaagcatcggaacacccggtattacagttgcagagtgatggctgtgacatcgcagaccttctatgaggtcatgtttgatgatggctcctttagcagagacacatttcctgaggatatcgtgagccgagactgtctgaagctgggcccacctgctgagggagaagtcgtccaagtcaagtggcccgatggcaaactctatggagcaaaatattttggatcaaatattgcccacatgtaccaggttgagtttgaagatggatcccagatagcaatgaagagagaggacatctacactttagatgaagagttacccaagagagtgaaagctcgattttccacagcctctgacatgcgatttgaagacacgttttatggagcagacattatccaaggggagagaaagagacaaagagtgctgagctccaggtttaagaatgaatatgtggccgaccctgtataccgcacttttttgaagagctctttccagaagaagtgccagaagagacagtagtctgcatacatcgctgcaggccacagagcagcttgggttggaagagagaagatgaagggacatccttggggctgtgccgtgagttttgctggcat

SEQ ID NO: 115628 - DNA, 2406 bp, Artificial Sequence
  derived and/or modified sequence
atgtggaaaaccacattcgcctggcataccgaggacatggacctgtatagtataaattaccttcactttggagaaccgaagtcctggtatgcaattccaccagaacacgggaagagactggaacggctggcccaggggttcttcccgtcatcatcacagggatgtgatgcttttcttagacataaaatgacacttatttcgccttcagtcctgaagaagtatggcatcccgtttgacaaaatcacccaggaagcaggggagtttatgataacctttccatacggttaccatgcgggcttcaatcatggcttcaattgcgctgaatccacaaatttcgccactgttcgctggattgactacggaaaggtggccaagctgtgcacgtgtcgtaaagacatggtgaaaataagcatggatatattcgtccgcaagttccaacctgataggtaccagctgtggaagcagggcaaggatatctacacgattgaccatactaagccaacccccgcctccacacctgaagtgaaggcctggttgcagagacgccgtaaagtgaggaaggcttctaggtccttccagtgcgctcggagtacgtccaagcggccgaaagccgatgaggaggaagaagtgagcgatgaagttgatggcgccgaagtgccgaatccagattctgtcacagatgatctgaaggtaagcgaaaagtctgaagctgctgtgaagttgcgaaacacagaggccagttccgaagaggagagcagtgccagtcgcatgcaagttgagcaaaacctttcagaccacatcaagctctccgggaattcatgcttgtccacatcagtgacggaagacattaagacagaagatgacaaagcctatgcttacagatcggtcccaagcattagctcagaggccgatgacagcatcccattgagctccgggtatgagaagcctgaaaaaagcgatcctagcgaactgtcctggccaaaaagccctgagtcttgctcctcagtcgccgaatcaaatgagctcccagaggttctcagtattgaggaagaggtagaagagactgagtcctgggcaaagcccctcatccatttgtggcaaaccaagagcccgaacttcgccgctgagcaagaatacaatgcaaccgtggcgagaatgaaaccccactgtgccatttgcacactgctgatgccataccataaaccagattcgagcaacgaggagaatgacgcacggtgggagacaaaactggacgaggtcgtgacgtcagaaggaaagactaagccactaattccagagatgtgcttcatctactccgaggaaaacatcgaatactcgccccctaatgccttcctggaggaagacggtacatctcttcttatcagctgtgcgaaatgctgcgttcgcgttcacgcatcatgctacggtattcctagtcacgagatttgcgatgggtggctttgcgcgcggtgcaaacggaacgcttggacggcagaatgttgtttgtgtaatctgagagggggtgctctcaagcaaacaaagaacaacaagtgggcacatgtgatgtgtgcggtcgccgttccagaagtcagatttacaaatgtgcctgagcggacacagattgatgtgggtcgaatcccactgcagaggctcaagctgaagtgcatcttttgcaggcaccgcgtgaaaagggtaagtggtgcctgtattcaatgctcctacggtcgctgccctgccagtttccacgtgacatgcgctcatgccgccggcgtcctcatggagcccgatgattggccctacgtggtcaatatcacatgctttaggcataaggttaacccgaatgtcaaatcgaaggcgtgtgagaaggtgatcagtgtcggtcaaacagtgataacaaaacacaggaataccagatactattcctgcagagtgatggctgttaccagtcagacattctacgaagttatgtttgacgacggctcattcagcagggatactttcccagaagatatcgtgtctagagactgtctgaagttgggaccgcccgctgaaggcgaagtcgtgcaggtaaaatggccggatggcaagctgtatggggcgaagtactttgggagcaacattgcgcacatgtatcaagtcgaatttgaagacggctcacagatcgcaatgaagagagaggatatttatactttggacgaggagctccctaagagggtcaaagcccgcttctctaccgcatctgatatgcgcttcgaagataccttctacggagcagacatcatccagggtgagcgcaaaaggcaacgcgttttgtcgagtcgttttaaaaacgagtacgtagcagacccggtctacaggacctttcttaagtccagttttcagaagaaatgtcagaaaagacagtag

SEQ ID NO: 115629 - DNA, 2406 bp, Artificial Sequence
  derived and/or modified sequence
atgtggaagaccacctttgcctggcacacagaggacatggacctgtacagcatcaactacctgcactttggagagcccaagtcctggtacgccatccccccagagcacggcaagaggctggagcggctggcccagggcttcttccccagcagcagccagggctgtgatgccttcctgcggcacaagatgaccctcatcagccccagcgtgctgaagaagtatggcatcccctttgacaagatcacccaggaggccggggagttcatgatcaccttcccctacggctaccacgccggcttcaaccacggcttcaactgtgccgagagcaccaactttgccaccgtgcgctggattgattatggcaaggtggccaagctgtgcacctgcaggaaggacatggtgaagatctccatggacatctttgtgaggaagttccagcctgaccgctaccagctgtggaagcagggcaaggacatctacaccatcgaccacaccaagcccaccccagccagcaccccagaggtgaaggcctggctgcagaggaggaggaaggtgaggaaggccagccgctccttccagtgtgcccggagcaccagcaagaggcccaaggcagatgaggaggaggaggtgtctgatgaggtggatggagctgaggtgcccaacccagacagcgtgacagatgacctgaaggtgtctgagaagtctgaggccgctgtgaagctgaggaacacagaggccagcagcgaggaggagagcagcgccagcaggatgcaggtggagcagaacctgagtgaccacatcaagctgagcggcaacagctgcctgagcacctctgtgacagaggacatcaagacagaagatgacaaggcctatgcctacagatctgtgcccagcatcagcagcgaggctgatgacagcatccccctgagcagcggctatgagaagccagagaagagtgaccccagcgagctgtcctggcccaagagccctgagagctgcagctctgtggccgagagcaatgagctgcctgaggtgctgagcattgaggaggaggtggaggagacagagagctgggccaagcccctcatccacctgtggcagaccaagagccccaactttgctgctgagcaggagtacaatgccaccgtggccaggatgaagccccactgtgccatctgcaccctgctgatgccctaccacaagccagacagcagcaatgaggagaatgatgcccgctgggagaccaagctggatgaggtggtgaccagcgagggcaagaccaagcccctcatccctgagatgtgcttcatctacagtgaagaaaatattgagtacagccccccaaatgccttcctggaggaggatggcaccagcctgctgatcagctgtgccaagtgctgcgtgcgggtgcacgccagctgctacggcatccccagccatgagatctgtgatggctggctgtgtgcccgctgcaagagaaatgcctggacagctgagtgctgcctgtgcaacctgcggggcggggccctgaagcagaccaagaacaacaagtgggcccacgtgatgtgtgctgtggccgtgcctgaggtgcgcttcaccaacgtgcctgagaggacccagattgatgtgggccgcatccccctgcagaggctgaagctgaagtgcatcttctgccgccaccgggtgaagagggtgtctggggcctgcatccagtgcagctatggccgctgcccagccagcttccacgtgacctgtgcccacgccgccggcgtgctgatggagccagatgactggccctacgtggtgaacatcacctgcttccgccacaaggtgaaccccaacgtgaagagcaaggcctgtgagaaggtgatctctgtgggccagaccgtcatcaccaagcacaggaacacccgctactacagctgccgggtgatggctgtgaccagccagaccttctatgaggtgatgtttgatgatggcagcttcagccgggacaccttcccagaagatattgtgtcccgggactgcctgaagctgggccccccagctgagggggaggtggtgcaggtgaagtggccagatggcaagctgtatggagccaagtacttcggcagcaacatcgcccacatgtaccaggtggagtttgaagatggcagccagatcgccatgaagcgggaggacatctacaccctggatgaggagctgcccaagagggtgaaggcccgcttcagcacagccagtgacatgagatttgaggacaccttctacggggctgacatcatccagggcgagaggaagaggcagagggtgctgagcagccgcttcaagaatgaatatgtggccgaccctgtgtaccgcaccttcctgaagagcagcttccagaagaagtgccagaagaggcagtag

SEQ ID NO: 115630 - DNA, 2406 bp, Artificial Sequence
  derived and/or modified sequence
atgtggaagaccaccttcgcctggcacaccgaggacatggacctgtactctattaactacctgcactttggcgagccaaagagttggtacgccatccccccggaacacggaaagcgcctggagcgactggctcaaggtttcttcccctcttccagccaggggtgtgacgcttttttgagacataaaatgacactcattagtccctccgtgcttaagaaatatggtatcccattcgataagatcactcaggaagccggcgagtttatgattaccttcccttatggttaccatgcagggtttaaccacggatttaattgcgctgagagtaccaacttcgcgacagtgcgatggatcgactacggtaaagtggccaaactttgcacatgccgcaaggatatggtgaagatttcgatggatatctttgtgagaaagttccagcctgataggtaccagctatggaagcagggcaaggatatctataccattgaccacacgaaacccacacctgcctcgactcctgaggttaaggcttggctgcagagaagaagaaaagtgaggaaggctagtcgttcgttccagtgcgcccgttcaacatctaaacggccaaaggccgacgaggaggaggaagtatccgatgaagtggacggcgcagaggtgcctaaccctgacagcgtgactgacgatctcaaagtgtctgagaaaagcgaggcagccgtgaagctgaggaatactgaagcgagttcagaagaagagtcctcggcctcacgcatgcaagtggagcaaaacctgtccgaccacattaaactatcaggtaattcctgcttgagtacttctgtgaccgaagacattaaaactgaagatgataaagcttacgcttaccggtccgtgcccagtattagctcagaggcagacgattctatccccctcagctccggctatgagaaacctgaaaaatctgacccgagtgaactgtcctggccgaagtcccccgagtcttgttccagcgtcgcagaatccaacgaactgccagaagtccttagcatcgaggaggaagttgaggaaacagagtcttgggccaagcctctcatccacctctggcagacaaagtctccaaatttcgccgcggagcaagagtacaacgctactgtcgcccgcatgaaaccacattgcgcgatttgtacattactgatgccttaccataaaccagatagctccaatgaggaaaatgacgcaagatgggagactaaactcgacgaagtagttacgagtgagggcaagacaaagcccctcatccccgagatgtgctttatctactccgaggaaaatatcgaatatagcccacccaatgcttttctggaagaggatgggacatcactgctcatatcatgcgcaaagtgctgtgtcagggttcatgcatcctgctacggtattccctcccacgagatctgtgacggctggctttgtgctcggtgcaaacggaatgcttggacagccgaatgttgtctctgcaacttgaggggtggggctttgaagcagactaaaaataacaagtgggctcacgttatgtgtgctgtggcagtccctgaagtccgctttacaaatgtgcccgagaggacgcagatcgacgtgggccgcatcccactccagagactgaagctgaagtgcattttttgtcggcaccgtgtaaagagggtgagcggggcctgcatacaatgttcttatggccgctgccctgcttcgttccacgttacttgcgcccacgctgccggggtgcttatggaacccgacgattggccttatgttgtgaatatcacatgcttcaggcataaggtgaaccctaacgtgaagtccaaggcgtgcgaaaaagtgatctcagtggggcaaacagtgatcactaagcacagaaataccaggtattactcctgccgggtaatggcagttactagccaaacattctatgaggttatgttcgatgacggcagcttcagtcgagatacatttccagaggacatcgtgagcagggattgtctcaaactggggccaccagctgaaggggaagtggtacaggtcaagtggccagatggcaagctttatggagccaagtacttcggctctaacattgcccatatgtatcaggttgagttcgaggacggttctcaaatcgctatgaagagggaggacatctataccctcgacgaagagcttcctaagagggtaaaagccaggttctccaccgccagcgatatgcgattcgaggataccttctacggggccgatattatacagggcgaacgcaaaagacagcgcgtgctgtccagcaggtttaagaatgaatatgtggctgaccccgtataccgtactttcctgaaatcgagttttcaaaaaaaatgtcagaagagacaatag

SEQ ID NO: 115631 - DNA, 2406 bp, Artificial Sequence
  derived and/or modified sequence
atgtggaaaactacatttgcatggcataccgaggacatggatctgtactctattaactatctccactttggagagccaaagagctggtacgccatccctcctgagcatgggaagcgcctcgaacgactggcccaaggcttcttccccagtagcagtcagggttgtgacgcattcttacgccataagatgaccttaatatccccgagcgtgctgaagaaatacgggatcccttttgacaagatcacccaggaagccggagagtttatgatcacattcccttatggatatcacgcaggctttaatcatggctttaactgcgctgaatcaacgaactttgccaccgttaggtggatagactatggtaaggtggctaaactgtgtacttgtcgcaaggatatggtcaaaatatctatggacatattcgtgaggaaatttcagcctgatcgttatcagctatggaaacaagggaaggatatctacacaatagaccatactaagccaactcctgcttccacccccgaggtcaaggcttggctgcagagacgaaggaaggtgaggaaggcgagcaggtccttccaatgtgccagatccacctctaaaagacctaaagctgacgaggaagaagaggtttctgacgaggtcgacggtgccgaggtgccaaaccccgactccgtaactgacgacctgaaagtttcggagaagtcagaggccgcagtaaagctgcgaaacaccgaggcttcttctgaagaagagagcagcgcttccaggatgcaggtcgagcaaaatctgtccgatcatatcaagctgagcgggaactcctgcctcagcacttccgtgactgaggacataaagacagaggatgataaggcgtacgcctacagatccgtgccctctatctccagcgaggctgacgactctatccctctgtcaagtgggtacgagaagcccgaaaaatctgacccgtcagagttgtcttggccaaagtcacctgagtcatgctccagcgttgcagagtctaatgagctcccggaggtgctttccattgaggaagaagtggaggagaccgaaagttgggctaagccacttattcatctgtggcagactaaaagccccaattttgctgccgaacaggaatacaacgctactgtcgctagaatgaaacctcactgcgccatctgcactcttctcatgccctaccacaaaccagattctagcaacgaagagaatgacgcgagatgggagaccaagctcgatgaagtggtaacatccgaaggaaagacaaaaccgttaatcccggaaatgtgttttatatattctgaggagaacatagaatactccccccctaacgctttcttagaagaagatggtacatctcttctcatctcctgtgcgaaatgttgcgtgcgtgtgcacgcatcctgctatggcattccaagtcacgaaatatgcgatggatggctgtgtgccaggtgtaaacggaacgcctggacggcggaatgctgcctttgcaacctgcgcggaggcgctctcaaacagacaaagaacaataagtgggcccatgtgatgtgcgccgttgccgtgcccgaagtcagattcacgaatgtgccagagcggactcaaatcgacgtgggaaggattccccttcagcgactgaaattgaaatgtatcttttgtaggcatcgcgtgaagcgagtatccggcgcttgcatacagtgcagttatggcaggtgtcccgctagttttcatgtgacttgcgctcacgcggctggcgtgctcatggaaccggatgactggccatacgtcgttaatattacctgctttcggcacaaagtgaaccctaatgtgaagagcaaagcttgtgagaaggttatctccgttgggcagaccgtgattacaaaacacagaaacacaagatactatagttgccgagttatggcagtgacctctcagactttttacgaagtgatgtttgatgacgggagcttctccagggatacattccccgaagatatcgtttctcgggactgcttgaagttgggcccaccagcagaaggggaggtggtgcaggtgaagtggcccgacgggaagctctatggcgctaaatatttcgggtccaacatcgctcacatgtatcaggtcgagttcgaggatggctcccagattgcaatgaagagggaagacatctatactctcgacgaggagctacccaagagggtcaaggcgaggttctctaccgcttccgacatgcggttcgaggataccttctacggggcagacatcatccagggagagagaaagcggcagagggtgctgtccagcagattcaagaacgaatatgtggccgaccctgtataccggacgttcctgaaatcaagcttccaaaaaaaatgtcagaagcggcagtag

SEQ ID NO: 115632 - DNA, 2406 bp, Artificial Sequence
  derived and/or modified sequence
atgtggaagaccaccttcgcctggcacaccgaggacatggacctgtacagcatcaactacctgcacttcggcgagcccaagagctggtacgccatcccccccgagcacggcaagagactggagagactggcccagggcttcttccccagcagcagccagggctgcgacgccttcctgagacacaagatgaccctgatcagccccagcgtgctgaagaagtacggcatccccttcgacaagatcacccaggaggccggcgagttcatgatcaccttcccctacggctaccacgccggcttcaaccacggcttcaactgcgccgagagcaccaacttcgccaccgtgagatggatcgactacggcaaggtggccaagctgtgcacctgcagaaaggacatggtgaagatcagcatggacatcttcgtgagaaagttccagcccgacagataccagctgtggaagcagggcaaggacatctacaccatcgaccacaccaagcccacccccgccagcacccccgaggtgaaggcctggctgcagagaagaagaaaggtgagaaaggccagcagaagcttccagtgcgccagaagcaccagcaagagacccaaggccgacgaggaggaggaggtgagcgacgaggtggacggcgccgaggtgcccaaccccgacagcgtgaccgacgacctgaaggtgagcgagaagagcgaggccgccgtgaagctgagaaacaccgaggccagcagcgaggaggagagcagcgccagcagaatgcaggtggagcagaacctgagcgaccacatcaagctgagcggcaacagctgcctgagcaccagcgtgaccgaggacatcaagaccgaggacgacaaggcctacgcctacagaagcgtgcccagcatcagcagcgaggccgacgacagcatccccctgagcagcggctacgagaagcccgagaagagcgaccccagcgagctgagctggcccaagagccccgagagctgcagcagcgtggccgagagcaacgagctgcccgaggtgctgagcatcgaggaggaggtggaggagaccgagagctgggccaagcccctgatccacctgtggcagaccaagagccccaacttcgccgccgagcaggagtacaacgccaccgtggccagaatgaagccccactgcgccatctgcaccctgctgatgccctaccacaagcccgacagcagcaacgaggagaacgacgccagatgggagaccaagctggacgaggtggtgaccagcgagggcaagaccaagcccctgatccccgagatgtgcttcatctacagcgaggagaacatcgagtacagcccccccaacgccttcctggaggaggacggcaccagcctgctgatcagctgcgccaagtgctgcgtgagagtgcacgccagctgctacggcatccccagccacgagatctgcgacggctggctgtgcgccagatgcaagagaaacgcctggaccgccgagtgctgcctgtgcaacctgagaggcggcgccctgaagcagaccaagaacaacaagtgggcccacgtgatgtgcgccgtggccgtgcccgaggtgagattcaccaacgtgcccgagagaacccagatcgacgtgggcagaatccccctgcagagactgaagctgaagtgcatcttctgcagacacagagtgaagagagtgagcggcgcctgcatccagtgcagctacggcagatgccccgccagcttccacgtgacctgcgcccacgccgccggcgtgctgatggagcccgacgactggccctacgtggtgaacatcacctgcttcagacacaaggtgaaccccaacgtgaagagcaaggcctgcgagaaggtgatcagcgtgggccagaccgtgatcaccaagcacagaaacaccagatactacagctgcagagtgatggccgtgaccagccagaccttctacgaggtgatgttcgacgacggcagcttcagcagagacaccttccccgaggacatcgtgagcagagactgcctgaagctgggcccccccgccgagggcgaggtggtgcaggtgaagtggcccgacggcaagctgtacggcgccaagtacttcggcagcaacatcgcccacatgtaccaggtggagttcgaggacggcagccagatcgccatgaagagagaggacatctacaccctggacgaggagctgcccaagagagtgaaggccagattcagcaccgccagcgacatgagattcgaggacaccttctacggcgccgacatcatccagggcgagagaaagagacagagagtgctgagcagcagattcaagaacgagtacgtggccgaccccgtgtacagaaccttcctgaagagcagcttccagaagaagtgccagaagagacagtag

SEQ ID NO: 115633 - protein, 310 aa, Artificial Sequence
  derived and/or modified sequence
MSQQLKKRAKTRHQKGLGGRAPSGAKPRQGKSSQDLQAEIEPVSAVWALCDGYVCYEPGPQALGGDDFSDCYIECVIRGEFSQPILEEDSLFESLEYLKKGSEQQLSQKVFEASSLECSLEYMKKGVKKELPQKIVGENSLEYSEYMTGKKLPPGGIPGIDLSDPKQLAEFARKKPPINKEYDSLSAIACPQSGCTRKLRNRAALRKHLLIHGPRDHVCAECGKAFVESSKLKRHFLVHTGEKPFRCTFEGCGKRFSLDFNLRTHVRIHTGEKRFVCPFQGCNRRFIQSNNLKAHILTHANTNKNEQEGK

SEQ ID NO: 115634 - DNA, 2646 bp, Artificial Sequence
  derived and/or modified sequence
agtttctcctttgttttacgtttgggaggaggtggcattggaaatagcagagtgcttcgcggtaacaggggttggagtgcaatggtgtgatctcagctcactgcaacccctgcctcccaggctccagcgatcctcccacctcagcctcctgaatagctgaccaccagcacactaggcaaacccaccccactcaccgcctcccttgggaattcagacctaaccatcgctgagctgaaacaaatgtactgaggctggagcctgtgtgaacagaacagaagaggccttcactctagtagtgctcacagtccagcaggtgtttgctgaagacagcttactcagatcactactgcctggaggtggttgatatatcctggtgtaaaccttcaagaagggcacaggcaggaaaacatgagccagcaactgaagaaacgggcaaagacaagacaccagaaaggcctgggtggaagagcccccagtggggctaagcccaggcaaggcaagtcaagccaagacctgcaggcggaaatagaacctgtcagcgcggtgtgggccttatgtgatggctatgtgtgctatgagcctggccctcaggctctcggaggggatgatttctcagactgttacatagaatgcgtcataaggggtgagttttctcaacccatcctggaagaggactcactttttgagtccttggaatacctaaagaaaggatcagaacaacagctttctcaaaaggttttcgaagcaagctcccttgaatgttctttggaatacatgaaaaaaggggtaaagaaagagcttccacaaaagatagttggagagaattcgcttgagtattctgagtacatgacaggcaagaagcttccgcctggaggaatacctggcattgacctatcagatcctaaacagctcgcagaatttgctagaaagaagccccccataaataaagaatatgacagtctgagcgcaatcgcttgtcctcagagtggatgcactaggaagttgaggaatagagctgccctgagaaagcatctcctcattcatggtccccgagaccacgtctgtgcggaatgtgggaaagcgttcgttgagagctcaaaactaaagagacatttcctggttcatactggagagaagccgtttcggtgcacttttgaagggtgcggaaagcgcttctctctggactttaatttgcgtacgcacgtgcgcatccacacgggggagaaacgtttcgtgtgtccctttcaaggctgcaacaggaggtttattcagtcaaataacctgaaagcccacatcctaacgcatgcaaatacgaacaagaatgaacaagagggaaagtagtcctccaacaggatgaagcagattaacagaagagtgatcagtgacaaacatgcctcattgattattgtttctaggaaggaatttctaaatcaatattgcaaccccaaaagcggttataatttggtgttactaagatgctcctacactttgtgataccgttttaaggacatggtgcatttttttttcttttatttgttttatttagaactttttttatttgttttatttagaactttgtgtgttcttaaagtgtgcttccaacaggaaggtcagtgataaattttcaaaagcataaccttcaatatattatctgttggattattggatataagacttattttcatgtactataaatatgaaaataactttgatttttaattgtgtagtttccatttcttagcttttgccttttaaatttatacttcagccaggcatagtgactgatgcctgtaatcccaacactttgttgggaggccaaagcaggaggatagcttgaggccaggagttccagaccagcctgggcaacatagtgagatcctgtctctacaaaaaaaattgtttttatttgtatttatatatttttatttttgtttttgttggtaggcgtctcgctctgtcacccaggctggagtctagtgtcgtgatcttggctcactgcaacctccacctcccgggttcaagtgattctctggcctcagcctcccaagtagctgggactacaggtgtgtgtcaccacgcccggctaatttttgtatttttagtagagatggggtttcaccatgttggccaggctagtctcaaactcctgacctccagtgatctgcccacctcggcctcccaaagtgctgggattacaggtgtgagccactgtgcctggccccccacaacatgtttaaacttagctaggcctggttgcatacgcctgtgttcccagctactcaggaggctgaagcaggaggatagcttgagcccaggagtttgaggctacagtgagctgtgattgcaccactgtactccagactggataacagcaagagcccatcttttaaaaaaagtaaaaattaaaaatatacttcatggttcatgtcatagccctagagaatgaaaaatttgcagtagatagtcaataaatgaatcagtagttaaatattccttaaagtcaactgtatttcattgtgatttttgttttctttttatcattgtatcaaactatatggaaatcatatggttagatgtgattatttgataatgttagtccatttgaatccattttagatatttcacaattaaagaatatgaaacttc

SEQ ID NO: 115635 - DNA, 933 bp, Artificial Sequence
  derived and/or modified sequence
atgagccagcagctgaagaagagagccaagaccagacaccagaagggcctgggcggcagagcccccagcggcgccaagcccagacagggcaagagcagccaggacctgcaggccgagatcgagcccgtgagcgccgtgtgggccctgtgcgacggctacgtgtgctacgagcccggcccccaggccctgggcggcgacgacttcagcgactgctacatcgagtgcgtgatcagaggcgagttcagccagcccatcctggaggaggacagcctgttcgagagcctggagtacctgaagaagggcagcgagcagcagctgagccagaaggtgttcgaggccagcagcctggagtgcagcctggagtacatgaagaagggcgtgaagaaggagctgccccagaagatcgtgggcgagaacagcctggagtacagcgagtacatgaccggcaagaagctgccccccggcggcatccccggcatcgacctgagcgaccccaagcagctggccgagttcgccagaaagaagccccccatcaacaaggagtacgacagcctgagcgccatcgcctgcccccagagcggctgcaccagaaagctgagaaacagagccgccctgagaaagcacctgctgatccacggccccagagaccacgtgtgcgccgagtgcggcaaggccttcgtggagagcagcaagctgaagagacacttcctggtgcacaccggcgagaagcccttcagatgcaccttcgagggctgcggcaagagattcagcctggacttcaacctgagaacccacgtgagaatccacaccggcgagaagagattcgtgtgccccttccagggctgcaacagaagattcatccagagcaacaacctgaaggcccacatcctgacccacgccaacaccaacaagaacgagcaggagggcaagtag

SEQ ID NO: 115636 - DNA, 933 bp, Artificial Sequence
  derived and/or modified sequence
atgtcccaacagctgaaaaagcgggccaagacgcggcaccaaaagggccttggagggagggccccctctggtgccaaacccagacaaggaaagagcagccaggatttgcaggctgaaattgagcctgtgagcgccgtgtgggctttgtgcgacggatacgtgtgttatgaacctggccctcaagccttggggggggacgatttctccgattgttacattgaatgtgtgattcgcggcgaatttagccaacccatcttagaggaggattcgttattcgagtccctggaatatttgaaaaaagggtccgagcagcagctgtctcagaaggtcttcgaggcaagcagcctggaatgctctctagagtatatgaaaaagggagtaaaaaaggaactgcctcagaagattgtcggagaaaattctctggagtattccgagtacatgaccgggaaaaagctcccccctggcggcattcctggtatcgacttgagtgacccaaagcagcttgcagagttcgcccggaagaagccacccatcaataaggaatatgatagcttatcggccattgcatgcccacaaagtggatgcaccagaaagctgcggaatcgcgctgccttacggaagcacctgttgatccacggtccacgggaccatgtgtgcgcagaatgcggcaaggcatttgtagagtctagcaagcttaaacgccactttctggtgcatactggggagaaacctttcagatgcacatttgaaggatgcggaaagcggttctcactggacttcaatttaaggactcacgttcgcatacatacgggcgagaaacgtttcgtgtgcccttttcaggggtgtaatcggaggtttatacagagtaataacctgaaagcccatatcctgactcacgccaataccaataaaaacgaacaggagggaaaatag

SEQ ID NO: 115637 - DNA, 933 bp, Artificial Sequence
  derived and/or modified sequence
atgtcacagcagctcaaaaagcgcgctaagacacgccaccagaagggactaggagggcgcgctccctccggcgccaagcccagacagggtaagtcgagccaggatctgcaggctgagatcgaacctgtcagtgctgtgtgggctctgtgtgacggatacgtctgttatgagcctggcccccaggcactgggaggggatgatttcagtgattgttatatagaatgtgtgattcgcggagaatttagccaacctattctcgaggaggatagccttttcgaatctctcgagtacttgaaaaaaggcagcgagcagcagttgtcccagaaggtctttgaagcaagctccttagagtgcagtcttgagtacatgaaaaagggtgtgaaaaaagagctcccgcagaagatcgtgggagagaatagcctggaatatagcgagtacatgacaggtaagaaattaccacctggtggcatccccggcatagatttatccgaccctaagcagttagctgaattcgcacgcaagaaaccacccattaataaggaatatgactctcttagtgcgatcgcctgtcctcagagcgggtgcacgcgcaaactgcgcaaccgcgccgcactgcgaaagcacctcctgattcacggaccacgggaccacgtctgcgccgagtgtggaaaggcttttgtggagtcttcaaaattgaaacgacactttctcgtccacacaggcgagaaacctttccgatgcacatttgaggggtgtggtaaacggttcagccttgattttaacctgcggacccatgtgcgcatccacaccggggaaaaaagatttgtttgccctttccagggctgtaaccggaggttcattcagagcaataacctgaaggcccatattttaactcacgccaacacaaataagaatgaacaggagggcaaatag

SEQ ID NO: 115638 - DNA, 933 bp, Artificial Sequence
  derived and/or modified sequence
atgagccagcagctgaagaagagggccaagaccaggcaccagaagggcctgggcggccgggcccccagcggggccaagccccggcagggcaagagcagccaggacctgcaggccgagattgagcctgtgtctgctgtgtgggccctgtgtgatggctacgtgtgctatgagcccggcccccaggccctgggcggagatgacttcagtgactgctacattgaatgtgtgatccggggggagttcagccagcccatcctggaggaggacagcctgtttgagagcctggagtacctgaagaagggcagcgagcagcagctgagccagaaggtgtttgaggccagcagcctggagtgcagcctggagtacatgaagaagggcgtgaagaaggagctgccccagaagatcgtgggggagaacagcctggagtacagcgagtacatgaccgggaagaagctgcccccaggcggcatccctggcatcgacctgagtgaccccaagcagctggccgagtttgccaggaagaagccacccatcaacaaggagtatgacagcctgagcgccatcgcctgcccccagagcggctgcaccaggaagctgaggaacagagctgccctgaggaagcacctgctgatccacggcccccgggaccacgtgtgtgctgaatgtgggaaggcctttgtggagagcagcaagctgaagaggcacttcctggtgcacactggagagaagcccttccgctgcacctttgagggctgtgggaagcgcttcagcctggacttcaacctgcggacccacgtgcgcatccacactggagagaagagatttgtgtgccccttccagggctgcaacagacgcttcatccagagcaacaacctgaaggcccacatcctgacccacgccaacaccaacaagaatgagcaggagggcaagtag

SEQ ID NO: 115639 - DNA, 933 bp, Artificial Sequence
  derived and/or modified sequence
atgagccagcagctgaagaagcgggccaagacccggcaccagaagggactgggtgggagagcccctagcggcgctaaacccagacagggtaagagctctcaggatctccaggcagagatcgagccagtcagtgccgtctgggcattatgcgacggctatgtctgctacgagcctggaccacaagccctgggcggcgatgatttctctgactgctacattgaatgcgttatacgcggagagttcagtcagccgatattggaagaggattctctgttcgaatcactcgagtacctgaagaaagggtctgaacaacagctttctcagaaggtctttgaggcatcatccctagaatgcagcctcgaatacatgaagaagggcgtgaaaaaagaactcccacagaagattgtgggcgagaactccttagaatacagtgagtatatgactggcaaaaagctgcctcccggcggcatacccgggatcgacttaagcgatccaaagcaactcgcagagtttgcccgtaagaagcctcctataaacaaggagtacgactctctgtcagccatcgcttgccctcagtctggctgcactcggaagttgcggaaccgggcggcacttaggaaacacctcctgatccatggccctcgcgaccacgtgtgcgcagaatgcggcaaggcctttgttgagtcctccaaactgaaaaggcacttcctggtacatacaggagaaaaaccgtttagatgcactttcgaaggctgcggcaaaaggttctctttggacttcaaccttcgcactcacgttagaatccacactggtgaaaagaggtttgtgtgtcccttccagggatgtaaccggcggttcatccagtctaataacctcaaggcacatatcctcacccatgcgaacactaacaagaatgagcaggaggggaagtag

SEQ ID NO: 115640 - DNA, 933 bp, Artificial Sequence
  derived and/or modified sequence
atgagccagcagctgaagaagcgggccaagacccggcaccagaaggggctcgggggacgagctccttctggtgctaagccccgacagggcaaatcctcccaggatctgcaagctgaaatcgagccggtctccgccgtttgggcgctgtgcgatgggtacgtctgttatgagcccggcccacaggcattgggcggagacgactttagcgactgttacatcgagtgtgttattcggggcgagttttctcagcctatcttagaagaggattcgcttttcgagtctctggagtatctcaagaaaggaagtgaacagcagttatctcagaaggtattcgaagcatcttccttagagtgctctctggagtatatgaaaaagggggtcaagaaagagcttcctcagaaaatcgtgggagagaactccctggaatattcagaatacatgactgggaagaagctcccaccaggcggaatccccggtatcgacctgtccgaccctaaacagctcgcagagttcgcacggaagaagcctcctattaataaggagtatgattcgctttcagccatagcatgtccacagagcggctgtaccaggaagctgcgcaatcgcgcggctttacggaaacatttattgattcacggtcctcgcgatcacgtgtgtgccgagtgcgggaaggccttcgtggagtctagcaaactgaaacggcacttcttagtgcacacgggagagaaaccatttagatgtacctttgaaggatgcggaaaacggttttctttggactttaacctacgcacacacgttagaatacatactggtgagaagcgctttgtatgccctttccagggatgcaatcgtcgttttatccagagtaataacttgaaagctcacatactcacacacgccaatactaacaaaaatgagcaagaaggaaagtag

SEQ ID NO: 115641 - DNA, 933 bp, Artificial Sequence
  derived and/or modified sequence
atgtcgcaacagctgaagaaacgggctaaaaccaggcatcagaaaggactgggcggaagggcgccttcaggcgcaaagccgcgacaggggaagagctctcaggacttgcaggccgagattgaaccagtctccgccgtgtgggcactatgtgacggctatgtctgctacgagccaggaccacaggccctgggaggcgacgatttctcggattgctacattgagtgtgtaattagaggggagttctcacagcctatccttgaggaagattctctgtttgaatctttagagtaccttaagaaaggaagtgaacagcaattgtcacagaaagtattcgaggcctcctccctagaatgttcactggagtatatgaagaagggtgtgaagaaagagctacctcagaagatcgtgggagagaactctctggagtattctgagtacatgaccggtaagaaactgccaccgggaggcattcccggaattgatctgtctgatcccaagcagctggcagagttcgctcgcaagaagccaccaataaacaaagagtatgactcactcagcgctatcgcatgcccccagtccgggtgtacaaggaagctgagaaatagggccgctctccggaaacatctgctgatccatggccctcgggatcacgtgtgcgcagaatgtggtaaggcctttgttgaaagctctaagctgaaacggcactttctcgttcataccggggagaaaccattccgctgcaccttcgaaggttgcggcaaacggttctcactggacttcaatctccggactcatgtgcgcattcataccggcgaaaagaggtttgtctgcccctttcaggggtgtaaccgccgttttatccagagcaataaccttaaagcccacatactgacccatgcgaacactaacaagaatgaacaagagggtaaatag

SEQ ID NO: 115642 - DNA, 933 bp, Artificial Sequence
  derived and/or modified sequence
atgagccagcaactgaagaaacgcgctaagactagacatcagaaggggttggggggtagagccccttctggggctaaaccccgacagggaaagagttcccaggacctccaagccgagatagagcctgtgtcagctgtctgggccctgtgtgatggttacgtctgttacgagccgggacctcaggcccttgggggagatgacttctctgattgttacattgaatgcgtgattagaggtgaatttagccagccgattctggaagaagactccctgtttgagtctcttgaatacctcaagaaggggtcagagcagcagctttcccagaaggtctttgaagcctctagcttggaatgcagcttagagtatatgaagaaaggggtgaaaaaagagctgccacagaagatcgtgggcgaaaactctttggaatactcagagtatatgaccggtaaaaagcttccacctggtggaattccaggcattgacctaagcgatcccaaacaattggcggaattcgcacgaaagaaaccgcctattaacaaagaatacgacagcctgagcgctattgcttgcccccagagcggatgtactcgtaaacttcgcaaccgggctgctttaaggaaacacctgctgatacacggacccagagaccacgtctgtgccgagtgcggaaaggctttcgtggagagctcgaagctgaagaggcactttctggtgcacactggggaaaagccttttcgatgtactttcgaaggatgcggcaagagattttctctggacttcaacctgcgaactcacgtgcgtatccatacaggagaaaaacgctttgtgtgcccattccagggttgtaaccggaggttcatacaatcgaacaatttaaaagcccacattttaactcatgctaatacaaataagaacgagcaagagggcaaatag

SEQ ID NO: 115643 - DNA, 2480 bp, Artificial Sequence
  derived and/or modified sequence
agtttctcctttgttttacgtttgggaggaggtggcattggaaatagcagagtgcttcgcggtaacagggacaaatgtactgaggctggagcctgtgtgaacagaacagaagaggccttcactctagtagtgctcacagtccagcaggtgtttgctgaagacagcttactcagatcactactgcctggaggtggttgatatatcctggtgtaaaccttcaagaagggcacaggcaggaaaacatgagccagcaactgaagaaacgggcaaagacaagacaccagaaaggcctgggtggaagagcccccagtggggctaagcccaggcaaggcaagtcaagccaagacctgcaggcggaaatagaacctgtcagcgcggtgtgggccttatgtgatggctatgtgtgctatgagcctggccctcaggctctcggaggggatgatttctcagactgttacatagaatgcgtcataaggggtgagttttctcaacccatcctggaagaggactcactttttgagtccttggaatacctaaagaaaggatcagaacaacagctttctcaaaaggttttcgaagcaagctcccttgaatgttctttggaatacatgaaaaaaggggtaaagaaagagcttccacaaaagatagttggagagaattcgcttgagtattctgagtacatgacaggcaagaagcttccgcctggaggaatacctggcattgacctatcagatcctaaacagctcgcagaatttgctagaaagaagccccccataaataaagaatatgacagtctgagcgcaatcgcttgtcctcagagtggatgcactaggaagttgaggaatagagctgccctgagaaagcatctcctcattcatggtccccgagaccacgtctgtgcggaatgtgggaaagcgttcgttgagagctcaaaactaaagagacatttcctggttcatactggagagaagccgtttcggtgcacttttgaagggtgcggaaagcgcttctctctggactttaatttgcgtacgcacgtgcgcatccacacgggggagaaacgtttcgtgtgtccctttcaaggctgcaacaggaggtttattcagtcaaataacctgaaagcccacatcctaacgcatgcaaatacgaacaagaatgaacaagagggaaagtagtcctccaacaggatgaagcagattaacagaagagtgatcagtgacaaacatgcctcattgattattgtttctaggaaggaatttctaaatcaatattgcaaccccaaaagcggttataatttggtgttactaagatgctcctacactttgtgataccgttttaaggacatggtgcatttttttttcttttatttgttttatttagaactttttttatttgttttatttagaactttgtgtgttcttaaagtgtgcttccaacaggaaggtcagtgataaattttcaaaagcataaccttcaatatattatctgttggattattggatataagacttattttcatgtactataaatatgaaaataactttgatttttaattgtgtagtttccatttcttagcttttgccttttaaatttatacttcagccaggcatagtgactgatgcctgtaatcccaacactttgttgggaggccaaagcaggaggatagcttgaggccaggagttccagaccagcctgggcaacatagtgagatcctgtctctacaaaaaaatttgtttttatttgtatttatatatttttatttttgtttttgttggtaggcgtctcgctctgtcacccaggctggagtctagtgtcgtgatcttggctcactgcaacctccacctcccgggttcaagtgattctctggcctcagcctcccaagtagctgggactacaggtgtgtgtcaccacgcccggctaatttttgtatttttagtagagatggggtttcaccatgttggccaggctagtctcaaactcctgacctccagtgatctgcccacctcggcctcccaaagtgctgggattacaggtgtgagccactgtgcctggccccccacaacatgtttaaacttagctaggcctggttgcatacgcctgtgttcccagctactcaggaggctgaagcaggaggatagcttgagcccaggagtttgaggctacagtgagctgtgattgcaccactgtactccagactggataacagcaagagcccatcttttaaaaaaagtaaaaattaaaaatatacttcatggttcatgtcatagccctagagaatgaaaaatttgcagtagatagtcaataaatgaatcagtagttaaatattccttaaagtcaactgtatttcattgtgatttttgttttctttttatcattgtatcaaactatatggaaatcatatggttagatgtgattatttgataatgttagtccatttgaatccattttagatatttcacaattaaagaatatgaaacttc

SEQ ID NO: 115644 - DNA, 2651 bp, Artificial Sequence
  derived and/or modified sequence
agtttctcctttgttttacgtttgggaggaggtggcattggaaatagcagagtgcttcgcggtaacaggggttggagtgcaatggtgtgatctcagctcactgcaacccctgcctcccaggctccagcgatcctcccacctcagcctcctgaatagctgaccaccagcacactaggcaaacccaccccactcacggcctcccttgggaattcagacctaaccatcgctgagctgaaacaaatgtactgaggctggagcctgtgtgaacagaacagaagaggccttcactctagtagtgctcacagtccagcaggtgtttgctgaagacagcttactcagatcactactgcctggaggtggttgatatatcctggtgtaaaccttcaagaagggcacaggcaggaaaacatgagccagcaactgaagaaacgggcaaagacaagacaccagaaaggcctgggtggaagagcccccagtggggctaagcccaggcaaggcaagtcaagccaagacctgcaggcggaaatagaacctgtcagcgcggtgtgggccttatgtgatggctatgtgtgctatgagcctggccctcaggctctcggaggggatgatttctcagactgttacatagaatgcgtcataaggggtgagttttctcaacccatcctggaagaggactcactttttgagtccttggaatacctaaagaaaggatcagaacaacagctttctcaaaaggttttcgaagcaagctcccttgaatgttctttggaatacatgaaaaaaggggtaaagaaagagcttccacaaaagatagttggagagaattcgcttgagtattctgagtacatgacaggcaagaagcttccgcctggaggaatacctggcattgacctatcagatcctaaacagctcgcagaatttgctagaaagaagccccccataaataaagaatatgacagtctgagcgcaatcgcttgtcctcagagtggatgcactaggaagttgaggaatagagctgccctgagaaagcatctcctcattcatggtccccgagaccacgtctgtgcggaatgtgggaaagcgttcgttgagagctcaaaactaaagagacatttcctggttcatactggagagaagccgtttcggtgcacttttgaagggtgcggaaagcgcttctctctggactttaatttgcgtacgcacgtgcgcatccacacgggggagaaacgtttcgtgtgtccctttcaaggctgcaacaggaggtttattcagtcaaataacctgaaagcccacatcctaacgcatgcaaatacgaacaagaatgaacaagagggaaagtagtcctccaacaggatgaagcagattaacagaagagtgatcagtgacaaacatgcctcattgattattgtttctaggaaggaatttctaaatcaatattgcaaccccaaaagcggttataatttggtgttactaagatgctcctacactttgtgataccgttttaaggacatggtgcatttttttttcttttatttgttttatttagaactttttttatttgttttatttagaactttgtgtgttcttaaagtgtgcttccaacaggaaggtcagtgataaattttcaaaagcataaccttcaatatattatctgttggattattggatataagacttattttcatgtactataaatatgaaaataactttgatttttaattgtgtagtttccatttcttagcttttgccttttaaatttatacttcagccaggcatagtgactgatgcctgtaatcccaacactttgttgggaggccaaagcaggaggatagcttgaggccaggagttccagaccagcctgggcaacatagtgagatcctgtctctacaaaaaaatttgtttttatttgtatttatatatttttatttttgtttttgttggtaggcgtctcgctctgtcacccaggctggagtctagtgtcgtgatcttggctcactgcaacctccacctcccgggttcaagtgattctctggcctcagcctcccaagtagctgggactacaggtgtgtgtcaccacgcccggctaatttttgtatttttagtagagatggggtttcaccatgttggccaggctagtctcaaactcctgacctccagtgatctgcccacctcggcctcccaaagtgctgggattacaggtgtgagccactgtgcctggccccccacaacatgtttaaacttagctaggcctggttgcatacgcctgtgttcccagctactcaggaggctgaagcaggaggatagcttgagcccaggagtttgaggctacagtgagctgtgattgcaccactgtactccagactggataacagcaagagcccatcttttaaaaaaagtaaaaattaaaaatatacttcatggttcatgtcatagccctagagaatgaaaaatttgcagtagatagtcaataaatgaatcagtagttaaatattccttaaagtcaactgtatttcattgtgatttttgttttctttttatcattgtatcaaactatatggaaatcatatggttagatgtgattatttgataatgttagtccatttgaatccattttagatatttcacaattaaagaatatgaaacttcagaaa

SEQ ID NO: 115645 - protein, 620 aa, Artificial Sequence
  derived and/or modified sequence
MSVGRRKLALLWALALALACTRHTGHAQDGSSESSYKHHPALSPIARGPSGVPLRGATVFPSLRTIPVVRASNPAHNGRVCSTWGSFHYKTFDGDVFRFPGLCNYVFSEHCGAAYEDFNPATPQPGVSGPHAEQGPHEGGWRGHPADQGLRPGQRPPGPAALQPVWGPHSRAAATPRWRPGWALSSCGTTMTACCWLDTKYANKLWALWGLQRDARGQRAPLPQHQADTHGIREPARWTTPRSSVRTLSLNPRGTAPLALGICEELLHGQLFSGCVALVDVGSYLEACRQDLCFCEDTDLLSCVCHTLAEYSRQCTHAGGLPQDWRGPDFCPQKCPNNMQYHECRSPCADTCSNQEHSRACEDHCVAGCFCPEGTVLDDIGQTGCVPVSKCACVYNGAAYAPGATYSTDCTNCTCSGGRWSCQEVPCPGTCSVLGGAHFSTFDGKQYTVHGDCSYVLTKPCDSSAFTVLAELRRCGLTDSETCLKSVTLSLDGVQTVVVIKASGEVFLNQIYTQLPISAANVTIFRPSTFFIIAQTSLGLQLNLQLVPTMQLFMQLAPKLRGQTCGLCGNFNSIQADDFRTLSGVVEATAAAFFNTFKTQAACPNIRNSFEDPCSLSVEN

SEQ ID NO: 115646 - protein, 623 aa, Artificial Sequence
  derived and/or modified sequence
MSVGRRKLALLWALALALACTRHTGHAQDGSSESSYKHHPALSPIARGPSGVPLRGATVFPSLRTIPVVRASNPAHNGRVCSTWGSFHYKTFDGDVFRFPGLCNYVFSEHCGAAYEDFNIQLRRSQESAAPTLSRVLMKVDGVVIQLTKGSVLVNGHPVLLPFSQSGVLIQQSSSYTKVEARLGLVLMWNHDDSLLLELDTKYANKTCGLCGDFNGMPVVSELLSHNTKLTPMEFGNLQKMDDPTEQCQDPVPEPPRNCSTGFGICEELLHGQLFSGCVALVDVGSYLEACRQDLCFCEDTDLLSCVCHTLAEYSRQCTHAGGLPQDWRGPDFCPQKCPNNMQYHECRSPCADTCSNQEHSRACEDHCVAGCFCPEGTVLDDIGQTGCVPVSKCACVYNGAAYAPGATYSTDCTNCTCSGGRWSCQEVPCPGTCSVLGGAHFSTFDGKQYTVHGDCSYVLTKPCDSSAFTVLAELRRCGLTDSETCLKSVTLSLDGVQTVVVIKASGEVFLNQIYTQLPISAANVTIFRPSTFFIIAQTSLGLQLNLQLVPTMQLFMQLAPKLRGQTCGLCGNFNSIQADDFRTLSGVVEATAAAFFNTFKTQAACPNIRNSFEDPCSLSVEN

SEQ ID NO: 115647 - DNA, 123 bp, Artificial Sequence
  derived and/or modified sequence
atgagtaagaccaataagtccaaaagcggcagcaggtcgtctcggagtcggagcgcttcccgttccagatcacgcagttttagtaagtctagaagtcggtcgagaagtctgagtagatcttag

SEQ ID NO: 115648 - DNA, 930 bp, Artificial Sequence
  derived and/or modified sequence
atgcttctgatcctgttgagcgttgctcttctcgccctgagctctgctcagtctcttaatgaagatgtttcccaagaggaatctccatccgtgattagtgggaagcccgagggacggcgacctcaggggggtaaccagccacaacgcactccacctcctccaggtaaacccgaaggccgacctccccagggcggcaaccagtcgcaaggaccacccccccgccctggtaagcccgaaggccctccgccccagggtggaaaccagagccagggacctcctccccgccctggtaaacccgaaggacagcccccccagggcggaaaccaatctcagggacctcctcccaggcccggcaaacccgaaggccccccaccacaggggggcaaccaatcccagggccccccccccagacctgggaaacctgagggaccgccacctcagggaggtaaccagagccagggtcctccaccacatccaggcaaaccagagggccctcccccccaggggggtaatcagtcccaggggccacctccccgacccggcaaacctgagggaccacccccgcaaggaggcaaccagagccagggcccaccaccgagaccagggaagcccgaaggcccgcctccacagggaggaaaccagtcgcagggcccgccaccacgacccggcaaacctgaggggcccccatctcaggggggcaataaaccccagggtccgccacctcatccaggaaagcctcagggaccacccccccaggagggaaacaaaccgcagaggccgcctccccctgggaggccacagggccccccccctccaggcggaaatccacagcaacctctccccccacctgcaggtaagccccagggacctccccctccccctcagggaggcaggccacaccggcccccacagggacaacctccccagtag

SEQ ID NO: 115649 - DNA, 603 bp, Artificial Sequence
  derived and/or modified sequence
atgacttctgcagagaccgcgtcaagggcagcagagtctggcggaacccccgtgcgaccgtgctcccgcccacatcgagcaccctctcccgctgcgccatcccgacccggagcaccagcagctggccctaggaagctgctggtgcccggactcccctgtctggtgcggggaggctggccatggacaaggccggatagctcaccttttcggcctgctgctcgcccaagaatgtcacctcacagatccccggctgtcgctcggcgatgtggacggccacggaggagggatccacgccgtaggcgtacacccgctttgcccaggccctggccgggtagaggaggaccaggacgttctctgctccatcgccatctcttcatccaacaacttctgcggacgtgttggcccgcacttccacgggatcggacccccgctcctggaggcacaatgcccggtgcggcactggctggcccaggaagacaagctagtgggagcccagctcctcagagcgaaggggctccaccacgtccctggacaccactgcagccgggactgcatcatcggccacccagctcaagtagcgggctcctgtcctcttttttctag

SEQ ID NO: 115650 - DNA, 1863 bp, Artificial Sequence
  derived and/or modified sequence
atgagcgttggcagaaggaaactcgccctgctctgggccctcgctctggccctagcatgtacaaggcacacaggccatgcacaggacggaagcagtgaaagtagctacaaacaccaccccgccctatccccgattgcccgaggcccatctggcgtccctcttcgaggggccacagtttttccatctctccgcaccatccctgtcgtaagggcgtctaacccagcccacaatgggagggtctgtagtacctgggggagcttccactacaaaactttcgacggggatgtctttaggttcccgggcctttgtaactatgtgttcagtgaacattgcggggcagcctatgaggactttaatccagccaccccacaacccggagtcagtggccctcatgccgagcagggcccacacgaggggggttggagaggccatcccgcagatcaggggctccgacctggtcagcgcccacccggaccagcagcccttcagccggtgtgggggccgcacagcagagcggctgccacacctagatggaggccggggtgggccctgagctcttgcggtactactatgacggcttgctgttggctggacaccaaatatgccaacaagttgtgggcattgtggggtctccagagggacgcaagaggacagcgggcaccattgccgcaacaccaggcagatacgcatggtattagggaacccgctagatggacaactcctaggtcttctgtgcgaaccctcagcctaaatccccggggaactgcacctctggcgttgggtatatgcgaagagttactgcatggtcagctattcagcgggtgcgtggctttagtagatgtgggttcctatttggaagcctgcaggcaagacctatgcttctgtgaggacacagacctcctctcatgcgtgtgccacacccttgctgagtacagcagacagtgtacccacgcaggagggctcccacaggactggagaggtccggacttttgtccccagaaatgccctaataatatgcagtaccatgagtgtagatcaccctgtgctgacacatgttcgaatcaggagcacagtagggcctgcgaagaccactgcgtcgccggctgcttctgccccgaaggaaccgtcctggacgacattggccagacaggctgtgttcccgtgagtaagtgcgcctgcgtgtataacggagcagcctatgcgcctggggctacttactcaacagactgcacaaactgcacctgttctggcgggaggtggtcatgccaggaagtgccgtgtccgggcacttgtagcgtattgggaggtgcccacttcagtacctttgatggcaagcagtacaccgttcatggcgactgttcttatgtgcttacaaagccctgcgactcctcagccttcaccgtgctggcagagctgcgtcggtgcggcctcactgacagcgagacttgcctgaagtctgtgactctctccctggatggagtccagacagtagtggtgattaaggctagtggcgaggtgtttcttaaccagatttatacacagttaccaatctcggccgccaacgtcacaattttcaggccgagcaccttctttatcatcgcgcaaaccagtctcggtctccaattaaatctgcagcttgtgcctactatgcagctctttatgcagctggccccaaagctgcgcggccaaacctgtggcctttgcgggaacttcaactcgatccaggctgacgattttcggactctgtcaggagtcgttgaggccactgccgctgcttttttcaacaccttcaagactcaggcagcctgccccaacatccggaactcctttgaagatccgtgcagcctttcagtggaaaattag

SEQ ID NO: 115651 - DNA, 1872 bp, Artificial Sequence
  derived and/or modified sequence
atgagcgtcggccggcggaagctggccctgctttgggcactcgccctcgcactagcttgtacaaggcacacaggacacgcacaggacggcagtagcgaaagctcatataagcaccatcccgccttgagtcccatcgctcggggtccctccggcgttcccctgcgaggagccaccgtgtttcctagcttgcgcactatcccagtggtcagagcctcaaaccccgcacataacggccgcgtgtgcagtacctggggttctttccactacaagacctttgacggcgatgtctttagattccctggactgtgcaactatgtctttagtgagcactgcggggcagcctatgaggactttaacattcaattacgaaggtcacaggagagcgcggctcccaccctgtcacgggttctgatgaaggtagacggcgtagtcattcagttgaccaagggttccgtacttgtgaacggacatcctgtactactgccatttagccaatctggagttctcatccagcagtcctcgagctacacaaaagtggaggcccggctgggactggtgctcatgtggaaccacgacgactcactcttgcttgagctagacaccaaatatgccaacaaaacctgtggcctgtgcggtgacttcaatggtatgcctgtcgtatctgaactgctttcacacaacactaagcttacgccgatggagttcggcaatctccagaaaatggacgaccccacagagcagtgccaagatcctgtgcctgaaccaccacgtaattgttcgacagggtttgggatttgcgaagagcttctgcatgggcagctgtttagcggctgcgttgcactcgttgacgtgggttcttacctcgaggcatgcaggcaagacctttgcttttgtgaggacaccgacctgttgagctgcgtgtgtcacactctcgcagaatacagtaggcagtgtacacatgcaggtggactgccccaggattggcgaggccccgatttctgtccacaaaaatgtcccaacaacatgcagtatcatgagtgtcgttctccttgtgccgatacatgtagcaaccaggagcattctagagcctgcgaagatcattgtgtggccggctgcttttgtcctgaaggcaccgtgcttgacgatattggccagactggttgtgtgcccgtgtcaaagtgtgcatgtgtctacaacggggccgcctatgcacctggagccacctactccactgactgcaccaactgtacgtgctcaggcggtagatggtcctgccaggaagttccctgcccggggacatgctccgtgttagggggcgcccatttctcaacctttgacggcaagcaatatactgtgcacggggactgctcatacgtcctgactaagccctgcgacagttccgccttcacagtgttagctgagttgagacgttgcgggttaactgattcagaaacgtgtctcaagtccgtgacactgtcactggacggcgtgcagacagtggttgtcatcaaggcgtcaggtgaggtgttcctgaaccagatctacacccagctccctatctccgctgctaacgtgaccatattcagacccagcacgttcttcataattgctcagacatcacttggcttacagctgaatctacagctggtccctaccatgcagctgttcatgcagctcgctccaaagctcagaggccaaacatgtggcctttgcgggaacttcaattctatccaggccgatgatttccgtacacttagcggtgtcgtagaagctaccgcggctgccttttttaatacgttcaagacccaggctgcgtgcccgaacatcagaaattcgtttgaggatccctgttccctgtcagtcgaaaattag

SEQ ID NO: 115652 - DNA, 1863 bp, Artificial Sequence
  derived and/or modified sequence
atgtctgtgggccgcaggaagctggccctgctgtgggccctggccctggccctggcctgcaccaggcacacaggccacgcccaggacggcagcagcgagagcagctacaagcaccacccagccctgagccccatcgcccggggccccagcggcgtgcccctgcggggggccaccgtcttccccagcctgcggaccatccctgtggtgcgggccagcaacccagcccacaacggccgggtgtgcagcacctggggcagcttccactacaagacctttgatggagatgtgttccgcttccctggcctgtgcaactacgtgttcagcgagcactgtggggccgcctatgaggacttcaacccagccaccccccagcccggggtgtctggcccccacgccgagcagggcccccatgaaggaggctggaggggccaccctgctgaccagggcctgcggcccggccagaggcctcctggccctgctgccctgcagcctgtgtggggcccccacagcagagctgctgccaccccccgctggaggcctggctgggccctgagcagctgtggcaccaccatgacagcctgctgctggctggacaccaagtatgccaacaagctgtgggccctgtggggcctgcagagagatgcccggggccagagggcccccctgccccagcaccaggccgacacccacggcatccgggagcccgcccgctggaccacccccaggagctctgtgaggaccctgagcctgaacccccggggcacagcccccctggccctgggcatctgtgaggagctgctgcacggccagctgttcagcggctgtgtggccctggtggatgtgggcagctacctggaggcctgccggcaggacctgtgcttctgtgaggacacagacctgctgagctgtgtgtgccacaccctggccgagtacagccggcagtgcacccacgccggcggcctgccccaggactggaggggccctgacttctgcccccagaagtgccccaacaacatgcagtaccatgaatgtcgcagcccctgtgccgacacctgcagcaaccaggagcacagccgggcctgtgaggaccactgtgtggccggctgcttctgcccagagggcaccgtgctggatgacatcggccagacaggctgtgtgcctgtgtccaaatgtgcctgtgtgtacaacggggccgcctatgcccctggggccacctacagcacagactgcaccaactgcacctgcagcggcggccgctggagctgccaggaggtgccctgccccggcacctgcagcgtgctgggcggggcccacttcagcacctttgatggcaagcagtacacagtgcacggggactgcagctatgtgctgaccaagccctgtgacagcagcgccttcaccgtgctggccgagctgcggcgctgtggcctgacagacagcgagacctgcctgaagtctgtgaccctgagcctggatggagtgcagacagtggtggtgatcaaggccagcggggaggtgttcctgaaccagatctacacccagctgcccatctctgctgccaacgtgaccatcttccggcccagcaccttcttcatcatcgcccagaccagcctgggcctgcagctgaacctgcagctggtgcccaccatgcagctgttcatgcagctggcccccaagctgcggggccagacctgtggcctgtgtggcaacttcaacagcatccaggctgatgacttccgcaccctgtctggagtggtggaggccacagctgctgccttcttcaacaccttcaagacccaggccgcctgccccaacatcagaaattcctttgaggacccctgcagcctgtctgtggagaactag

SEQ ID NO: 115653 - DNA, 1872 bp, Artificial Sequence
  derived and/or modified sequence
atgtctgtgggccgcaggaagctggccctgctgtgggccctggccctggccctggcctgcaccaggcacacaggccacgcccaggacggcagcagcgagagcagctacaagcaccacccagccctgagccccatcgcccggggccccagcggcgtgcccctgcggggggccaccgtcttccccagcctgcggaccatccctgtggtgcgggccagcaacccagcccacaacggccgggtgtgcagcacctggggcagcttccactacaagacctttgatggagatgtgttccgcttccctggcctgtgcaactacgtgttcagcgagcactgtggggccgcctatgaggacttcaacatccagctgcggcgcagccaggagagcgctgcccccaccctgagccgggtgctgatgaaggtggatggagtggtgatccagctgaccaagggctctgtgctggtgaatggccaccctgtgctgctgcccttcagccagagcggcgtgctgatccagcagagcagcagctacaccaaggtggaggcccggctgggcctggtgctgatgtggaaccatgatgacagcctgctgctggagctggacaccaagtatgccaacaagacctgtggcctgtgtggggacttcaacggcatgcctgtggtgtctgagctgctgagccacaacaccaagctgacccccatggagtttggaaacctgcagaagatggatgaccccacagagcagtgccaggaccctgtgcctgagcccccaagaaactgcagcactggatttggcatctgtgaggagctgctgcacggccagctgttcagcggctgtgtggccctggtggatgtgggcagctacctggaggcctgccggcaggacctgtgcttctgtgaggacacagacctgctgagctgtgtgtgccacaccctggccgagtacagccggcagtgcacccatgctgggggcctgccccaggactggaggggccctgacttctgcccccagaagtgccccaacaacatgcagtaccacgagtgccgcagcccctgtgccgacacctgcagcaaccaggagcacagccgggcctgtgaggaccactgtgtggccggctgcttctgcccagagggcaccgtgctggatgacatcggccagacaggctgtgtgcctgtgtccaaatgtgcctgtgtgtacaatggagctgcctatgcccctggggccacctacagcacagactgcaccaactgcacctgcagcggcggccgctggagctgccaggaggtgccctgccccggcacctgcagcgtgctgggcggggcccacttcagcacctttgatggcaagcagtacacagtgcatggagactgcagctatgtgctgaccaagccctgtgacagcagcgccttcaccgtgctggccgagctgcggcgctgtggcctgacagattctgagacctgcctgaagtctgtgaccctgagcctggatggagtgcagacagtggtggtgatcaaggccagcggggaggtgttcctgaaccagatctacacccagctgcccatctctgctgccaacgtgaccatcttccggcccagcaccttcttcatcatcgcccagaccagcctgggcctgcagctgaacctgcagctggtgcccaccatgcagctgttcatgcagctggcccccaagctgcggggccagacctgtggcctgtgtggcaacttcaacagcatccaggctgatgacttccgcaccctgagcggcgtggtggaggccacagctgctgccttcttcaacaccttcaagacccaggccgcctgccccaacatccggaacagctttgaggacccctgcagcctgtctgtggagaactag

SEQ ID NO: 115654 - DNA, 1860 bp, Artificial Sequence
  derived and/or modified sequence
atgagtgttggccggaggaagctggccctgctctgggccctggctctcgctctggcctgcacccggcacacaggccatgcccaggatggctcctccgaatccagctacaagcaccaccctgccctctctcctatcgcccgggggcccagcggggtcccgctccgtggggcgactgtcttcccatctctgaggaccatccctgtggtacgagcctccaacccggcgcacaacgggcgggtgtgcagcacctggggcagcttccactacaagaccttcgacggcgacgtcttccgcttccccggcctctgcaactacgtgttctccgagcactgcggtgccgcctacgaggattttaacccagctacgccgcagccaggagtcagcggcccccacgctgagcagggtcctcatgaaggtggatggcgtggtcatccagctgaccaagggctccgtcctggtcaacggccacccggtcctgctgcccttcagccagtctggggtcctcattcaagagcagcagctacaccaaggtggaggccaggctgggccttgtcctcatgtggaaccacgatgacagcctgctgctggctggacaccaaatacgccaacaagctgtgggctctgtggggacttcaacgggatgcccgtggtcagcgagctcctctcccacaacaccaagctgacacccatggaattcgggaacctgcaagatggacgaccccacggagcagtgtcaggaccctgtccctgaacccccgaggaactgctccactggctttgggcatctgtgaggagctcctgcacggccagctgttctctggctgcgtggccctggtggacgtcggcagctacctggaggcttgcaggcaagacctctgcttctgtgaagacaccgacctgctcagctgcgtctgccacacccttgccgagtactcccggcagtgcacccatgcaggggggttgccccaggactggcggggccctgacttctgcccccagaagtgccccaacaacatgcagtaccacgagtgccgctccccctgtgcagacacctgctccaaccaggagcactcccgggcctgtgaggaccactgtgtggccggctgcttctgccctgaggggacggtgcttgacgacatcggccagaccggctgtgtccctgtgtcaaagtgtgcctgcgtctacaacggggctgcctatgccccaggggccacctactccacagactgcaccaactgcacctgctccggaggccggtggagctgccaggaggttccatgcccgggtacctgctctgtgcttggaggtgcccacttctcaacgtttgacgggaagcaatacacggtgcacggcgactgcagctatgtgctgaccaagccctgtgacagcagtgccttcactgtactggctgagctgcgcaggtgcgggctgacggacagcgagacctgcctgaagagcgtgacactgagcctggatggggtgcagacggtggtggtgatcaaggccagtggggaagtgttcctgaaccagatctacacccagctgcccatctctgcagccaacgtcaccatcttcagaccctcaaccttcttcatcatcgcccagaccagcctgggcctgcagctgaacctgcagctggtgcccaccatgcagctgttcatgcagctggcgcccaagctccgtgggcagacctgcggtctctgtgggaacttcaacagcatccaggccgatgacttccggaccctcagtggggtggtggaggccaccgctgcggccttcttcaacaccttcaagacccaggccgcctgccccaacatcaggaacagcttcgaggacccctgctctctgagcgtggagaat

SEQ ID NO: 115655 - DNA, 1917 bp, Artificial Sequence
  derived and/or modified sequence
ctcagaggctgctgagggacagggcactcttccccgccgtccacacaatgagtgttggccggaggaagctggccctgctctgggccctggctctcgctctggcctgcacccggcacacaggccatgcccaggatggctcctccgaatccagctacaagcaccaccctgccctctctcctatcgcccgggggcccagcggggtcccgctccgtggggcgactgtcttcccatctctgaggaccatccctgtggtacgagcctccaacccggcgcacaacgggcgggtgtgcagcacctggggcagcttccactacaagaccttcgacggcgacgtcttccgcttccccggcctctgcaactacgtgttctccgagcactgcggtgccgcctacgaggattttaacatccagctacgccgcagccaggagtcagcggcccccacgctgagcagggtcctcatgaaggtggatggcgtggtcatccagctgaccaagggctccgtcctggtcaacggccacccggtcctgctgcccttcagccagtctggggtcctcattcagcagagcagcagctacaccaaggtggaggccaggctgggccttgtcctcatgtggaaccacgatgacagcctgctgctggagctggacaccaaatacgccaacaagacctgtgggctctgtggggacttcaacgggatgcccgtggtcagcgagctcctctcccacaacaccaagctgacacccatggaattcgggaacctgcagaagatggacgaccccacggagcagtgtcaggaccctgtccctgaacccccgaggaactgctccactggctttggcatctgtgaggagctcctgcacggccagctgttctctggctgcgtggccctggtggacgtcggcagctacctggaggcttgcaggcaagacctctgcttctgtgaagacaccgacctgctcagctgcgtctgccacacccttgccgagtactcccggcagtgcacccatgcaggggggttgccccaggactggcggggccctgacttctgcccccagaagtgccccaacaacatgcagtaccacgagtgccgctccccctgtgcagacacctgctccaaccaggagcactcccgggcctgtgaggaccactgtgtggccggctgcttctgccctgaggggacggtgcttgacgacatcggccagaccggctgtgtccctgtgtcaaagtgtgcctgcgtctacaacggggctgcctatgccccaggggccacctactccacagactgcaccaactgcacctgctccggaggccggtggagctgccaggaggttccatgcccgggtacctgctctgtgcttggaggtgcccacttctcaacgtttgacgggaagcaatacacggtgcacggcgactgcagctatgtgctgaccaagccctgtgacagcagtgccttcactgtactggctgagctgcgcaggtgcgggctgacggacagcgagacctgcctgaagagcgtgacactgagcctggatggggtgcagacggtggtggtgatcaaggccagtggggaagtgttcctgaaccagatctacacccagctgcccatctctgcagccaacgtcaccatcttcagaccctcaaccttcttcatcatcgcccagaccagcctgggcctgcagctgaacctgcagctggtgcccaccatgcagctgttcatgcagctggcgcccaagctccgtgggcagacctgcggtctctgtgggaacttcaacagcatccaggccgatgacttccggaccctcagtggggtggtggaggccaccgctgcggccttcttcaacaccttcaagacccaggccgcctgccccaacatcaggaacagcttcgaggacccctgctctctgagcgtggagaatg

SEQ ID NO: 115656 - DNA, 1863 bp, Artificial Sequence
  derived and/or modified sequence
atgagcgtgggccggcggaagctggccctgctgtgggccctggccctcgcgcttgcttgcacacgacatacagggcacgcccaggacggttcatccgaatctagctacaagcatcatcccgcactatctcccattgcccgcggcccctccggcgtgccactcagaggggcaactgttttcccttctctcaggaccattcccgtggtgcgggcttccaatcccgctcacaatggacgtgtctgttccacctgggggtcctttcactataaaacgtttgatggcgatgtgttcagatttcctggactctgcaactatgtcttttcagagcattgtggcgcggcatatgaggactttaaccccgctactccacaacctggcgtcagcggacctcatgcggagcagggtcctcacgagggagggtggagaggacatccagccgaccaggggctgcgtcctggtcagagaccgccaggcccggcagccctgcagcccgtctggggtccccatagtcgggcggcggccacccccagatggagacccgggtgggccctcagcagttgcggcaccacaatgactgcctgctgttggctcgatacaaagtacgctaataaattgtgggccctgtggggactacagagggacgctcggggacagcgcgcacctctgccccagcatcaggctgacacgcatggcattcgcgagcctgcaagatggacgactcctagatcatccgtgcggaccctctcacttaaccctaggggcaccgcccccctggctctgggtatttgcgaggagctcctccacggccaactattttcaggctgcgtcgcgctggtggatgtgggcagctatctggaggcttgcaggcaagatttatgcttctgcgaggatactgacctactgtcgtgtgtgtgtcacactttggccgagtatagcaggcagtgcacacacgccgggggattgcctcaggactggagaggccccgatttttgcccccaaaaatgccctaacaatatgcaataccacgagtgcagaagcccatgcgctgacacctgttccaaccaggagcattctcgagcctgtgaggaccactgcgtcgctggatgcttctgcccagagggtactgtcctggatgacatcggtcagactggctgcgtacccgtctctaagtgcgcctgcgtctataacggcgctgcttatgcccccggcgccacatactccaccgactgcaccaactgcacctgctctgggggtcgatggagctgccaagaagtaccctgccctggaacctgctctgttctgggcggagcgcatttttccacatttgacggtaagcaatacaccgtgcacggcgattgttcctacgtcctgaccaaaccctgcgacagtagtgctttcaccgttctggcagaactgagaagatgtgggttaactgattccgagacctgtctgaaaagcgtgaccctcagcttggatggcgtgcaaaccgtggtggtaattaaagcgtccggagaggtctttttgaaccagatatatacacagctgcctattagtgccgcaaatgtgacgatctttaggccgtcaacattcttcattatcgcccagaccagtcttgggctacagctaaatctacagctcgtgcccaccatgcagctctttatgcagctcgctccaaagctgcggggccagacctgcggtctgtgcggaaattttaattccatacaggctgatgatttccgcaccttgtcaggcgtagtcgaggcaactgctgccgctttcttcaatacattcaagacacaagcggcctgtccaaacattagaaatagcttcgaggatccctgtagtctgagcgtggagaattag

SEQ ID NO: 115657 - DNA, 1872 bp, Artificial Sequence
  derived and/or modified sequence
atgagcgtgggccggcggaagctggccctgctgtgggccctggccttagccttggcctgcacaagacataccggccacgcccaggacgggtccagcgagagtagctataaacatcatcccgctttatccccgattgcccgcggccccagtggggtgcccttacgtggagctacggttttccccagccttcgaactattcccgtggttagagcatccaatcccgcccataacggacgcgtgtgtagcacatgggggagctttcactacaaaaccttcgatggagacgtgttccgctttcccggcttatgcaattacgtttttagcgagcattgcggcgctgcctatgaagactttaatatccagctgagacgttcccaggaatccgcagccccaactctcagccgggtactcatgaaggtggacggcgtcgtaatacagctgactaaaggctccgtgcttgttaacgggcatcccgtcctgctgcctttctcacagtccggggtcctgattcagcagtcttcatcctacacgaaagttgaggcacgcctgggtctagttctgatgtggaatcacgacgacagcctgctgctggaattggacactaaatacgctaataagacatgcggactgtgtggtgacttcaacgggatgcccgtcgtgagcgaactgttgtcacataacacaaaactcacccctatggaattcgggaatctgcagaaaatggacgatccaaccgaacagtgccaagatccagtgccggaaccgcccaggaattgttcgactggctttggaatctgcgaagaactcctccatggccagctgttcagtggttgcgttgctcttgtggacgtggggtcgtatctggaggcctgtcggcaggacctctgtttctgcgaagacactgatttgctgtcgtgcgtctgccatacactggccgaatatagtaggcagtgcacccatgctgggggtctccctcaggattggcggggccctgacttttgtcctcagaagtgcccaaataacatgcagtatcacgaatgtcgttcaccatgcgccgatacatgcagtaaccaggagcatagccgcgcatgtgaggatcactgtgtggccggatgcttctgcccggagggaacggtcctggatgatatcggccagacaggatgcgtgcccgtgtcgaagtgcgcatgcgtgtataacggggctgcctacgcaccaggggccacttatagcaccgattgcacaaactgtacttgcagtgggggaagatggagctgccaggaagtcccttgtcctggtacctgtagtgtgctcgggggagcacacttttctaccttcgacggcaagcagtacacggttcacggtgattgctcttacgtgcttacgaagccatgcgactcgtctgcatttacagtccttgcagagctgcgacgatgcggcctgaccgattctgaaacctgcctcaagtccgtcacgctgtccttggatggggtccagactgtggtcgttatcaaagcatcgggcgaggtgtttttaaaccaaatttatacacagctacctattagtgccgctaatgtgaccatcttccgccccagtacttttttcatcatagcccagaccagtctgggtttgcagttgaacctccaactggtgcccacaatgcagctgtttatgcagctggcccctaaattacgcggtcagacctgcgggctttgcggtaatttcaacagcatccaggcagatgattttcgcacgctgagcggagtcgtggaggccaccgcggctgctttctttaatacgttcaagacccaagcagcatgtcccaacatcagaaactcttttgaggatccttgttctctctcagtggaaaattag

SEQ ID NO: 115658 - DNA, 1863 bp, Artificial Sequence
  derived and/or modified sequence
atgagtgtgggaagacggaaacttgccttgctgtgggccctcgccctggcgctagcttgcacacgccacaccgggcatgcgcaggatggtagctccgagagcagttacaaacatcatcccgctttgagccctatagccagaggcccatcaggggtgccactccggggtgccaccgtttttccaagccttaggaccattcctgtggtcagagcatcaaatccggcacataacggccgagtgtgctccacctggggttcattccactacaagaccttcgatggtgacgtgttccgattccccggtttgtgtaattatgttttttccgagcattgtggggcagcctacgaagactttaaccccgctactcctcagccaggcgtaagcgggccacacgccgagcagggccctcatgaaggtggctggcgcggacatccagcagaccagggacttaggcccggacaaaggcctcccggacccgctgccctgcagcctgtttgggggccacattctagggcagctgccaccccccgatggaggcccggatgggcgcttagtagctgtggtaccacgatgaccgcatgctgctggctggacacaaaatatgcaaacaaactctgggctttatggggccttcaacgggatgcacgcggacaaagggccccactgcctcagcatcaggccgacacacacggtatacgggagccggcacggtggaccaccccaaggtcctctgttcggacgttgtccctcaatccacggggaaccgccccactggcgttagggatttgcgaagaactgcttcacggacagctgttctcaggttgcgtggcgttggtcgatgttggcagctacttagaggcttgcagacaggatctttgtttctgtgaggataccgacctattatcctgcgtttgccatactcttgcggagtacagtagacaatgcacccatgcaggtggactaccccaggattggcgcggtccggacttctgccctcagaaatgtcccaataatatgcagtaccatgaatgcagatctccctgcgcagacacatgtagcaatcaggagcactcgagggcttgcgaagaccactgcgtggccggttgtttctgccccgagggcaccgtcctggacgacatcggacagacaggctgtgtgcctgtgagcaagtgcgcctgcgtgtataatggggctgcttacgcaccaggtgcaacttactcgactgattgtacaaactgcacatgtagcgggggacgctggagttgccaggaggtgccctgccccggaacctgcagcgtgctgggcggagcacacttctccaccttcgatggcaagcagtacacggtacacggagattgctcctacgtcctgactaaaccttgtgactcatccgcgtttacagttttagctgagctccggagatgcggattgactgattctgagacctgcctcaaatctgtcacactctcactagacggggttcaaaccgtcgttgtgatcaaggcatcgggtgaggtgtttctgaaccaaatatatactcaattgcccatctccgcagctaatgtgacaatcttcagaccctccactttcttcattattgctcagacctcactgggactgcagcttaacctacaactcgtacctacgatgcaattatttatgcagctcgcacctaagctgaggggtcaaacatgcggcctgtgtggcaattttaactcaatccaggcagacgactttaggactctgtctggtgttgtggaagccaccgctgccgcttttttcaataccttcaagacacaggccgcttgtcccaacatccgcaatagctttgaggatccctgctctttgtcagtggagaattag

SEQ ID NO: 115659 - DNA, 1872 bp, Artificial Sequence
  derived and/or modified sequence
atgagtgtgggtcgccgaaagctggccctgctgtgggctcttgccctcgctctggcttgtacgcgccacaccggacatgcccaggatggttcttcggaatcttcctacaagcaccaccccgctctgtccccaattgcccgaggcccatcgggggtcccattgcggggtgccaccgtttttccgtcccttcggactatcccagtggtgcgtgcctcaaatccagcccataatgggcgtgtctgctctacatggggctcctttcactacaaaacatttgatggcgacgtcttcagatttcctggcctatgcaactacgtgtttagcgagcactgtggcgctgcgtacgaggatttcaatattcagttacggcgatctcaggagagcgctgcacccactctctcccgggtgttgatgaaggtagacggcgtggtgatccagctgaccaaaggtagtgttctggtcaatgggcaccccgttctcctacctttttcgcagagtggggtccttattcaacagtcatcaagttacacaaaagtcgaggcccgtctgggactggtgctgatgtggaatcacgacgactcactgctgctcgaattggacacaaagtacgcaaacaagacttgtggtctgtgcggcgatttcaacgggatgcctgtggtgtccgaacttctctctcacaacacaaagcttacaccaatggagttcggtaatctgcagaagatggacgaccctactgaacagtgccaagatccagtgcctgaacctccacggaattgcagcacgggctttgggatatgtgaagaactccttcacggacagctgttttcaggatgtgtagccctggttgatgtcggcagctatctcgaggcttgtaggcaggatctgtgtttctgtgaggacactgacctgctgtcctgcgtgtgtcacacgttggctgagtattcccgacagtgcacccatgcaggcggtttacctcaagactggcgaggtcctgacttttgccctcaaaagtgtcccaacaacatgcaatatcatgagtgtagatctccatgcgccgacacttgcagcaaccaggaacattccagagcttgcgaggaccactgtgtggccggatgcttttgtccggaaggtaccgtgcttgacgatatcggccagaccgggtgcgtgcccgtttctaagtgtgcctgtgtatataatggagccgcatacgcccctggagccacgtacagcaccgactgcactaattgtacatgcagcggcggtcgctggtcgtgtcaggaggtaccgtgtcccggtacctgctctgtcctcggtggcgctcacttcagcaccttcgacggcaagcagtacactgtccacggggattgttcttacgtgctgacaaaaccatgcgatagctccgccttcactgtactggcagagctgaggagatgtgggctgacagactcagaaacatgtctgaagtccgtgactttgtctcttgatggggtgcaaaccgtggttgtgatcaaagccagcggtgaagtctttttaaatcagatatatacacagctgccaatctctgcggcaaatgtcacgatatttcggcctagtacattttttattatcgcacaaacaagtcttggattgcagctcaatctgcagctagtccccactatgcagctctttatgcagttggcaccaaaactccgcggacaaacatgcggtttatgcgggaactttaattctattcaggctgatgatttccggactcttagcggggtggtggaggccactgcagccgcattctttaatacctttaaaacacaggctgcatgcccaaacatccgaaactctttcgaggatccttgtagcctgtctgtggagaactag

SEQ ID NO: 115660 - DNA, 1863 bp, Artificial Sequence
  derived and/or modified sequence
atgagcgtgggcagaagaaagctggccctgctgtgggccctggccctggccctggcctgcaccagacacaccggccacgcccaggacggcagcagcgagagcagctacaagcaccaccccgccctgagccccatcgccagaggccccagcggcgtgcccctgagaggcgccaccgtgttccccagcctgagaaccatccccgtggtgagagccagcaaccccgcccacaacggcagagtgtgcagcacctggggcagcttccactacaagaccttcgacggcgacgtgttcagattccccggcctgtgcaactacgtgttcagcgagcactgcggcgccgcctacgaggacttcaaccccgccaccccccagcccggcgtgagcggcccccacgccgagcagggcccccacgagggcggctggagaggccaccccgccgaccagggcctgagacccggccagagaccccccggccccgccgccctgcagcccgtgtggggcccccacagcagagccgccgccacccccagatggagacccggctgggccctgagcagctgcggcaccaccatgaccgcctgctgctggctggacaccaagtacgccaacaagctgtgggccctgtggggcctgcagagagacgccagaggccagagagcccccctgccccagcaccaggccgacacccacggcatcagagagcccgccagatggaccacccccagaagcagcgtgagaaccctgagcctgaaccccagaggcaccgcccccctggccctgggcatctgcgaggagctgctgcacggccagctgttcagcggctgcgtggccctggtggacgtgggcagctacctggaggcctgcagacaggacctgtgcttctgcgaggacaccgacctgctgagctgcgtgtgccacaccctggccgagtacagcagacagtgcacccacgccggcggcctgccccaggactggagaggccccgacttctgcccccagaagtgccccaacaacatgcagtaccacgagtgcagaagcccctgcgccgacacctgcagcaaccaggagcacagcagagcctgcgaggaccactgcgtggccggctgcttctgccccgagggcaccgtgctggacgacatcggccagaccggctgcgtgcccgtgagcaagtgcgcctgcgtgtacaacggcgccgcctacgcccccggcgccacctacagcaccgactgcaccaactgcacctgcagcggcggcagatggagctgccaggaggtgccctgccccggcacctgcagcgtgctgggcggcgcccacttcagcaccttcgacggcaagcagtacaccgtgcacggcgactgcagctacgtgctgaccaagccctgcgacagcagcgccttcaccgtgctggccgagctgagaagatgcggcctgaccgacagcgagacctgcctgaagagcgtgaccctgagcctggacggcgtgcagaccgtggtggtgatcaaggccagcggcgaggtgttcctgaaccagatctacacccagctgcccatcagcgccgccaacgtgaccatcttcagacccagcaccttcttcatcatcgcccagaccagcctgggcctgcagctgaacctgcagctggtgcccaccatgcagctgttcatgcagctggcccccaagctgagaggccagacctgcggcctgtgcggcaacttcaacagcatccaggccgacgacttcagaaccctgagcggcgtggtggaggccaccgccgccgccttcttcaacaccttcaagacccaggccgcctgccccaacatcagaaacagcttcgaggacccctgcagcctgagcgtggagaactag

SEQ ID NO: 115661 - DNA, 1872 bp, Artificial Sequence
  derived and/or modified sequence
atgagcgtgggcagaagaaagctggccctgctgtgggccctggccctggccctggcctgcaccagacacaccggccacgcccaggacggcagcagcgagagcagctacaagcaccaccccgccctgagccccatcgccagaggccccagcggcgtgcccctgagaggcgccaccgtgttccccagcctgagaaccatccccgtggtgagagccagcaaccccgcccacaacggcagagtgtgcagcacctggggcagcttccactacaagaccttcgacggcgacgtgttcagattccccggcctgtgcaactacgtgttcagcgagcactgcggcgccgcctacgaggacttcaacatccagctgagaagaagccaggagagcgccgcccccaccctgagcagagtgctgatgaaggtggacggcgtggtgatccagctgaccaagggcagcgtgctggtgaacggccaccccgtgctgctgcccttcagccagagcggcgtgctgatccagcagagcagcagctacaccaaggtggaggccagactgggcctggtgctgatgtggaaccacgacgacagcctgctgctggagctggacaccaagtacgccaacaagacctgcggcctgtgcggcgacttcaacggcatgcccgtggtgagcgagctgctgagccacaacaccaagctgacccccatggagttcggcaacctgcagaagatggacgaccccaccgagcagtgccaggaccccgtgcccgagccccccagaaactgcagcaccggcttcggcatctgcgaggagctgctgcacggccagctgttcagcggctgcgtggccctggtggacgtgggcagctacctggaggcctgcagacaggacctgtgcttctgcgaggacaccgacctgctgagctgcgtgtgccacaccctggccgagtacagcagacagtgcacccacgccggcggcctgccccaggactggagaggccccgacttctgcccccagaagtgccccaacaacatgcagtaccacgagtgcagaagcccctgcgccgacacctgcagcaaccaggagcacagcagagcctgcgaggaccactgcgtggccggctgcttctgccccgagggcaccgtgctggacgacatcggccagaccggctgcgtgcccgtgagcaagtgcgcctgcgtgtacaacggcgccgcctacgcccccggcgccacctacagcaccgactgcaccaactgcacctgcagcggcggcagatggagctgccaggaggtgccctgccccggcacctgcagcgtgctgggcggcgcccacttcagcaccttcgacggcaagcagtacaccgtgcacggcgactgcagctacgtgctgaccaagccctgcgacagcagcgccttcaccgtgctggccgagctgagaagatgcggcctgaccgacagcgagacctgcctgaagagcgtgaccctgagcctggacggcgtgcagaccgtggtggtgatcaaggccagcggcgaggtgttcctgaaccagatctacacccagctgcccatcagcgccgccaacgtgaccatcttcagacccagcaccttcttcatcatcgcccagaccagcctgggcctgcagctgaacctgcagctggtgcccaccatgcagctgttcatgcagctggcccccaagctgagaggccagacctgcggcctgtgcggcaacttcaacagcatccaggccgacgacttcagaaccctgagcggcgtggtggaggccaccgccgccgccttcttcaacaccttcaagacccaggccgcctgccccaacatcagaaacagcttcgaggacccctgcagcctgagcgtggagaactag

SEQ ID NO: 115662 - protein, 269 aa, Artificial Sequence
  derived and/or modified sequence
MTLNLSNNSLSNLAPGAFHGLQHLQVLNLTQNSLLSLESRLFHSLPQLRELDLSSNNISHLPTSLGETWENLTILAVQQNQLQQLDRALLESMPSVRLLLLKDNLWKCNCHLLGLKLWLEKFVYKGGLTDGIICESPDTWKGKDLLRIPHELYQPCPLPAPDPVSSQAQWPGSAHGVVLRPPENHNAGERELLECELKPKPRPANLRHAIATVIITGVVCGIVCLMMLAAAIYGCTYAAITAQYHGGPLAQTNDPGKVEEKERFDSSPA

SEQ ID NO: 115663 - DNA, 810 bp, Artificial Sequence
  derived and/or modified sequence
atgaccctgaacctgagcaacaacagcctgagcaacctggcccccggcgccttccacggcctgcagcacctgcaggtgctgaacctgacccagaacagcctgctgagcctggagagcagactgttccacagcctgccccagctgagagagctggacctgagcagcaacaacatcagccacctgcccaccagcctgggcgagacctgggagaacctgaccatcctggccgtgcagcagaaccagctgcagcagctggacagagccctgctggagagcatgcccagcgtgagactgctgctgctgaaggacaacctgtggaagtgcaactgccacctgctgggcctgaagctgtggctggagaagttcgtgtacaagggcggcctgaccgacggcatcatctgcgagagccccgacacctggaagggcaaggacctgctgagaatcccccacgagctgtaccagccctgccccctgcccgcccccgaccccgtgagcagccaggcccagtggcccggcagcgcccacggcgtggtgctgagaccccccgagaaccacaacgccggcgagagagagctgctggagtgcgagctgaagcccaagcccagacccgccaacctgagacacgccatcgccaccgtgatcatcaccggcgtggtgtgcggcatcgtgtgcctgatgatgctggccgccgccatctacggctgcacctacgccgccatcaccgcccagtaccacggcggccccctggcccagaccaacgaccccggcaaggtggaggagaaggagagattcgacagcagccccgcctag

SEQ ID NO: 115664 - DNA, 810 bp, Artificial Sequence
  derived and/or modified sequence
atgacactgaacttatctaataatagcctaagcaatctagcacctggagcatttcacggactccagcaccttcaggttctcaacctcacgcaaaacagcctgctgtctctagagtctcgacttttccactctctcccccagctgagagaactggacctgagcagtaataacatttctcacttgcctacctctttgggggaaacctgggagaacttgaccatcctggcagtccagcaaaatcagttgcagcaattagatcgagcactgcttgaatcaatgccatccgtcagattgctgctgcttaaggataacctgtggaagtgcaactgccacttactcggcctcaagctgtggctggagaagttcgtgtataaaggcggcttaacagacggtatcatttgtgagtccccagatacatggaagggaaaggacctgttgcgcatccctcacgagctctaccagccttgcccgttgcctgcccctgaccccgttagcagtcaggcccagtggcccgggtccgcccacggggtcgtgttgcgtcctcccgagaatcataatgccggagagcgggaattgctcgaatgcgaattgaagcccaagccgcgccctgccaatttaagacacgccattgccaccgtgatcatcaccggtgtcgtgtgtggcatagtgtgcttaatgatgcttgccgcggctatctacggttgcacatacgctgccatcaccgcacagtatcacggaggaccactggcacagactaatgacccaggcaaggtagaggaaaaagagagatttgatagttctcccgcctag

SEQ ID NO: 115665 - DNA, 810 bp, Artificial Sequence
  derived and/or modified sequence
atgaccctgaacctgagcaacaacagcctgagcaacctggcccctggggccttccacggcctgcagcacctgcaggtgctgaacctgacccagaacagcctgctgagcctggagagccgcctcttccacagcctgccccagctgcgggagctggacctgagcagcaacaacatcagccacctgcccaccagcctgggggagacctgggagaacctgaccatcctggccgtgcagcagaaccagctgcagcagctggaccgggccctgctggagagcatgcccagcgtgcggctgctgctgctgaaggacaacctgtggaagtgcaactgccacctgctgggcctgaagctgtggctggagaagtttgtgtacaagggcggcctgacagatggcatcatctgtgagagcccagacacctggaagggcaaggacctgctgcgcatcccccatgagctgtaccagccctgccccctgcctgccccagaccctgtgagcagccaggcccagtggccaggcagcgcccatggagtggtgctgcggcccccagagaaccacaatgctggggagcgggagctgctggagtgtgagctgaagcccaagcccaggcctgccaacctgcggcatgccatcgccaccgtcatcatcaccggggtggtgtgtggcatcgtgtgcctgatgatgctggccgccgccatctacggctgcacctacgccgccatcacagcccagtaccatggaggccccctggcccagaccaatgaccccgggaaggtggaggagaaggagagatttgacagcagccctgcctag

SEQ ID NO: 115666 - DNA, 810 bp, Artificial Sequence
  derived and/or modified sequence
atgaccctgaacctgagcaacaacagcctgagcaacctggcccccggcgcttttcatggcctgcagcacctgcaggtcctgaacttgacacaaaacagcctactgtcccttgagtcacgcctttttcattccttgccacagcttagggagctcgatctttcatcaaacaacataagtcatctgcctaccagtttaggcgagacctgggaaaacctcacaattctggccgtacaacaaaaccagctgcagcagctggaccgagccctccttgaatccatgccttctgtgcgactgctgctgcttaaagataatctgtggaagtgtaattgccaccttcttgggctgaagctctggctggagaagtttgtatataaaggcggattgaccgacgggattatctgcgagtcaccggacacatggaaggggaaggacctgctgcggatcccgcacgaactctatcagccttgcccactccccgctccggaccctgtctcatcccaggctcagtggccaggctcggcccacggagtcgtgctgaggcctcccgaaaatcacaatgccggggaaagagaattactggagtgcgaactgaaaccaaagccccgacctgccaacctccgacacgccattgccactgtcattataacaggcgttgtgtgcgggatagtatgcctcatgatgttggcagccgctatatacgggtgcacctacgctgctattacggcccagtatcatggtggaccactcgcacagacgaatgacccaggcaaagtggaagagaaggagcggtttgatagctccccggcttag

SEQ ID NO: 115667 - DNA, 810 bp, Artificial Sequence
  derived and/or modified sequence
atgaccttgaatctgtcaaacaactcattatccaaccttgcacccggtgcctttcatgggctgcagcacctccaagtactgaacctcactcaaaattccctcctcagcctggagtcccgcctgtttcattcattgccccagctgcgagagcttgacctcagttctaacaatatttcacacctcccaacctcattgggcgaaacctgggaaaatctaaccatcctagcagtgcagcaaaaccagcttcagcagcttgaccgggcacttctggagagtatgccaagtgttagactcctcttgcttaaggataatctgtggaaatgcaactgtcatctcctcgggttaaaactgtggctcgagaagtttgtctataagggaggcttgacggatggaatcatatgtgaatcccccgatacctggaaggggaaggatctgctgcgtattccccatgaactgtatcagccgtgcccattgcctgcacccgaccccgtttctagtcaggcccagtggcctggctcggcacacggtgttgtactgaggccccctgaaaaccataacgccggtgaacgcgagttgctcgagtgcgagctcaagcctaaacccagacccgctaatctgagacatgctatagcgactgtcatcatcaccggcgtggtgtgtggaatcgtgtgtttgatgatgctcgcagcagcaatctacgggtgtacttatgccgcaataactgcacagtaccatggtggccctctggcacaaactaatgatccgggaaaggttgaggagaaagaacgattcgactcttcgcccgcttag

SEQ ID NO: 115668 - protein, 560 aa, Artificial Sequence
  derived and/or modified sequence
MSEHSRNSDQEELLDEEINEDEILANLSAEELKELQSEMEVMAPDPSLPVGMIQKDQTDKPPTGNFNHKSLVDYMYWEKASRRMLEEERVPVTFVKSEEKTQEEHEEIEKRNKNMAQYLKEKLNNEIVANKRESKGSSNIQETDEEDEEEEDDDDDDEGEDDGEESEETNREEEGKAKEQIRNCENNCQQVTDKAFKEQRDRPEAQEQSEKKISKLDPKKLALDTSFLKVSTRPSGNQTDLDGSLRRVRKNDPDMKELNLNNIENIPKEMLLDFVNAMKKNKHIKTFSLANVGADENVAFALANMLRENRSITTLNIESNFITGKGIVAIMRCLQFNETLTELRFHNQRHMLGHHAEMEIARLLKANNTLLKMGYHFELPGPRMVVTNLLTRNQDKQRQKRQEEQKQQQLKEQKKLIAMLENGLGLPPGMWELLGGPKPDSRMQEFFQPPPPRPPNPQNVPFSQRSEMMKKPSQAPKYRTDPDSFRVVKLKRIQRKSRMPEAREPPEKTNLKDVIKTLKPVPRNRPPPLVEITPRDQLLNDIRHSSVAYLKPVQLPKELA

SEQ ID NO: 115669 - DNA, 1683 bp, Artificial Sequence
  derived and/or modified sequence
atgagcgagcacagcagaaacagcgaccaggaggagctgctggacgaggagatcaacgaggacgagatcctggccaacctgagcgccgaggagctgaaggagctgcagagcgagatggaggtgatggcccccgaccccagcctgcccgtgggcatgatccagaaggaccagaccgacaagccccccaccggcaacttcaaccacaagagcctggtggactacatgtactgggagaaggccagcagaagaatgctggaggaggagagagtgcccgtgaccttcgtgaagagcgaggagaagacccaggaggagcacgaggagatcgagaagagaaacaagaacatggcccagtacctgaaggagaagctgaacaacgagatcgtggccaacaagagagagagcaagggcagcagcaacatccaggagaccgacgaggaggacgaggaggaggaggacgacgacgacgacgacgagggcgaggacgacggcgaggagagcgaggagaccaacagagaggaggagggcaaggccaaggagcagatcagaaactgcgagaacaactgccagcaggtgaccgacaaggccttcaaggagcagagagacagacccgaggcccaggagcagagcgagaagaagatcagcaagctggaccccaagaagctggccctggacaccagcttcctgaaggtgagcaccagacccagcggcaaccagaccgacctggacggcagcctgagaagagtgagaaagaacgaccccgacatgaaggagctgaacctgaacaacatcgagaacatccccaaggagatgctgctggacttcgtgaacgccatgaagaagaacaagcacatcaagaccttcagcctggccaacgtgggcgccgacgagaacgtggccttcgccctggccaacatgctgagagagaacagaagcatcaccaccctgaacatcgagagcaacttcatcaccggcaagggcatcgtggccatcatgagatgcctgcagttcaacgagaccctgaccgagctgagattccacaaccagagacacatgctgggccaccacgccgagatggagatcgccagactgctgaaggccaacaacaccctgctgaagatgggctaccacttcgagctgcccggccccagaatggtggtgaccaacctgctgaccagaaaccaggacaagcagagacagaagagacaggaggagcagaagcagcagcagctgaaggagcagaagaagctgatcgccatgctggagaacggcctgggcctgccccccggcatgtgggagctgctgggcggccccaagcccgacagcagaatgcaggagttcttccagccccccccccccagaccccccaacccccagaacgtgcccttcagccagagaagcgagatgatgaagaagcccagccaggcccccaagtacagaaccgaccccgacagcttcagagtggtgaagctgaagagaatccagagaaagagcagaatgcccgaggccagagagccccccgagaagaccaacctgaaggacgtgatcaagaccctgaagcccgtgcccagaaacagacccccccccctggtggagatcacccccagagaccagctgctgaacgacatcagacacagcagcgtggcctacctgaagcccgtgcagctgcccaaggagctggcctag

SEQ ID NO: 115670 - DNA, 1683 bp, Artificial Sequence
  derived and/or modified sequence
atgagcgagcactccaggaatagtgaccaggaagagctgcttgacgaagagataaatgaagacgagatcctggccaatctgagtgctgaggagctaaaggagcttcagtcagagatggaagtgatggcccccgatccctctctgccagtgggtatgatccagaaggaccagactgataaacctccgaccggcaactttaaccacaagtcactcgttgactatatgtactgggaaaaggcctcccgtagaatgttggaggaagagcgggttcctgtaaccttcgtgaaaagtgaggagaaaacccaggaggaacatgaggaaatagaaaaaaggaacaaaaacatggctcaataccttaaggaaaaattgaataatgaaatagtcgcaaacaaaagagagtcaaagggctccagtaacatccaagaaacagatgaggaagacgaggaggaagaggatgatgacgacgatgatgaaggggaggatgacggggaagaaagcgaagaaaccaatcgtgaggaggaaggcaaggctaaggaacagatcaggaactgcgaaaataactgccagcaagtgacagacaaggcatttaaagagcagagggaccgcccagaagcccaggagcaaagcgaaaaaaagatctccaaacttgacccaaagaaacttgcacttgatacctcatttctgaaggttagtacccgccccagcggtaaccagaccgacctcgatggctccctgcgcagagtcagaaagaacgatccagacatgaaagagctgaaccttaataatatcgagaatattcctaaggagatgctgctcgactttgtgaacgccatgaagaaaaataagcacattaaaaccttttctttggcaaatgtgggagcagatgagaacgtcgcctttgcacttgccaatatgctacgagaaaaccggagtattacaacgctgaatatcgagagcaattttatcaccggcaagggtattgtagccatcatgcgctgtttgcagttcaatgaaacactgaccgagttacgtttccataatcagcggcatatgcttggccaccacgcggagatggagatcgccaggctgctgaaagcgaacaatacacttcttaagatgggataccactttgaacttcccggcccaagaatggtggtgaccaatctgctgacccggaaccaagataaacagaggcagaagaggcaggaggaacagaagcagcagcagctgaaagaacagaagaaactcatcgctatgttagagaacggcctgggcttgccacccgggatgtgggagctactcggtgggccgaagcctgatagcaggatgcaggagttcttccaaccaccaccacccaggccgccaaatccccagaacgtcccattcagccagaggagcgagatgatgaaaaagcccagtcaggcccctaaatatcgcacggaccctgactccttcagggtcgtaaaattgaaaaggattcagcgcaagtcaagaatgccagaagctcgcgaaccacccgagaaaaccaatcttaaggacgttattaaaaccctgaagcccgtcccccggaatcgtcccccgccccttgtggagattacccctcgggaccaacttctgaatgacatccgacattcctccgtagcatacctgaagcctgtccagcttccaaaggagctggcctag

SEQ ID NO: 115671 - DNA, 1683 bp, Artificial Sequence
  derived and/or modified sequence
atgagcgagcacagccggaactccgaccaagaagagctcttggacgaagagattaatgaggatgaaatacttgctaatctgtcagctgaagaactcaaagaacttcagtctgaaatggaggtgatggcccccgatccctctctccccgttggcatgattcagaaggatcagacggataaaccgcccacaggaaacttcaatcacaaaagcctggtggattacatgtattgggaaaaggccagccgcagaatgttggaagaagaaagggttccagtaaccttcgtaaaatcagaggagaagacccaggaagagcatgaggagatagagaagaggaacaagaatatggcccaatacctgaaggagaaactgaataatgaaatcgtcgctaacaagcgggagagcaaagggtcaagcaacatccaggagaccgatgaagaagatgaggaagaggaggatgatgacgatgacgacgagggcgaggacgacggagaggaatcagaggagactaatcgcgaggaggagggcaaggcaaaggagcagattaggaactgcgaaaacaactgccagcaagtgacagacaaggcctttaaggagcagcgagacagacctgaggctcaagagcaatctgagaaaaagattagtaaactggaccctaagaagctggcgctggatacatccttcttaaaagttagcactaggccgagtgggaaccagaccgaccttgatggtagcctgaggagagtgcgaaaaaacgatcccgacatgaaagagctgaacttgaacaatatcgaaaacattccgaaggagatgttgcttgatttcgttaatgccatgaaaaaaaacaaacacatcaagaccttctccctcgcgaatgtgggggccgacgaaaatgtggcttttgcactggccaacatgctcagagagaataggtctatcactactcttaacattgagtctaatttcattaccgggaaggggatcgtggctatcatgcggtgtctgcagtttaacgaaaccttaaccgaactccgattccacaaccaacggcatatgttgggtcaccacgccgaaatggaaattgcacgcttgttgaaagccaacaatacactgctaaagatgggctaccacttcgaactacctggaccgcggatggttgtgacaaatttactcactaggaaccaggacaaacagaggcagaagcggcaagaggagcagaaacagcaacagctcaaagagcagaaaaagctcatagcaatgctggagaatggcctgggtttgcctccaggtatgtgggaactcctgggcggaccaaagcctgatagtcggatgcaagaattttttcagccccctccccctaggcctccgaacccacagaacgtaccttttagccaacgttctgaaatgatgaagaagccttcccaggctcctaaatatcgcaccgaccccgatagctttagagtagtcaaattaaagaggatacagcgaaaatctaggatgcctgaagcgcgtgaacccccagaaaagaccaatctgaaagacgtaatcaaaaccttgaagccggtgccacgaaaccggcccccccctctggtcgaaataactcctagagaccagctcctaaacgatatcaggcattcgagcgtggcctatctgaaacccgtgcagctcccaaaagagctcgcgtag

SEQ ID NO: 115672 - DNA, 1683 bp, Artificial Sequence
  derived and/or modified sequence
atgtccgaacatagccggaattccgaccaggaagaactgcttgacgaagagatcaacgaagacgaaatcctggcaaatctatccgcggaggagctgaaggagcttcagtctgaaatggaagttatggctccggacccatccctcccggtgggcatgattcagaaagaccaaacagacaagcctccaacaggaaacttcaatcacaaatcactagtggactatatgtattgggagaaggcctctcgcaggatgttggaggaggagcgggttcctgtgacctttgtgaagagcgaggaaaaaacccaagaggagcacgaggaaatcgagaaaagaaataaaaatatggcccagtaccttaaagagaaattaaataatgaaatcgtggccaacaagcgagagtctaagggcagctccaatatccaggagactgacgaggaagatgaggaggaggaggacgatgatgacgatgatgagggagaggacgacggtgaggagagcgaggagactaaccgagaagaagaagggaaggccaaggagcagattcgcaactgtgaaaataactgtcaacaagttacagacaaagcattcaaggaacaacgggacagaccggaagcacaagagcagtcggagaaaaaaatcagcaaattggaccccaagaagcttgccctagacacatctttccttaaggtgtccacccgaccttctggcaaccagacagacttggacggctcattgagaagagtgcgaaagaacgacccggacatgaaagagctaaacctgaacaatattgagaacattccgaaggaaatgctcttagactttgtaaatgccatgaagaaaaacaaacatataaaaacattttctctggccaacgtgggggcagatgaaaacgtagcctttgctcttgccaacatgctacgggagaaccggtcaatcacaacgttgaacatagagtcaaatttcattacagggaaaggaatcgtagctataatgcgctgcttgcagttcaacgaaacgttgacagaactcagatttcataaccaaagacatatgctgggtcaccatgcagagatggaaatcgcacgcttgctgaaagcgaacaataccctgctcaagatggggtaccatttcgagctgccaggaccccggatggttgtgactaacttgctcactcgaaaccaggataaacagaggcagaaaaggcaggaggagcagaagcagcagcagctgaaggaacagaagaaactgatcgcgatgctcgagaacgggcttggcctaccacctggtatgtgggaactgctgggtgggcccaagccagactctaggatgcaagagttttttcagccaccaccacctaggcctcccaatccacagaatgtgcccttctctcaaagatcagaaatgatgaaaaagccctcccaggctccgaagtatagaaccgatcccgacagcttccgagtcgtgaagttaaagaggattcagcgcaaaagccgaatgcccgaggccagagagccccctgaaaagactaacctgaaggatgtcatcaaaacacttaagccagtgcccaggaaccggccccctcccttagtcgagatcactccacgggaccaactgcttaatgatatccggcactctagtgtagcctacctgaagccagtacagctaccaaaagagctcgcctag

SEQ ID NO: 115673 - DNA, 1683 bp, Artificial Sequence
  derived and/or modified sequence
atgtctgagcacagcaggaacagcgaccaggaggagctgctggatgaggagatcaatgaagatgagatcctggccaacctgtctgctgaggagctgaaggagctgcagagcgagatggaggtgatggccccagaccccagcctgcctgtgggcatgatccagaaggaccagacagacaagcccccaactggaaacttcaaccacaagagcctggtggactacatgtactgggagaaggccagcaggaggatgctggaggaggagcgggtgcctgtgacctttgtgaagtctgaggagaagacccaggaggagcacgaggagattgagaagaggaacaagaacatggcccagtacctgaaggagaagctgaacaatgaaattgtggccaacaagcgggagagcaagggcagcagcaacatccaggagacagatgaggaggatgaggaggaggaggatgatgatgatgatgatgaaggagaagatgatggagaggagagcgaggagaccaaccgggaggaggagggcaaggccaaggagcagatccggaactgtgagaacaactgccagcaggtgacagacaaggccttcaaggagcagagggacaggcctgaggcccaggagcagagcgagaagaagatcagcaagctggaccccaagaagctggccctggacaccagcttcctgaaggtgtccacccggcccagcggcaaccagacagacctggatggcagcctgcggcgggtgaggaagaatgaccctgacatgaaggagctgaacctgaacaacatcgagaacatccccaaggagatgctgctggactttgtgaatgccatgaagaagaacaagcacatcaagaccttcagcctggccaacgtgggcgcagatgaaaatgtggcctttgccctggccaacatgctgcgggagaacagaagcatcaccaccctgaacatcgagagcaacttcatcactggaaaaggaattgtggccatcatgcgctgcctgcagttcaatgagaccctgacagagctgcgcttccacaaccagaggcacatgctgggccaccacgccgagatggagatcgcccggctgctgaaggccaacaacaccctgctgaagatgggctaccactttgagctgcccggccccaggatggtggtgaccaacctgctgaccaggaaccaggacaagcagaggcagaagaggcaggaggagcagaagcagcagcagctgaaggagcagaagaagctgattgccatgctggagaatggcctgggcctgcccccaggcatgtgggagctgctgggcggccccaagccagacagcaggatgcaggagttcttccagcccccaccaccccggccccccaacccccagaatgtgcccttcagccagaggtctgagatgatgaagaagcccagccaggcccccaagtacagaacagatcctgacagcttccgggtggtgaagctgaagaggatccagaggaagagcaggatgcctgaggcccgggagcccccagagaagaccaacctgaaggatgtgatcaagaccctgaagcctgtgcccaggaaccggcccccacccctggtggagatcaccccccgggaccagctgctgaatgacatccgccacagctctgtggcctacctgaagcctgtgcagctgcccaaggagctggcctag

SEQ ID NO: 115674 - DNA, 1683 bp, Artificial Sequence
  derived and/or modified sequence
atgagcgagcacagccggaacagcgaccaggaggagctgctggacgaggagatcaacgaggatgagatccttgcaaacctatctgcagaggagctgaaagagctgcagagtgaaatggaggtgatggcgcctgatccttccctacccgtgggaatgatccagaaggaccagaccgacaaacctccgacaggtaatttcaatcacaagtccctggtggattatatgtattgggagaaggcaagcaggcgcatgctggaagaagaacgagttccggtgacattcgttaagtctgaggagaagactcaagaagaacatgaagagatagaaaagaggaataagaacatggcccagtacttaaaagagaaacttaataacgaaattgtggctaacaaaagggagagcaaaggaagttccaatatccaggagaccgatgaggaagatgaggaagaggaggacgacgatgacgatgatgaaggggaagacgatggggaggaaagcgaggaaaccaaccgtgaggaagaaggtaaagcaaaggagcagatcaggaattgcgagaacaactgccaacaggttacggacaaggcctttaaggaacaaagggaccggccagaggcccaggaacagtccgaaaagaagattagtaaattggaccctaagaagctggccctcgacacatcttttctgaaggtgtccacccggccctccggcaatcagactgacctagacggttcgctgcgtcgggtccggaaaaatgacccagacatgaaggaactcaacttgaataatatcgaaaatatccccaaagagatgctactggattttgtcaatgctatgaaaaaaaacaagcacattaaaaccttctctctcgccaatgtcggcgccgacgaaaatgtggccttcgcgttggccaacatgttgcgcgaaaacagaagtatcaccaccctgaatatcgagtccaattttatcactggcaaaggtatcgtcgccattatgagatgtctgcagttcaacgaaacgctgaccgagcttcgcttccacaaccaaagacacatgctgggccatcatgccgagatggaaatcgcacgactgttgaaagcgaataacactctcctaaaaatgggttatcactttgaattgccaggcccaaggatggtcgtgaccaatctcttgaccaggaatcaagataaacagcggcagaagaggcaggaagaacagaaacagcagcagctgaaagagcagaaaaaactgattgccatgcttgagaatgggctggggctaccacctggaatgtgggaactgctgggcggtccaaaaccagatagccgtatgcaggagttttttcagcctccaccacctcgccctcccaacccacagaatgttccatttagccagagaagtgaaatgatgaaaaagccttctcaagcccccaagtatagaactgaccctgactccttcagggtcgtgaagctgaaaaggattcagcgaaaatcaagaatgcctgaagcgcgggaacctcccgaaaaaaccaatttaaaggacgtgattaagacccttaagccagtaccacgcaatcgcccacctccgcttgtggagattacaccaagagatcaacttttgaacgatatcagacattctagtgtcgcctacctgaagcctgtccagctgcctaaggagctggcgtag

SEQ ID NO: 115675 - DNA, 1683 bp, Artificial Sequence
  derived and/or modified sequence
atgagcgagcacagccggaacagcgaccaggaggagctgctggacgaagaaatcaacgaggacgagatcctagccaacctgagtgccgaggaactgaaggaactgcaaagtgagatggaggtcatggcaccggatccctccttacctgtggggatgatccagaaagaccaaaccgacaagcccccaacaggaaactttaaccacaagtcacttgtggattacatgtattgggagaaagcctccagaagaatgctggaggaagaaagggtcccggtcacttttgtgaaatcagaggaaaagacgcaggaagaacatgaagaaatagagaaacgaaacaagaatatggctcagtacttgaaggaaaaattaaataacgagattgtcgccaacaagcgcgaatcaaaaggaagctctaacattcaggaaaccgatgaggaggatgaggaggaagaggacgatgacgatgacgatgaaggagaggatgacggcgaggagtcagaagagacaaacagggaagaggaggggaaagcaaaggaacaaattcggaactgtgaaaataattgtcagcaggtaactgacaaggcctttaaagaacagcgggatagaccggaagcacaggagcaaagcgaaaaaaaaataagcaagctcgatccaaaaaaactggccctagatacgtccttcttgaaggtgtcaaccagacccagcggtaatcaaactgacctcgacggatctttgcgcagagtgcggaagaatgatcccgacatgaaggaactgaatctgaacaacatcgaaaatatccccaaagaaatgttattagattttgtcaatgccatgaagaaaaacaaacatatcaagacattctctttggctaatgtgggcgccgacgaaaatgtggctttcgccctcgcgaacatgctgcgcgaaaatcggagtatcaccacactcaacatcgagtccaacttcatcacgggcaaaggaatcgttgccatcatgagatgtctacagttcaatgaaacccttaccgagctgaggtttcataaccaaaggcatatgttgggacaccatgctgagatggagatagctcgactcctgaaggctaacaacactcttctgaagatgggctatcattttgagctgccagggcctcggatggtggtcacaaacctcctcacaagaaaccaggataagcaacgacagaaaagacaggaagagcagaagcagcagcaactgaaggagcagaagaagttgatcgcaatgttggagaacggcctaggtctccccccagggatgtgggaattattgggtgggcctaaacctgattcgcgaatgcaggagttcttccagccccctcctccccgcccccccaatccccagaatgttcctttcagccaacgcagcgagatgatgaagaagccctcacaagccccaaagtaccgaaccgatccggattccttccgcgtcgttaagctcaagagaatccagcgaaagagccgaatgcccgaggctagggaaccccccgagaaaaccaacctcaaggatgtcattaaaaccctgaagcccgttccacgaaaccgaccacccccgcttgtggaaatcactcctcgcgatcagttgctgaatgacattagacattcctccgtcgcctatctgaaacctgtgcagttacctaaagagttggcgtag

SEQ ID NO: 115676 - DNA, 1683 bp, Artificial Sequence
  derived and/or modified sequence
atgagcgagcacagccggaacagcgaccaggaggagctgctggacgaggaaataaacgaagacgagatcttggcaaatctgagcgccgaggaactgaaggaattgcaatcagagatggaggtcatggcccctgacccctctcttccagtgggaatgatacagaaggatcagaccgataagccccccacaggcaacttcaaccacaagagccttgtagattacatgtattgggaaaaagcttcgcgaagaatgcttgaagaagagcgcgtcccagtgacttttgtaaaatccgaagaaaagacacaggaagagcacgaggagattgaaaagagaaataagaatatggcccaatacctgaaggaaaaactgaataatgagatagtcgctaataagcgagaatcaaaagggtcatcgaacattcaggagacggacgaagaagatgaggaagaggaggatgatgatgacgatgatgagggagaagatgatggtgaggagtctgaggaaaccaatagagaggaggaaggaaaagcaaaagagcagatccgcaattgcgaaaataactgtcaacaagtgaccgacaaagcctttaaggaacagagggacaggcccgaggcccaggaacaatctgaaaagaagatatccaagctggatcccaagaaattggcactcgatacctcttttctcaaagtgtccacccgcccctccggtaaccagacagacctggatggttcactgagaagagtacgaaagaatgaccctgatatgaaagagctcaatctaaataatatagagaacatccctaaggagatgctgttagacttcgtgaacgcaatgaaaaaaaacaaacacattaaaacgtttagcctggccaacgtgggggccgatgaaaatgttgcatttgccctggcaaatatgcttcgggaaaacagaagtatcacaactctaaatatcgaatcgaacttcatcacgggtaaaggtatcgttgctattatgcgatgccttcagttcaacgaaactctcactgaactgcgcttccataatcagaggcacatgctgggccaccatgccgagatggagatcgctcgcctgctgaaggccaataatactttactgaagatggggtatcactttgagttgccaggtcctcgtatggtggtaacaaatctgctgacccggaatcaggacaagcagagacaaaaacggcaggaggagcagaaacagcagcagctgaaggaacagaaaaagctgattgcgatgctggaaaatggcctgggtctgccccccgggatgtgggagctcctgggtggcccaaagcctgactcacgtatgcaagaatttttccaaccccccccaccccgacccccaaacccacagaatgtgccattctctcagcgaagcgaaatgatgaaaaaaccaagccaggcaccaaagtaccggacggacccagactccttcagagtcgtgaagttgaagaggatccagaggaagagcagaatgccagaggcccgggagccaccagagaaaacaaacctgaaggacgtaattaagacattgaagcccgttccacgcaatagaccaccgccactcgtagagatcactcctcgtgatcagctgctgaatgacattcggcacagctcggtggcctacctaaagccagttcaactacctaaagagctggcttag

SEQ ID NO: 115677 - DNA, 4086 bp, Artificial Sequence
  derived and/or modified sequence
atcactcctagctgctcagcaaaccactgaggttcctgggaaaaaaaaaaaaatatctcaagggtgtgttaacttgggacactcgttaactgggggaccttcttgaggcttttttccttctttttaaaaatcatctttgattattcttcttttctagtaaaataatatttagaaaaaataatgtcagagcacagcagaaattcagatcaagaagaacttctcgatgaggagattaatgaagatgaaatcttggccaacttgtctgctgaagaactgaaagaactgcagtcggaaatggaagtcatggcccctgaccccagccttcccgtgggaatgattcagaaagatcaaactgacaagccaccgacaggaaacttcaatcataaatctcttgttgattatatgtattgggaaaaggcatccaggcgcatgctggaagaggaacgagttcctgtcacctttgtgaaatccgaggaaaagactcaagaagagcatgaagaaatagaaaaacgtaataaaaatatggcccagtatttaaaagaaaagctcaataatgaaatagttgcaaataaaagagaatcaaagggcagcagcaatatccaagaaacagatgaagaagatgaagaagaagaagatgatgatgatgacgacgaaggagaagatgatggtgaagagagtgaagaaacgaacagagaagaggaaggcaaagcaaaggaacaaattagaaattgtgagaacaactgccagcaggtaactgacaaagcattcaaagaacagagagacagaccagaggcccaagaacaaagtgagaaaaaaatatcgaaattagatcctaagaagttagctctagacaccagctttttgaaggtaagtacaaggccttcaggaaaccagacagacctggatgggagcttgaggagagttaggaaaaatgatcctgacatgaaggaactcaacctgaacaacattgaaaacatccccaaagaaatgttactggactttgtcaatgcaatgaagaaaaacaagcacatcaaaacattcagtttagccaatgtgggtgcagatgagaatgtagcatttgccttggctaacatgttgcgtgaaaatagaagcatcaccactctcaacatcgagtccaatttcatcacaggtaaagggattgtggccatcatgaggtgtctccagtttaatgagacgctaactgagcttcggtttcacaatcagaggcacatgttgggtcaccatgctgaaatggaaatagccaggcttttgaaggcaaacaacactctcctgaagatgggctaccattttgagcttccgggtcccagaatggtggtcactaatctgctcaccaggaatcaggataaacaaaggcagaaacgacaggaagagcaaaaacagcagcaactcaaggaacagaagaagctgatagccatgttagagaatgggttggggctgccccctgggatgtgggagctgttgggaggacccaagccagattccagaatgcaggaattcttccagccaccgccacctcggcctcccaacccccaaaatgtcccctttagtcaacgcagtgaaatgatgaaaaagccatcgcaggccccgaagtacaggacagaccctgactccttccgggtggtgaagctgaagagaatccagcgcaaatctcggatgccggaagccagagaaccacccgagaaaaccaacctcaaagatgtcatcaaaacgctcaagccagtgccgagaaacaggccacccccattggtggaaatcactcccagagatcagctgctaaacgacattcgtcacagcagtgtcgcctatcttaaacctgtgcaactgccaaaagaactggcgtaagaggcaacagagccatctagaagaacaagaaatggaaatagtgactcttggattacagcatggagactatgtcagcagcaatactttaggatccacgtggcagaactggaaacaatgctaccatctgataagggtatttgtaaaaggcagaatgtttgggccatgaagaagtaggggctgaagaggaaggtggaaggagataaaatataatatttagaggcaatattttctacttgcaatcaatttgagtgactcaggtgaaatttagagtcatatttcccgaagcagaagttaaagaaaattttttaaacatttgctttattattgttttcttctggtaaataataaatataacagaagtgttaactattgtattcccatttttttctccttccatctcttctgcggtaattcatcacatagtatcttaaagggaacaaataatgtttcatcctatggaaatgtgaaggatgaattgagctcctggcccttctgatgctttgaaatggaaggattgttccttagagcttctctgcagaatcagtggagattttcagtttcccaccctgcctggctttctctcttggtgactcccttggtgttttggagtattctttctataggggtacctgtgaggggcagaacacgtaagccacagaacatggtgaaaactaagtgtcactaggaaaagtaatgggaaagtaaaccctgcatatatgaaaacttcctggcagcaagttttcatatatagagggacaatgggagacagcatgctgtttttatagaaaagaagttttacataatatagttattgacaagcttttggttttggctaaatacacacacacacacacacgctcatatgtgtttactctgtaagtctaatttgattttatcactctcaaacatattttaaaggaaacttgcttacaggaaggattaaacttgaactacttatcctattctttaaggcactccattgcctggccccaatttactaatcctgtcttatttcccacaaatcctttatactctactcgatgaaacatccttgtgcacacccttgtgcctttgctcgcattaatccttccaagagacttccctcctgttctccattaatgaacgtcctacccagtcttcaactcccgggtcagatcctgtgtcctccataaaaaattttccagacaactccaatctgtccttcttccaagttcctagaggccttaattattcattctagccactaggtgcatagaatttgagatttttgtaataatagaagtagtgtgaaccctagaaattagaaaatcaagctttgggccaggtgcggtggctcatgcctgtaatcccagcactatgggaggccagggagggaggatctccagaggtcaggagttcgagaccagcctggccaacatggtgaaaccccgtctctattaaaaatacaaaaattagctgggcatgatggcaggcacctgtaatcccagctactcgggaggctgaggcaggagaattgcttgaactggggaggcagaggttgcagtgagacaagatcacgtcactgtactccagcctgggtgacagagtgatactccatctcaaaaaaaaaaaaaaaaaaaaaaaaaaaaaaaaaaaaaaaaacctttggtgccttttctctcttctttacctgagtaaataattggcacctgccttctttctccttttatgttatcataagtggcatgtatcaaaccaaacaggctaggggagaataggtctaattgtgacagacttaaaaacaacacattatttggaaagacaagccatgggaaagaaatatggcgtttctatttttttaagataatttagtatgtacaaaagtatccaaatttaaatatagttttcaatggctgatagttttgttttctcacccttcaatatttctagaaaacatccttgcatacaaagcaggatagctaagaaagggctgtaacaaacaaaacttcaagtgtctagcacatactacatctaagaggctaaactctgataggaaaagcactttaaacataattaaaagcttaatgtaaattagtagttgaaattctaggccggtgcggtggctcatgcctgtaatcccagcactgtaggcggccgaggtgggtgaatcacatgaggtcaggagttcaagaccagcctgaccaacatggtgaaaccccatttctactaaaaaaaaaaaaaaaa

SEQ ID NO: 115678 - DNA, 1683 bp, Artificial Sequence
  derived and/or modified sequence
atgagtgagcactctcgtaactccgaccaggaagagttacttgacgaagaaataaatgaggacgaaatcctagctaacttgtctgccgaagagctgaaggaactgcaaagcgagatggaagttatggccccagatccaagcctgccagtgggcatgattcagaaggatcagaccgataagccccctaccggcaattttaatcataaatcacttgttgactatatgtattgggaaaaggccagcaggagaatgctggaagaggagagagtgccagtgaccttcgtcaaaagcgaggagaaaacccaggaggagcacgaggaaatcgaaaaaaggaataaaaatatggcgcagtacctgaaggagaaactcaataatgaaattgttgccaataagcgtgagtccaagggttcttccaatattcaggagacagacgaggaagatgaggaggaagaagacgacgatgacgacgatgaaggagaggacgacggggaggagtctgaggaaactaatcgggaggaagaaggtaaggccaaagagcaaattcggaactgcgagaacaactgtcagcaggtaacggacaaagcctttaaagaacagcgcgataggccggaggcccaagaacagagcgagaagaagatctccaaattggaccccaagaaactcgccctggatacctcttttcttaaagtttcaactcgcccaagcggcaaccagacagatctcgacgggtctcttaggagagtgcgcaagaacgatcctgacatgaaagagctcaacctaaataacatcgaaaatattcccaaagaaatgctgcttgactttgtgaacgcaatgaagaaaaacaaacatatcaagacattcagcttggccaacgtcggtgcggacgagaacgtggccttcgcgttggctaatatgctgcgtgagaacagatccatcaccactttgaatattgagagcaactttatcacaggaaagggtattgtggcaattatgcgctgtttacagtttaatgaaaccctcacggagctccggttccacaaccaaagacacatgctggggcatcacgctgagatggaaatagccaggttgctcaaggccaataatacgctgctaaaaatggggtaccactttgagcttccaggccctcggatggtggtcacgaacttgttgacccgcaaccaggacaagcagcggcagaaacggcaggaagagcaaaagcagcagcaactgaaggagcagaagaaactgatcgctatgttagaaaatggcctgggcctgccgcctgggatgtgggagctcctgggcggacctaagcccgacagccgcatgcaggaatttttccagccccctcctccgcgaccgcctaatccccaaaatgtgcctttttctcagcggtccgaaatgatgaagaagccttcccaagctccgaagtacaggacggaccctgacagcttcagagttgtcaaactcaagaggatccaaaggaagtccaggatgcccgaggcccgagaaccaccggaaaagaccaacctgaaggacgtgataaagacactgaagcccgttcccaggaaccgccctcccccactggttgagattaccccgcgagaccaactgcttaatgatatccgccattcttccgtcgcctacttgaaacctgttcaattaccaaaagagcttgcctag

SEQ ID NO: 115679 - DNA, 1683 bp, Artificial Sequence
  derived and/or modified sequence
atgagcgagcacagccgcaattcagatcaagaagagcttctcgacgaggaaattaatgaagatgaaatactggccaacctttctgctgaagaattgaaggaactccagtcagaaatggaggtgatggcgcctgacccttctctacccgtcggaatgatccagaaggatcagacagacaagcccccaaccgggaactttaatcacaaaagtctggtggactacatgtattgggaaaaggcctcacgccgtatgcttgaagaagaacgcgtgcccgttacatttgtgaaaagcgaggaaaagacccaggaagaacatgaagaaatcgagaagagaaacaagaatatggcccagtacctcaaagagaaactcaataacgaaatcgtagccaacaaacgcgagtccaaggggagtagtaacattcaggagactgacgaggaggacgaggaggaggaggacgacgacgatgacgacgaaggcgaagacgacggcgaagaatctgaggagactaacagggaggaggaaggcaaggcaaaggagcagattcggaattgcgagaataattgtcaacaagtcactgacaaagccttcaaagagcagcgtgacaggcccgaggcacaggaacaaagcgaaaagaagatttccaagttggatcctaaaaagctcgcattggatacaagtttcctcaaggttagtactcgccctagcggtaaccagactgatttggacgggagcctgcgcagggtgaggaagaatgatcctgatatgaaggagctgaatctcaataatattgagaacatcccaaaggaaatgttgctggactttgtgaatgccatgaagaaaaacaagcacattaagacattcagtctcgccaacgttggcgctgacgagaacgtggcattcgcccttgctaacatgttaagagaaaacaggtcaattactacgctcaatatcgagtcaaatttcataacaggtaaggggatcgttgccatcatgagatgcctccagtttaatgaaacattgactgagcttcgatttcataaccagaggcatatgttaggtcatcatgctgagatggaaattgctcggctcctgaaagcgaataatactctgctgaagatgggctatcattttgaactgcctgggccaaggatggtggttaccaacctcttgacacgcaatcaggataaacagcgccagaagaggcaggaagaacaaaagcagcagcagctgaaggaacaaaagaaactgattgctatgttggaaaatggactcggcctgcccccaggtatgtgggagctgctaggcggacccaaacctgactctaggatgcaagagttctttcagcccccacccccaagaccacccaacccccagaatgttcctttttcccagagatctgagatgatgaagaaacccagtcaagctcccaagtataggacggaccctgactcgttcagagtagtgaagcttaaacggattcagcgaaagagccggatgccagaggcgagagaaccgccagaaaagacaaaccttaaagacgttataaaaaccctgaagcccgtccctcggaaccgaccaccacctctcgtcgagataacgccacgggaccagttactgaatgacatccgccacagttcagtggcatacctgaagcccgttcagttgcctaaggagctggcctag

SEQ ID NO: 115680 - DNA, 1683 bp, Artificial Sequence
  derived and/or modified sequence
atgagtgagcattcaaggaattcagatcaggaagagttactggacgaggagatcaatgaggacgaaattctggccaacttgtccgccgaggaacttaaggagttgcagtccgagatggaggtcatggcccctgacccttcgctgcctgtcggtatgatacaaaaagaccagaccgataagcctccaactgggaattttaaccacaagtctttggttgattacatgtactgggagaaagcatcccgcagaatgctggaagaggagagagtacctgtgaccttcgtgaagtcagaggagaagacccaggaggagcacgaggagatcgagaaaaggaataaaaacatggcccagtatttaaaagaaaagctgaataatgagatcgtggcaaacaagagggagtcgaagggttcgtccaacattcaggaaaccgatgaagaggatgaagaggaagaggatgatgacgatgacgatgagggcgaagacgatggcgaggaaagcgaggagacgaatcgggaagaggaggggaaagccaaagaacaaatcaggaattgcgagaataattgtcagcaggtgactgataaggccttcaaggagcaaagagatagacccgaggctcaagaacaatccgaaaagaagatatcaaagttggatcccaagaagcttgctttggacacctcttttctgaaggtcagtactaggccctctggaaaccagacagatctagatggctctctgaggagggtcagaaaaaacgaccccgatatgaaggagctgaacttgaataacatcgaaaatatccccaaagaaatgctcctggactttgtgaacgcaatgaaaaagaataagcacattaagaccttctctttagccaacgtcggcgcagatgaaaatgtcgccttcgccctcgctaatatgctgagagagaataggtccatcactactctgaatattgaatctaattttataactggcaaagggattgtcgccatcatgcgatgcttgcagtttaacgagacattgacagagctccgattccataatcagagacatatgctgggacatcacgctgagatggaaatcgccagactcctaaaggctaacaacactcttttaaagatggggtaccacttcgaactgccaggacctcggatggtggtgacaaatctcttaaccaggaaccaggacaaacaacgtcagaagaggcaagaggaacaaaagcaacagcagcttaaggaacagaaaaaactgattgccatgttggagaacggccttggactgcccccaggcatgtgggaattgctcggaggtcccaaaccagactcacgtatgcaggagttttttcagccaccaccccctcgcccacccaatccacagaatgtgcctttttcgcagagatcagagatgatgaagaaaccatctcaggcgcctaagtatcgaacagaccccgacagttttcgggtcgttaagctgaaaagaatacaacgaaagtcacgcatgcccgaagctagagagccacctgaaaagactaatttgaaggacgtgatcaagacgttgaaacctgtcccacgcaatagacctccccctctggtcgagatcacgccgagggatcagttactcaatgatattcgccatagctcagtggcatatttgaaacctgtccagttgccaaaggaactagcttag

SEQ ID NO: 115681 - DNA, 2238 bp, Artificial Sequence
  derived and/or modified sequence
gacatagcaagacctctgttccactgtgcaccactttatttgcttccacactcaccttgtagggaagaggcagaccctaagagcttgatttctaccttcaagtgaattctttacttcagaaacaactcaggttgctggttggatttcccttctgaaatatttaaaataatatttagaaaaaataatgtcagagcacagcagaaattcagatcaagaagaacttctcgatgaggagattaatgaagatgaaatcttggccaacttgtctgctgaagaactgaaagaactgcagtcggaaatggaagtcatggcccctgaccccagccttcccgtgggaatgattcagaaagatcaaactgacaagccaccgacaggaaacttcaatcataaatctcttgttgattatatgtattgggaaaaggcatccaggcgcatgctggaagaggaacgagttcctgtcacctttgtgaaatccgaggaaaagactcaagaagagcatgaagaaatagaaaaacgtaataaaaatatggcccagtatttaaaagaaaagctcaataatgaaatagttgcaaataaaagagaatcaaagggcagcagcaatatccaagaaacagatgaagaagatgaagaagaagaagatgatgatgatgacgacgaaggagaagatgatggtgaagagagtgaagaaacgaacagagaagaggaaggcaaagcaaaggaacaaattagaaattgtgagaacaactgccagcaggtaactgacaaagcattcaaagaacagagagacagaccagaggcccaagaacaaagtgagaaaaaaatatcgaaattagatcctaagaagttagctctagacaccagctttttgaaggtaagtacaaggccttcaggaaaccagacagacctggatgggagcttgaggagagttaggaaaaatgatcctgacatgaaggaactcaacctgaacaacattgaaaacatccccaaagaaatgttactggactttgtcaatgcaatgaagaaaaacaagcacatcaaaacattcagtttagccaatgtgggtgcagatgagaatgtagcatttgccttggctaacatgttgcgtgaaaatagaagcatcaccactctcaacatcgagtccaatttcatcacaggtaaagggattgtggccatcatgaggtgtctccagtttaatgagacgctaactgagcttcggtttcacaatcagaggcacatgttgggtcaccatgctgaaatggaaatagccaggcttttgaaggcaaacaacactctcctgaagatgggctaccattttgagcttccgggtcccagaatggtggtcactaatctgctcaccaggaatcaggataaacaaaggcagaaacgacaggaagagcaaaaacagcagcaactcaaggaacagaagaagctgatagccatgttagagaatgggttggggctgccccctgggatgtgggagctgttgggaggacccaagccagattccagaatgcaggaattcttccagccaccgccacctcggcctcccaacccccaaaatgtcccctttagtcaacgcagtgaaatgatgaaaaagccatcgcaggccccgaagtacaggacagaccctgactccttccgggtggtgaagctgaagagaatccagcgcaaatctcggatgccggaagccagagaaccacccgagaaaaccaacctcaaagatgtcatcaaaacgctcaagccagtgccgagaaacaggccacccccattggtggaaatcactcccagagatcagctgctaaacgacattcgtcacagcagtgtcgcctatcttaaacctgtgcaactgccaaaagaactggcgtaagaggcaacagagccatctagaagaacaagaaatggaaatagtgactcttggattacagcatggagactatgtcagcagcaatactttaggatccacgtggcagaactggaaacaatgctaccatctgataagggtatttgtaaaaggcagaatgtttgggccatgaagaagtaggggctgaagaggaaggtggaaggagataaaatataatatttagaggcaatattttctacttgcaatcaatttgagtgactcaggtgaaatttagagtcatatttcccgaagcagaagttaaagaaaattttttaaacatttgctttattattgttttcttctggtaaataataaatataacagaagtgttaactatt

SEQ ID NO: 115682 - DNA, 2221 bp, Artificial Sequence
  derived and/or modified sequence
aatatagatccggcaagagcttagctgtgatcactcctagctgctcagcaaaccactgaggttcctgggaaaaaaaaaaaaatatctcaaggtaaaataatatttagaaaaaataatgtcagagcacagcagaaattcagatcaagaagaacttctcgatgaggagattaatgaagatgaaatcttggccaacttgtctgctgaagaactgaaagaactgcagtcggaaatggaagtcatggcccctgaccccagccttcccgtgggaatgattcagaaagatcaaactgacaagccaccgacaggaaacttcaatcataaatctcttgttgattatatgtattgggaaaaggcatccaggcgcatgctggaagaggaacgagttcctgtcacctttgtgaaatccgaggaaaagactcaagaagagcatgaagaaatagaaaaacgtaataaaaatatggcccagtatttaaaagaaaagctcaataatgaaatagttgcaaataaaagagaatcaaagggcagcagcaatatccaagaaacagatgaagaagatgaagaagaagaagatgatgatgatgacgacgaaggagaagatgatggtgaagagagtgaagaaacgaacagagaagaggaaggcaaagcaaaggaacaaattagaaattgtgagaacaactgccagcaggtaactgacaaagcattcaaagaacagagagacagaccagaggcccaagaacaaagtgagaaaaaaatatcgaaattagatcctaagaagttagctctagacaccagctttttgaaggtaagtacaaggccttcaggaaaccagacagacctggatgggagcttgaggagagttaggaaaaatgatcctgacatgaaggaactcaacctgaacaacattgaaaacatccccaaagaaatgttactggactttgtcaatgcaatgaagaaaaacaagcacatcaaaacattcagtttagccaatgtgggtgcagatgagaatgtagcatttgccttggctaacatgttgcgtgaaaatagaagcatcaccactctcaacatcgagtccaatttcatcacaggtaaagggattgtggccatcatgaggtgtctccagtttaatgagacgctaactgagcttcggtttcacaatcagaggcacatgttgggtcaccatgctgaaatggaaatagccaggcttttgaaggcaaacaacactctcctgaagatgggctaccattttgagcttccgggtcccagaatggtggtcactaatctgctcaccaggaatcaggataaacaaaggcagaaacgacaggaagagcaaaaacagcagcaactcaaggaacagaagaagctgatagccatgttagagaatgggttggggctgccccctgggatgtgggagctgttgggaggacccaagccagattccagaatgcaggaattcttccagccaccgccacctcggcctcccaacccccaaaatgtcccctttagtcaacgcagtgaaatgatgaaaaagccatcgcaggccccgaagtacaggacagaccctgactccttccgggtggtgaagctgaagagaatccagcgcaaatctcggatgccggaagccagagaaccacccgagaaaaccaacctcaaagatgtcatcaaaacgctcaagccagtgccgagaaacaggccacccccattggtggaaatcactcccagagatcagctgctaaacgacattcgtcacagcagtgtcgcctatcttaaacctgtgcaactgccaaaagaactggcgtaagaggcaacagagccatctagaagaacaagaaatggaaatagtgactcttggattacagcatggagactatgtcagcagcaatactttaggatccacgtggcagaactggaaacaatgctaccatctgataagggtatttgtaaaaggcagaatgtttgggccatgaagaagtaggggctgaagaggaaggtggaaggagataaaatataatatttagaggcaatattttctacttgcaatcaatttgagtgactcaggtgaaatttagagtcatatttcccgaagcagaagttaaagaaaattttttaaacatttgctttattattgttttcttctggtaaataataaatataacagaagtgttaactattgtattcccatttttttctccttccatctcttctgcggtaattcatcacatag

SEQ ID NO: 115683 - protein, 828 aa, Artificial Sequence
  derived and/or modified sequence
MPSALAIFTCRPNSHPFQERHVYLDEPIKIGRSVARCRPAQNNATFDCKVLSRNHALVWFDHKTGKFYLQDTKSSNGTFINSQRLSRGSEESPPCEILSGDIIQFGVDVTENTRKVTHGCIVSTIKLFLPDGMEARLRSDVIHAPLPSPVDKVAANTPSMYSQELFQLSQYLQEALHREQMLEQKLATLQRLLAITQEASDTSWQALIDEDRLLSRLEVMGNQLQACSKNQTEDSLRKELIALQEDKHNYETTAKESLRRVLQEKIEVVRKLSEVERSLSNTEDECTHLKEMNERTQEELRELANKYNGAVNEIKDLSDKLKVAEGKQEEIQQKGQAEKKELQHKIDEMEEKEQELQAKIEALQADNDFTNERLTALQVRLEHLQEKTLKECSSLEHLLSKSGGDCTFIHQFIECQKKLIVEGHLTKAVEETKLSKENQTRAKESDFSDTLSPSKEKSSDDTTDAQMDEQDLNEPLAKVSLLKDDLQGAQSEIEAKQEIQHLRKELIEAQELARTSKQKCFELQALLEEERKAYRNQVEESTKQIQVLQAQLQRLHIDTENLREEKDSEITSTRDELLSARDEILLLHQAAAKVASERDTDIASLQEELKKVRAELERWRKAASEYEKEITSLQNSFQLRCQQCEDQQREEATRLQGELEKLRKEWNALETECHSLKRENVLLSSELQRQEKELHNSQKQSLELTSDLSILQMSRKELENQVGSLKEQHLRDSADLKTLLSKAENQAKDVQKEYEKTQTVLSELKLKFEMTEQEKQSITDELKQCKNNLKLLREKGNNKPWPWMPMLAALVAVTAIVLYVPGLARASP

SEQ ID NO: 115684 - DNA, 2487 bp, Artificial Sequence
  derived and/or modified sequence
atgcccagcgccctggccatcttcacctgcagacccaacagccaccccttccaggagagacacgtgtacctggacgagcccatcaagatcggcagaagcgtggccagatgcagacccgcccagaacaacgccaccttcgactgcaaggtgctgagcagaaaccacgccctggtgtggttcgaccacaagaccggcaagttctacctgcaggacaccaagagcagcaacggcaccttcatcaacagccagagactgagcagaggcagcgaggagagccccccctgcgagatcctgagcggcgacatcatccagttcggcgtggacgtgaccgagaacaccagaaaggtgacccacggctgcatcgtgagcaccatcaagctgttcctgcccgacggcatggaggccagactgagaagcgacgtgatccacgcccccctgcccagccccgtggacaaggtggccgccaacacccccagcatgtacagccaggagctgttccagctgagccagtacctgcaggaggccctgcacagagagcagatgctggagcagaagctggccaccctgcagagactgctggccatcacccaggaggccagcgacaccagctggcaggccctgatcgacgaggacagactgctgagcagactggaggtgatgggcaaccagctgcaggcctgcagcaagaaccagaccgaggacagcctgagaaaggagctgatcgccctgcaggaggacaagcacaactacgagaccaccgccaaggagagcctgagaagagtgctgcaggagaagatcgaggtggtgagaaagctgagcgaggtggagagaagcctgagcaacaccgaggacgagtgcacccacctgaaggagatgaacgagagaacccaggaggagctgagagagctggccaacaagtacaacggcgccgtgaacgagatcaaggacctgagcgacaagctgaaggtggccgagggcaagcaggaggagatccagcagaagggccaggccgagaagaaggagctgcagcacaagatcgacgagatggaggagaaggagcaggagctgcaggccaagatcgaggccctgcaggccgacaacgacttcaccaacgagagactgaccgccctgcaggtgagactggagcacctgcaggagaagaccctgaaggagtgcagcagcctggagcacctgctgagcaagagcggcggcgactgcaccttcatccaccagttcatcgagtgccagaagaagctgatcgtggagggccacctgaccaaggccgtggaggagaccaagctgagcaaggagaaccagaccagagccaaggagagcgacttcagcgacaccctgagccccagcaaggagaagagcagcgacgacaccaccgacgcccagatggacgagcaggacctgaacgagcccctggccaaggtgagcctgctgaaggacgacctgcagggcgcccagagcgagatcgaggccaagcaggagatccagcacctgagaaaggagctgatcgaggcccaggagctggccagaaccagcaagcagaagtgcttcgagctgcaggccctgctggaggaggagagaaaggcctacagaaaccaggtggaggagagcaccaagcagatccaggtgctgcaggcccagctgcagagactgcacatcgacaccgagaacctgagagaggagaaggacagcgagatcaccagcaccagagacgagctgctgagcgccagagacgagatcctgctgctgcaccaggccgccgccaaggtggccagcgagagagacaccgacatcgccagcctgcaggaggagctgaagaaggtgagagccgagctggagagatggagaaaggccgccagcgagtacgagaaggagatcaccagcctgcagaacagcttccagctgagatgccagcagtgcgaggaccagcagagagaggaggccaccagactgcagggcgagctggagaagctgagaaaggagtggaacgccctggagaccgagtgccacagcctgaagagagagaacgtgctgctgagcagcgagctgcagagacaggagaaggagctgcacaacagccagaagcagagcctggagctgaccagcgacctgagcatcctgcagatgagcagaaaggagctggagaaccaggtgggcagcctgaaggagcagcacctgagagacagcgccgacctgaagaccctgctgagcaaggccgagaaccaggccaaggacgtgcagaaggagtacgagaagacccagaccgtgctgagcgagctgaagctgaagttcgagatgaccgagcaggagaagcagagcatcaccgacgagctgaagcagtgcaagaacaacctgaagctgctgagagagaagggcaacaacaagccctggccctggatgcccatgctggccgccctggtggccgtgaccgccatcgtgctgtacgtgcccggcctggccagagccagcccctag

SEQ ID NO: 115685 - DNA, 2487 bp, Artificial Sequence
  derived and/or modified sequence
atgcccagcgcactggcaattttcacctgcaggcccaactcccatccttttcaagaacggcatgtttatctggatgagccaatcaaaattggtaggagtgtggctcggtgtagaccagcccaaaacaatgctacctttgactgtaaggttttaagtagaaatcacgccctagtgtggtttgatcacaaaacaggtaagttctatttgcaagatacgaagtcatcaaacggcactttcattaatagtcagagattatctcggggaagtgaagaatctcccccatgtgagattttgagtggtgatataatccagtttggagtcgacgtgacagagaatacccgaaaggtcactcacgggtgcatcgtgtctactatcaagcttttcctgcccgacggaatggaggccaggttgagatctgatgttatccacgccccactgccttcaccagtggacaaagtcgctgccaacacaccatcaatgtatagccaggaactctttcagttgagtcaatatctgcaggaagcgctgcatagggagcagatgctggaacagaagttagctaccttgcaaaggctactcgcaatcacccaggaagcttcggacaccagctggcaagcactgatcgatgaagaccgactcctttctagactggaggtgatgggaaaccagctgcaggcctgctcaaaaaaccagaccgaggacagcttgagaaaggagttgatcgccctgcaggaagataaacacaattacgagaccacagcaaaagaatccctacgacgcgtactacaagagaaaatcgaggtcgtacgaaagttatccgaggtggaaaggagcctgtccaatacagaagacgagtgtacacatctgaaagaaatgaatgaacgcactcaggaggaattgcgcgagctggcgaacaagtacaatggagcagtgaacgaaattaaagatctctcggacaaattgaaggtcgcggaaggcaagcaagaagagatccagcagaagggccaggcggagaagaaagagctccagcacaaaattgacgagatggaggaaaaggagcaagagttacaagccaagatcgaagctctgcaggcagacaatgatttcactaatgagaggctcaccgctctacaagtcaggctcgagcaccttcaagagaagactctaaaagagtgttcttcactggagcacctgttgtcaaagtccggtggggactgcacctttattcaccagtttatcgagtgccagaaaaagctaatcgtggaaggacacctgaccaaggccgttgaagaaacaaagctgtctaaggagaaccaaactcgggctaaggaatccgatttcagcgatacgctgagcccgagcaaagagaagagcagtgacgacactaccgatgcccaaatggatgagcaagacctgaacgaacctctcgcaaaggttagcctgctcaaggacgacctgcagggagcccagtccgaaatagaggctaagcaggaaatacagcatctccggaaggagctcatcgaggctcaggagctggctagaacttcaaagcagaagtgcttcgagcttcaggctttactggaagaggagcgcaaagcgtacaggaaccaggttgaagaaagtaccaaacagattcaggtgcttcaagcccaactccagcggctgcatatcgatacggagaacctgcgggaggagaaggacagcgagatcacctccacacgcgacgagctgctgagcgccagggacgaaatcctgctgctgcaccaggccgcagcgaaagtcgcctctgaacgggacactgacattgcttcgctgcaggaggagctcaagaaggttagagctgagctggagaggtggcgcaaggctgccagtgagtatgagaaggagatcacaagtctgcagaactcgttccagcttcggtgtcagcagtgtgaggaccagcagagagaggaagccacgagactgcaaggcgagttggagaaactgcgcaaagagtggaatgccctggaaacagagtgtcatagcctgaaacgcgaaaatgttctgctcagttctgaattacaacgacaggagaaagagcttcataatagccaaaaacagtccctggagttaacctcagacttgagtatcctgcagatgtcaagaaaggaactggagaaccaggttggtagcctgaaggagcagcacttgcgggacagcgctgacttaaagactctccttagcaaagccgaaaatcaggctaaggatgtgcagaaggagtacgaaaaaacacagaccgtcctttccgaacttaaattgaaattcgagatgaccgaacaggaaaaacaatctattacagacgaattaaaacagtgcaaaaataacctgaagctgctgcgggagaagggcaacaataagccttggccatggatgccaatgctggccgcccttgtcgccgtgacagcaatcgtgctgtacgtcccaggactggcccgggcaagtccatag

SEQ ID NO: 115686 - DNA, 2487 bp, Artificial Sequence
  derived and/or modified sequence
atgcccagcgccctggccatcttcacctgccggcccaacagccaccccttccaggagagacatgtgtacctggatgagcccatcaagattggccgctctgtggcccgctgcaggcctgcccagaacaatgccacctttgactgcaaggtgctgagcagaaatcatgccctggtgtggtttgaccacaagacaggcaagttctacctgcaggacaccaagagcagcaatggcaccttcatcaacagccagaggctgagccggggcagcgaggagagccccccctgtgagatcctgagcggggacatcatccagtttggagtggatgtgacagagaacaccaggaaggtgacccacggctgcatcgtgtccaccatcaagctgttcctgcctgatggcatggaggcccggctgcggagtgatgtgattcatgcccccctgcccagccctgtggacaaggtggccgccaacacccccagcatgtacagccaggagctgttccagctgagccagtacctgcaggaggccctgcaccgggagcagatgctggagcagaagctggccaccctgcagaggctgctggccatcacccaggaggccagtgacacctcctggcaggccctgattgatgaggaccggctgctgagccggctggaggtgatgggcaaccagctgcaggcctgcagcaagaaccagacagaggacagcctgaggaaggagctgattgccctgcaggaggacaagcacaactatgagaccacagccaaggagagcctgcggcgggtgctgcaggagaagattgaggtggtgaggaagctgtctgaggtggagaggagcctgagcaacacagaagatgaatgtacccacctgaaggagatgaatgaaagaacccaggaggagctgcgggagctggccaacaagtacaacggggctgtgaatgagatcaaggacctgagtgacaagctgaaggtggccgagggcaagcaggaggagatccagcagaagggccaggccgagaagaaggagctgcagcacaagattgatgagatggaggagaaggagcaggagctgcaggccaagattgaggccctgcaggccgacaatgacttcaccaatgaaaggctgacagccctgcaggtgcggctggagcacctgcaggagaagaccctgaaggaatgtagcagcctggagcacctgctgagcaagagcggcggggactgcaccttcatccaccagttcatcgagtgccagaagaagctgattgtggagggccacctgaccaaggctgtggaggagaccaagctgagcaaagaaaaccagacccgggccaaggagagtgacttcagtgacaccctgagccccagcaaggagaagagcagtgatgacaccacagatgcccagatggatgagcaggacctgaatgagcccctggccaaggtgtccctgctgaaggatgacctgcagggcgcccagagcgagattgaggccaagcaggagatccagcacctgaggaaggagctgattgaggcccaggagctggcccggaccagcaagcagaagtgctttgagctgcaggccctgctggaggaggagaggaaggcctacagaaaccaggtggaggagagcaccaagcagatccaggtgctgcaggcccagctgcagaggctgcacatcgacacagagaacctgcgggaggagaaggacagcgagatcaccagcaccagagatgagctgctgagcgccagagatgagatcctgctgctgcaccaggccgccgccaaggtggccagcgagcgggacacagacatcgccagcctgcaggaggagctgaagaaggtgcgggcagagctggagcgctggaggaaggccgcctctgaatatgagaaggagatcaccagcctgcagaacagcttccagctgcgctgccagcagtgtgaggaccagcagcgggaggaggccacccggctgcagggcgagctggagaagctgaggaaggagtggaatgccctggagacagagtgccacagcctgaagagagaaaatgtgctgctgagcagcgagctgcagaggcaggagaaggagctgcacaacagccagaagcagagcctggagctgaccagtgacctgagcatcctgcagatgagcaggaaggagctggagaaccaggtgggcagcctgaaggagcagcacctgcgggacagcgctgacctgaagaccctgctgagcaaggccgagaaccaggccaaggatgtgcagaaggagtatgagaagacccagacagtgctgtctgagctgaagctgaagtttgagatgacagagcaggagaagcagagcatcacagatgagctgaagcagtgcaagaacaacctgaagctgctgcgggagaagggcaacaacaagccctggccctggatgcccatgctggccgccctggtggccgtgacagccatcgtgctgtatgtgcccggcctggcccgggccagcccctag

SEQ ID NO: 115687 - DNA, 2487 bp, Artificial Sequence
  derived and/or modified sequence
atgcccagcgccctggccatcttcacctgccggcccaacagccaccccttccaggagagacacgtgtacctggatgagcctatcaagatcggtcgcagtgtcgcaagatgtaggccagcacagaataatgccacttttgattgcaaagtgttgtctaggaatcacgccctagtctggtttgaccacaaaaccggaaagttctacctgcaggataccaaatcttcgaatggaacattcattaattctcagcgactgtcgcgcggtagcgaagagtcaccaccctgcgagattctttccggcgacatcatccaatttggcgtggacgtcaccgagaatactcgaaaggtcacccacgggtgtatcgtgagcactatcaagctgttcctgcctgacggaatggaagcacggctgcgctcagacgtaatacatgccccccttccaagcccagtggataaagtggctgccaacaccccatcaatgtacagccaggagcttttccaattgtcacagtacctgcaagaggccttgcatcgtgagcagatgctcgaacagaaattggccacattgcagcgcctcttagccattacacaggaggcctcagatacaagttggcaggccctgatagacgaggacaggctactgtccaggctggaggtgatgggcaaccaactccaggcttgttctaaaaaccagacggaagactcccttcgcaaggagctcattgctttgcaggaagacaagcataactatgagaccactgcaaaggaatccctgcgccgtgtcctccaggagaagattgaggttgtccgcaaactgtcagaagtggagagatccctcagcaacactgaggacgaatgcacccatctgaaggagatgaacgagcgcacccaagaggagctacgagaattggccaataagtacaatggagccgtgaatgaaattaaggatcttagtgacaaactcaaggtggccgaaggtaaacaggaggaaatccagcagaagggccaggctgagaaaaaggagctgcaacacaagatagatgaaatggaagagaaagagcaagaattgcaggctaaaatcgaagccctccaggctgataatgatttcaccaatgagcgcctgactgcgctgcaggtgaggcttgagcatcttcaggagaagacactgaaggagtgttcatccctggagcatcttttgtccaagagcggaggggactgtacatttattcaccagttcatcgagtgtcagaagaaacttatcgtggagggtcatctcactaaagctgtcgaagagacaaagttgtctaaggagaaccagacccgtgccaaggaatcggacttcagtgacacgctgtccccttccaaagaaaagagcagtgacgacaccaccgacgcgcaaatggacgagcaagacttaaacgagcctctagcaaaagtcagtttattgaaagacgaccttcagggcgcccagagcgagatagaagccaagcaggagatccagcatctccgcaaagagttaatcgaagcccaggagctggcaaggacttccaaacagaaatgcttcgagctgcaggctcttctagaagaagagcggaaagcctaccgcaaccaggtggaggagagcaccaagcagatccaagtgctgcaggcacagctccagcggctgcatatagatacggaaaacctgagagaggagaaagattctgaaataactagtacccgggacgagctgctgtccgccagagacgagatccttctgctacaccaagccgctgctaaggtcgcctcagagcgagacaccgatatagcctcccttcaagaggagttaaaaaaggtacgcgcagaactcgaacggtggcgcaaagctgcatctgagtatgagaaagagatcaccagccttcagaactcatttcaactacggtgccagcagtgtgaggaccaacagagagaagaagctacacgactacagggcgagctcgagaagctcagaaaagagtggaatgcattggaaaccgaatgtcactccctgaaacgggagaacgtccttctgagcagcgagctccagcgccaggagaaggaactccataatagtcagaagcagtctctggaattgacatccgacctttccatcctgcagatgagccgtaaagaactggagaatcaggtcggatctttgaaggaacagcaccttcgcgatagcgccgatctgaagacccttttatcaaaggcagaaaaccaggccaaggacgtgcagaaggagtacgagaagacacagaccgttttgtctgaattaaaactgaaatttgaaatgacagaacaggagaagcagtcaatcaccgacgagctgaaacagtgcaagaataacctcaagttgctgagagagaaagggaataacaagccctggccctggatgccgatgctggcagctctagtagctgtaacagcgattgttctctacgtcccaggactcgcccgtgcttccccctag

SEQ ID NO: 115688 - DNA, 2487 bp, Artificial Sequence
  derived and/or modified sequence
atgccctctgctctcgcgatcttcacctgcagacctaatagccacccctttcaagagcgccacgtttacctggatgagccgataaagataggcagaagtgtcgcccgatgccgccctgctcaaaacaacgctaccttcgactgcaaggttcttagcaggaatcatgccttggtgtggtttgaccataagaccgggaagttttacctgcaggacaccaagtcttccaatggtacttttattaactcccaacggctgagccgcggatccgaggagtctccaccctgtgaaatccttagtggagatataattcagtttggtgtcgacgtcacagaaaatacccggaaggtgactcacggctgtatagtgtcaaccattaaactcttcctcccagatgggatggaagccagactgcgatccgacgtgatccacgctccactgcccagcccagtcgacaaagtggcagcaaacaccccttctatgtattctcaggaactattccagcttagccaatatttacaggaagccctccaccgcgaacaaatgctcgaacagaagttggcaactttacaaagactgctagcgattacccaggaagccagcgacacttcctggcaggcactcatagatgaggatcgactgctctctcgactcgaggtgatggggaatcagttgcaagcatgctccaagaaccaaactgaagacagccttagaaaagagctgattgcgttacaggaggataaacataattacgagaccacagcaaaagagtccctccgcagggtccttcaggaaaagattgaagtggtccggaagctatcagaggtagaaaggtccttgtcaaacacagaggatgagtgtacccatctgaaggaaatgaacgagcgaacccaggaagaactgcgggagcttgctaacaaatacaatggtgccgtgaatgagataaaggacttgagcgataaattaaaagtggccgagggcaagcaggaagaaatccaacagaaagggcaagccgaaaagaaagaactccagcacaagattgatgagatggaggagaaggagcaggagctgcaggcaaaaatcgaggcactgcaggcagacaatgattttacaaacgaaagactgacggctctgcaggttcgcttggagcacctccaggagaagactctcaaggagtgtagcagccttgaacacttgctttcaaagtcaggaggagactgtacttttatacatcaattcatagaatgtcagaaaaaactgatagtggagggacacctgacaaaggcagttgaggagaccaaactctccaaggaaaatcaaactcgagccaaggaatctgatttctcagataccttgtccccctctaaggaaaaaagctccgacgacaccaccgacgcacagatggatgaacaggatctgaacgagccattagccaaggtcagcttgctaaaggacgaccttcagggggctcaatccgaaatcgaagctaaacaggaaattcagcatttaagaaaagagctgattgaggcacaggaactcgccagaacatctaaacagaaatgttttgaattgcaggccctgctggaggaggagcggaaggcctacagaaaccaggttgaggagagcaccaagcagattcaggttttgcaggctcagttacagcggctccatatcgatactgagaatctgagagaggaaaaagattcagagatcacctcgacgcgggatgagctgctctcagccagggatgagattcttttacttcaccaggcggcagctaaagtggcctccgagcgggataccgacatcgcatctctgcaagaggagcttaagaaggttagggcggagctggagaggtggaggaaggcagcctcggagtatgaaaaagaaataacatctctgcaaaattccttccagttgaggtgccaacaatgcgaggatcagcagagggaggaagccacccgcctgcagggtgagctggaaaagctccgaaaggagtggaatgccctcgaaaccgagtgccactctctgaagagagagaatgttctcctgtcctccgagttgcagaggcaagagaaggagttgcataacagccaaaagcaaagtctggaactgacgtcagatctgagtatcctccagatgagtcggaaggaactagagaaccaggtcgggtccctgaaggaacagcacctgcgggactccgccgacctgaagactcttctgagcaaagctgaaaatcaggccaaagatgttcagaaggaatacgagaagacacaaactgtactgtccgagctgaagctgaaatttgaaatgacagagcaggaaaagcagtccataacagacgaactgaaacagtgtaaaaataatctgaagctgctgagggagaaaggcaacaataagccctggccatggatgcctatgctggccgctcttgttgctgtgaccgctatcgtgctttatgtgccaggcctcgctagagccagtccctag

SEQ ID NO: 115689 - DNA, 4132 bp, Artificial Sequence
  derived and/or modified sequence
ggtgggataggggcataggcttgtgaagggcagtccggatccggaggaactcctctttgtccctggtaggagagacacccccagtctatcctcgatgccgtcagccttggccatcttcacttgccgcccgaactcgcacccgtttcaggagcgtcatgtctacctggacgagcccatcaaaatcggccgctcagtggcccgctgtcgaccagcgcagaataatgccacttttgattgcaaagtgctatcaaggaaccacgctctcgtctggtttgatcacaagacgggcaagttttatcttcaagacactaaaagtagtaatggtacttttataaatagccagagattgagtcgaggctctgaagaaagtccaccatgtgaaattctttccggtgacattatccagtttggagtagacgtgacagagaatacacggaaagttacccatgggtgtattgtttccacaataaaactttttctaccagatggtatggaagcccggctccgctcagatgtcatccatgcaccattaccaagtcctgttgacaaagttgctgctaacactccaagtatgtactctcaggaactattccagctttctcagtatctacaggaggccttacatcgggaacaaatgttggaacagaagttagccacgcttcagcggctactagccatcacccaagaggcttcagataccagttggcaggctttaatagatgaagatagactcttatcacggttagaagttatgggaaaccaattacaggcatgctccaaaaatcaaacagaagatagtttacgaaaggaacttatagcattacaagaggataaacataactatgagacaacagccaaagagtccctgaggcgggttcttcaggagaaaattgaagtggttagaaaactttcagaagttgagcgaagtctgagtaatactgaagatgaatgtacccatctgaaagaaatgaatgaaaggactcaggaagaattaagagaattagccaacaaatataatggagcagttaatgagattaaagatttatctgataaattaaaggtagcagagggaaaacaagaggaaatccaacagaagggacaggctgagaaaaaagaattacaacataaaatagatgaaatggaagaaaaagaacaggagctccaggcaaaaatagaagctttgcaagctgataatgatttcaccaatgaaaggctaacagctttacaagtacggttagaacatcttcaggagaaaactcttaaagaatgcagcagcttggagcacttgctttcaaagagtggcggggactgcacttttattcatcaattcatagaatgccagaagaagctgatcgtcgaagggcatctaaccaaagcggtagaagaaacaaagctttcaaaagaaaatcagacaagagcaaaagaatctgatttttcagatactctgagtccaagcaaggaaaaaagcagtgacgacactacagacgcccaaatggatgagcaagacctaaatgagcctcttgccaaagtgtcccttttaaaagatgacttgcagggtgcacagtcagaaattgaggcaaagcaagaaatacagcatcttcgaaaggaattgatcgaagcccaggagctagctagaacaagtaaacaaaaatgctttgaacttcaagctcttttggaagaagaaagaaaagcctatcgaaatcaagttgaggaatccactaaacaaatacaggttcttcaagcccaattgcagaggttacacatcgatactgagaatctccgggaggagaaggacagtgaaatcacaagtactagagatgaattgcttagtgcccgagatgaaattttgctccttcatcaagcagcagcaaaggttgcctctgagcgggacactgacattgcttctttacaagaagagcttaagaaggtgagagctgagcttgagcggtggcggaaagcagcgtctgaatatgagaaagaaatcacaagtctgcaaaacagttttcagcttagatgtcaacagtgtgaggaccagcagagagaagaagcaacaaggttgcaaggtgaactagagaagttgagaaaggaatggaatgcattggaaaccgaatgccattctctaaaaagggaaaatgttttgctatcatcagaactgcaacggcaagaaaaagaattgcacaattctcagaagcagagtttagagcttaccagtgatctcagcatccttcaaatgtctaggaaagaacttgagaatcaagtgggatccttgaaagaacagcatcttcgggattcagctgatttaaaaactcttctcagtaaggcagaaaaccaagcaaaggatgtgcagaaagagtatgaaaagacacagactgtactctcagaactgaagttgaagtttgaaatgactgagcaggaaaagcagtcaatcacagatgagctcaaacagtgtaaaaacaacctgaagctgctccgagagaaaggaaataataaaccctggccctggatgcccatgttggctgccctggttgcagtaacagccatcgtgctgtacgtgccaggtctggccagagcttctccatgagagcgttccttgagtccgtacaccgtcctccctctagaagctggcatcacactcatgctggggacaaacagaaccattttcttcctctttacctcttaaaacagcagaagtacaagaatacagctgtagggtcattgctttaaattatataaaatgtatctgtctataaagaagatataaaattgtgactttattctactgtaagcaataatttgcttgcaatttttcatgtaatttttaaattagtatgttaagattctgaatattatggtggcctaaagtaggcttcttggtacaccagattatttataacattaaatttatgagtattttactctgaattctgatcaccagataattcatttttctgatttgataactacccaaaccaaacaaccaatacatacatgggaagagaggccctgtgtgctcagtgcctatcagtttgaaatatatacacatatatatattttttacatatttacgccatttttacttgttatgaaaccactgagctattgggaacaagacttagagacaactatttgcgtggatttttttttttttaaggaaaaatacgtttggaaaataaactgttatggtgataatttggggaatatgtgcacgcttgttcagccttaatgtgacttgaagatgtggaggacatcaactttgaaaaactttccatgagagtgtattttcttgagcaaactgaagtatttctgggagcaaaaacatagtaattacacaatttcagtgcagtcaaccaaaatgttgagtcaattggaatgtaatttattaaaccatgtatttaaagagatatttttctttaaaagccaagttactttctcatatacagcattttaggaagcatgattttttttttctatcatctattcctccaagcatgtttaattgaagaaagtattaatatctctttagataagcttgtattgacctaatttggtttatgatgtgtcagagctaattcatgttcagggtgagcgttgtacctaccaacaaatttcctggttgggtatgcaaatggttattttctttttattgttgttaattgggactttctgttaatgaaaagcactattcccaagattaatagtgttctatgcacaatgaagcacctaaaaacactgcttgatattataaatttaaaacacaagtgaaagtttagccatggttttgtgcggcatcatagttatgtcaataaagtttatttaggtcatagaatatcctaaagtatcacatagttaaatttttcagtcagtgaagaccgggagggaatgtcagtgaattggcttgaatgttctgtggcaatccacaggtctagccaaatattgaaataggagtttagggtataatttgccttgtgatgtttggcagtcactgtttatactttaaaggttatattttaagctatttgagattgcttttgggaagatcactagatttatggaggaattagtcacaaatgacttgtagaaaatactgtcatatagttcatttcatcattttctgttgcaggaagccactcca

SEQ ID NO: 115690 - protein, 790 aa, Artificial Sequence
  derived and/or modified sequence
MPSALAIFTCRPNSHPFQERHVYLDEPIKIGRSVARCRPAQNNATFDCKVLSRNHALVWFDHKTGKFYLQDTKSSNGTFINSQRLSRGSEESPPCEILSGDIIQFGVDVTENTRKVTHGCIVSTIKLFLPDGMEARLRSDVIHAPLPSPVDKVAANTPSMYSQELFQLSQYLQEALHREQMLEQKLATLQRLLAITQEASDTSWQALIDEDRLLSRLEVMGNQLQACSKNQTEDSLRKELIALQEDKHNYETTAKESLRRVLQEKIEVVRKLSEVERSLSNTEDECTHLKEMNERTQEELRELANKYNGAVNEIKDLSDKLKVAEGKQEEIQQKGQAEKKELQHKIDEMEEKEQELQAKIEALQADNDFTNERLTALQEKLIVEGHLTKAVEETKLSKENQTRAKESDFSDTLSPSKEKSSDDTTDAQMDEQDLNEPLAKVSLLKDDLQGAQSEIEAKQEIQHLRKELIEAQELARTSKQKCFELQALLEEERKAYRNQVEESTKQIQVLQAQLQRLHIDTENLREEKDSEITSTRDELLSARDEILLLHQAAAKVASERDTDIASLQEELKKVRAELERWRKAASEYEKEITSLQNSFQLRCQQCEDQQREEATRLQGELEKLRKEWNALETECHSLKRENVLLSSELQRQEKELHNSQKQSLELTSDLSILQMSRKELENQVGSLKEQHLRDSADLKTLLSKAENQAKDVQKEYEKTQTVLSELKLKFEMTEQEKQSITDELKQCKNNLKLLREKGNNKPWPWMPMLAALVAVTAIVLYVPGLARASP

SEQ ID NO: 115691 - protein, 451 aa, Artificial Sequence
  derived and/or modified sequence
MEEKEQELQAKIEALQADNDFTNERLTALQENQTRAKESDFSDTLSPSKEKSSDDTTDAQMDEQDLNEPLAKVSLLKDDLQGAQSEIEAKQEIQHLRKELIEAQELARTSKQKCFELQALLEEERKAYRNQVEESTKQIQVLQAQLQRLHIDTENLREEKDSEITSTRDELLSARDEILLLHQAAAKVASERDTDIASLQEELKKVRAELERWRKAASEYEKEITSLQNSFQLRCQQCEDQQREEATRLQGELEKLRKEWNALETECHSLKRENVLLSSELQRQEKELHNSQKQSLELTSDLSILQMSRKELENQVGSLKEQHLRDSADLKTLLSKAENQAKDVQKEYEKTQTVLSELKLKFEMTEQEKQSITDELKQCKNNLKLLREKGNNPSILQPVPRIHRPIPGFPVLVFRSIVVEQKPWPWMPMLAALVAVTAIVLYVPGLARASP

SEQ ID NO: 115692 - DNA, 2373 bp, Artificial Sequence
  derived and/or modified sequence
atgcccagcgccctggccatcttcacctgcagacccaacagccaccccttccaggagagacacgtgtacctggacgagcccatcaagatcggcagaagcgtggccagatgcagacccgcccagaacaacgccaccttcgactgcaaggtgctgagcagaaaccacgccctggtgtggttcgaccacaagaccggcaagttctacctgcaggacaccaagagcagcaacggcaccttcatcaacagccagagactgagcagaggcagcgaggagagccccccctgcgagatcctgagcggcgacatcatccagttcggcgtggacgtgaccgagaacaccagaaaggtgacccacggctgcatcgtgagcaccatcaagctgttcctgcccgacggcatggaggccagactgagaagcgacgtgatccacgcccccctgcccagccccgtggacaaggtggccgccaacacccccagcatgtacagccaggagctgttccagctgagccagtacctgcaggaggccctgcacagagagcagatgctggagcagaagctggccaccctgcagagactgctggccatcacccaggaggccagcgacaccagctggcaggccctgatcgacgaggacagactgctgagcagactggaggtgatgggcaaccagctgcaggcctgcagcaagaaccagaccgaggacagcctgagaaaggagctgatcgccctgcaggaggacaagcacaactacgagaccaccgccaaggagagcctgagaagagtgctgcaggagaagatcgaggtggtgagaaagctgagcgaggtggagagaagcctgagcaacaccgaggacgagtgcacccacctgaaggagatgaacgagagaacccaggaggagctgagagagctggccaacaagtacaacggcgccgtgaacgagatcaaggacctgagcgacaagctgaaggtggccgagggcaagcaggaggagatccagcagaagggccaggccgagaagaaggagctgcagcacaagatcgacgagatggaggagaaggagcaggagctgcaggccaagatcgaggccctgcaggccgacaacgacttcaccaacgagagactgaccgccctgcaggagaagctgatcgtggagggccacctgaccaaggccgtggaggagaccaagctgagcaaggagaaccagaccagagccaaggagagcgacttcagcgacaccctgagccccagcaaggagaagagcagcgacgacaccaccgacgcccagatggacgagcaggacctgaacgagcccctggccaaggtgagcctgctgaaggacgacctgcagggcgcccagagcgagatcgaggccaagcaggagatccagcacctgagaaaggagctgatcgaggcccaggagctggccagaaccagcaagcagaagtgcttcgagctgcaggccctgctggaggaggagagaaaggcctacagaaaccaggtggaggagagcaccaagcagatccaggtgctgcaggcccagctgcagagactgcacatcgacaccgagaacctgagagaggagaaggacagcgagatcaccagcaccagagacgagctgctgagcgccagagacgagatcctgctgctgcaccaggccgccgccaaggtggccagcgagagagacaccgacatcgccagcctgcaggaggagctgaagaaggtgagagccgagctggagagatggagaaaggccgccagcgagtacgagaaggagatcaccagcctgcagaacagcttccagctgagatgccagcagtgcgaggaccagcagagagaggaggccaccagactgcagggcgagctggagaagctgagaaaggagtggaacgccctggagaccgagtgccacagcctgaagagagagaacgtgctgctgagcagcgagctgcagagacaggagaaggagctgcacaacagccagaagcagagcctggagctgaccagcgacctgagcatcctgcagatgagcagaaaggagctggagaaccaggtgggcagcctgaaggagcagcacctgagagacagcgccgacctgaagaccctgctgagcaaggccgagaaccaggccaaggacgtgcagaaggagtacgagaagacccagaccgtgctgagcgagctgaagctgaagttcgagatgaccgagcaggagaagcagagcatcaccgacgagctgaagcagtgcaagaacaacctgaagctgctgagagagaagggcaacaacaagccctggccctggatgcccatgctggccgccctggtggccgtgaccgccatcgtgctgtacgtgcccggcctggccagagccagcccctag

SEQ ID NO: 115693 - DNA, 1356 bp, Artificial Sequence
  derived and/or modified sequence
atggaggagaaggagcaggagctgcaggccaagatcgaggccctgcaggccgacaacgacttcaccaacgagagactgaccgccctgcaggagaaccagaccagagccaaggagagcgacttcagcgacaccctgagccccagcaaggagaagagcagcgacgacaccaccgacgcccagatggacgagcaggacctgaacgagcccctggccaaggtgagcctgctgaaggacgacctgcagggcgcccagagcgagatcgaggccaagcaggagatccagcacctgagaaaggagctgatcgaggcccaggagctggccagaaccagcaagcagaagtgcttcgagctgcaggccctgctggaggaggagagaaaggcctacagaaaccaggtggaggagagcaccaagcagatccaggtgctgcaggcccagctgcagagactgcacatcgacaccgagaacctgagagaggagaaggacagcgagatcaccagcaccagagacgagctgctgagcgccagagacgagatcctgctgctgcaccaggccgccgccaaggtggccagcgagagagacaccgacatcgccagcctgcaggaggagctgaagaaggtgagagccgagctggagagatggagaaaggccgccagcgagtacgagaaggagatcaccagcctgcagaacagcttccagctgagatgccagcagtgcgaggaccagcagagagaggaggccaccagactgcagggcgagctggagaagctgagaaaggagtggaacgccctggagaccgagtgccacagcctgaagagagagaacgtgctgctgagcagcgagctgcagagacaggagaaggagctgcacaacagccagaagcagagcctggagctgaccagcgacctgagcatcctgcagatgagcagaaaggagctggagaaccaggtgggcagcctgaaggagcagcacctgagagacagcgccgacctgaagaccctgctgagcaaggccgagaaccaggccaaggacgtgcagaaggagtacgagaagacccagaccgtgctgagcgagctgaagctgaagttcgagatgaccgagcaggagaagcagagcatcaccgacgagctgaagcagtgcaagaacaacctgaagctgctgagagagaagggcaacaaccccagcatcctgcagcccgtgcccagaatccacagacccatccccggcttccccgtgctggtgttcagaagcatcgtggtggagcagaagccctggccctggatgcccatgctggccgccctggtggccgtgaccgccatcgtgctgtacgtgcccggcctggccagagccagcccctag

SEQ ID NO: 115694 - DNA, 2373 bp, Artificial Sequence
  derived and/or modified sequence
atgccaagtgcactcgccatatttacgtgtaggcccaatagccacccatttcaggaacgccatgtgtacctagacgagcccataaagattgggaggtctgtggctcgttgtcgtccagctcagaataacgcaacgtttgattgtaaggttctttcccggaaccacgctctggtctggttcgatcataagacggggaaattttatctacaggatacaaagtcgtccaacgggactttcattaattcacagcggttgtcgaggggttcagaggaatccccaccgtgtgagattctcagcggcgatattatacagtttggcgtggatgtgactgagaatacccggaaggtgacacacgggtgcatcgtctcaacgatcaagctctttctgcccgacggcatggaagcccggttgaggagtgacgtgatccatgcaccgctccccagcccagtcgataaggtggcagctaacaccccttcaatgtattcgcaagaactgtttcagctctctcaatacctacaggaggccctccacagggaacagatgctggagcagaaactcgctaccctgcagcggctgctggccataacacaggaggcctctgacacttcttggcaagccctgatcgatgaggaccggctcctgagcaggctggaagttatgggaaaccagttgcaggcatgttctaaaaatcagactgaggactcactgcgcaaggagctgattgcactccaagaggacaagcataactatgagacaactgcaaaggaaagcctccgtagggtactgcaggagaagattgaggttgtgcgcaagctcagtgaagtcgaacggtccctatcaaacaccgaggacgagtgcacgcacttgaaggaaatgaacgagagaacccaagaggagctgagggaactagctaacaaatataatggagcagtgaatgagatcaaggacttgagcgataagcttaaggtcgccgaaggtaagcaagaagagattcaacagaagggacaggcagagaagaaagagttacagcataagatcgatgaaatggaggaaaaggaacaagagctccaggctaagatcgaggcgcttcaggcagacaacgatttcactaatgagcggctgactgctctgcaagagaagctgatcgtggagggacacctgaccaaagcagtcgaggagaccaaactgtccaaggaaaaccaaacacgcgcaaaggaatcggacttttcagatacattaagcccatctaaggaaaagtcttccgacgacacaaccgatgctcagatggatgagcaggacttgaatgaacccctagccaaggttagcctgctcaaagacgatcttcagggcgctcagtcagaaatcgaagcaaagcaggagatacaacacctgcggaaggagctaatagaggcccaggagctggcgcgaacctctaaacagaaatgttttgagctccaagccttgttggaagaggaaagaaaggcctatcggaatcaggtcgaagagagtacaaagcagatccaggtgctccaagcccaactgcaaagactccacattgacactgaaaacctccgtgaagagaaggatagcgagattactagcacaagggacgaacttctgagtgcccgcgacgagatcctgttactgcatcaggccgcagccaaggtcgcgtctgagagagacacggacattgcttcactccaggaggaactcaagaaagttagagccgagctagaacggtggcgtaaggccgcaagcgagtacgagaaagaaattaccagcttgcaaaatagctttcagcttcggtgccaacaatgcgaagatcagcagagagaggaggcgactagactgcagggtgagctggaaaagcttagaaaagagtggaatgcgttggaaacagagtgccatagtttaaaacgggagaacgtattgctttcgtccgagctgcagcgtcaggagaaggagctgcacaatagccagaagcagagtcttgaacttacttccgaccttagcatattgcaaatgagcaggaaagagcttgaaaatcaggtcggctcactgaaggagcagcacctgagggactctgcagatctaaaaacactcctgtcaaaagccgagaatcaagcgaaggatgttcagaaggagtatgaaaagacgcaaaccgttctgagtgaactgaagctaaagtttgagatgacagagcaggaaaagcagtctattaccgacgagctgaaacaatgtaagaataacctaaaactcctccgtgaaaaaggtaacaataagccgtggccttggatgcctatgcttgcagccctggtcgctgtcacagccatcgttctttacgtgccaggactcgcccgagcctcgccatag

SEQ ID NO: 115695 - DNA, 1356 bp, Artificial Sequence
  derived and/or modified sequence
atggaagagaaggagcaagaactgcaggccaagatagaggcgcttcaagcagataatgactttaccaacgaacgactcactgctcttcaagagaaccagacacgcgctaaagagtctgattttagcgatacactcagcccttcaaaagagaaatcttcagacgacacaaccgacgcacagatggatgaacaggacctcaatgaaccgctggcaaaggtttccttgctgaaggacgacctccagggcgcccagtccgagattgaagctaagcaagagatccaacacttgcgtaaagagctgattgaggcgcaggagcttgcaagaacaagcaaacagaagtgtttcgaactccaggcactgcttgaggaagaaagaaaagcttaccggaaccaggtcgaggagtctaccaagcagatccaggttctgcaggcccagctgcagaggctgcatatcgatacagaaaatttgcgagaggagaaggactccgagatcacctccacaagagacgaactgttgtccgcccgcgacgagatcctgttattacaccaagcggccgcgaaggtggctagcgagagagatacagacatagcctctctgcaggaagagctgaaaaaagtgcgcgcggaacttgaacgttggaggaaagcagccagtgagtatgaaaaggagattaccagtctgcagaacagttttcagctccggtgccagcaatgcgaggatcaacaacgcgaagaggctactcgtttgcagggagagctcgaaaaactccggaaggagtggaatgcgcttgaaacagaatgtcattccctaaagcgagagaatgttctgctgagcagtgagttgcaaaggcaggagaaggaattacacaattcccaaaaacagtccctcgagctgacatccgacctgtcgatactccagatgtcccggaaagaactggagaaccaggtggggagtttgaaagaacagcatttgagggactcggctgatctcaagactcttttgtccaaggccgagaaccaggccaaggacgtgcagaaggagtatgagaagactcagactgtgctgtcagagctcaagctcaagttcgaaatgaccgagcaggagaaacagtctatcacagatgaactcaagcagtgtaagaataatctgaaactgctaagggagaaagggaataatccttccattctgcagcccgtcccacgaatccaccgacctatccccggcttccccgtactcgtgttcagaagcattgtggttgaacagaagccgtggccctggatgcccatgctggctgctttggtcgccgtcactgctatagttctttacgtgccaggactagcacgagcatccccttag

SEQ ID NO: 115696 - DNA, 2373 bp, Artificial Sequence
  derived and/or modified sequence
atgcccagcgccctggccatcttcacctgccggcccaacagccaccccttccaggagagacatgtgtacctggatgagcccatcaagattggccgctctgtggcccgctgcaggcctgcccagaacaatgccacctttgactgcaaggtgctgagcagaaatcatgccctggtgtggtttgaccacaagacaggcaagttctacctgcaggacaccaagagcagcaatggcaccttcatcaacagccagaggctgagccggggcagcgaggagagccccccctgtgagatcctgagcggggacatcatccagtttggagtggatgtgacagagaacaccaggaaggtgacccacggctgcatcgtgtccaccatcaagctgttcctgcctgatggcatggaggcccggctgcggagtgatgtgattcatgcccccctgcccagccctgtggacaaggtggccgccaacacccccagcatgtacagccaggagctgttccagctgagccagtacctgcaggaggccctgcaccgggagcagatgctggagcagaagctggccaccctgcagaggctgctggccatcacccaggaggccagtgacacctcctggcaggccctgattgatgaggaccggctgctgagccggctggaggtgatgggcaaccagctgcaggcctgcagcaagaaccagacagaggacagcctgaggaaggagctgattgccctgcaggaggacaagcacaactatgagaccacagccaaggagagcctgcggcgggtgctgcaggagaagattgaggtggtgaggaagctgtctgaggtggagaggagcctgagcaacacagaagatgaatgtacccacctgaaggagatgaatgaaagaacccaggaggagctgcgggagctggccaacaagtacaacggggctgtgaatgagatcaaggacctgagtgacaagctgaaggtggccgagggcaagcaggaggagatccagcagaagggccaggccgagaagaaggagctgcagcacaagattgatgagatggaggagaaggagcaggagctgcaggccaagattgaggccctgcaggccgacaatgacttcaccaatgaaaggctgacagccctgcaggagaagctgattgtggagggccacctgaccaaggctgtggaggagaccaagctgagcaaagaaaaccagacccgggccaaggagagtgacttcagtgacaccctgagccccagcaaggagaagagcagtgatgacaccacagatgcccagatggatgagcaggacctgaatgagcccctggccaaggtgtccctgctgaaggatgacctgcagggcgcccagagcgagattgaggccaagcaggagatccagcacctgaggaaggagctgattgaggcccaggagctggcccggaccagcaagcagaagtgctttgagctgcaggccctgctggaggaggagaggaaggcctacagaaaccaggtggaggagagcaccaagcagatccaggtgctgcaggcccagctgcagaggctgcacatcgacacagagaacctgcgggaggagaaggacagcgagatcaccagcaccagagatgagctgctgagcgccagagatgagatcctgctgctgcaccaggccgccgccaaggtggccagcgagcgggacacagacatcgccagcctgcaggaggagctgaagaaggtgcgggcagagctggagcgctggaggaaggccgcctctgaatatgagaaggagatcaccagcctgcagaacagcttccagctgcgctgccagcagtgtgaggaccagcagcgggaggaggccacccggctgcagggcgagctggagaagctgaggaaggagtggaatgccctggagacagagtgccacagcctgaagagagaaaatgtgctgctgagcagcgagctgcagaggcaggagaaggagctgcacaacagccagaagcagagcctggagctgaccagtgacctgagcatcctgcagatgagcaggaaggagctggagaaccaggtgggcagcctgaaggagcagcacctgcgggacagcgctgacctgaagaccctgctgagcaaggccgagaaccaggccaaggatgtgcagaaggagtatgagaagacccagacagtgctgtctgagctgaagctgaagtttgagatgacagagcaggagaagcagagcatcacagatgagctgaagcagtgcaagaacaacctgaagctgctgcgggagaagggcaacaacaagccctggccctggatgcccatgctggccgccctggtggccgtgacagccatcgtgctgtatgtgcccggcctggcccgggccagcccctag

SEQ ID NO: 115697 - DNA, 1356 bp, Artificial Sequence
  derived and/or modified sequence
atggaggagaaggagcaggagctgcaggccaagattgaggccctgcaggccgacaatgacttcaccaatgaaaggctgacagccctgcaggagaaccagacccgggccaaggagagtgacttcagtgacaccctgagccccagcaaggagaagagcagtgatgacaccacagatgcccagatggatgagcaggacctgaatgagcccctggccaaggtgtccctgctgaaggatgacctgcagggcgcccagagcgagattgaggccaagcaggagatccagcacctgaggaaggagctgattgaggcccaggagctggcccggaccagcaagcagaagtgctttgagctgcaggccctgctggaggaggagaggaaggcctacagaaaccaggtggaggagagcaccaagcagatccaggtgctgcaggcccagctgcagaggctgcacatcgacacagagaacctgcgggaggagaaggacagcgagatcaccagcaccagagatgagctgctgagcgccagagatgagatcctgctgctgcaccaggccgccgccaaggtggccagcgagcgggacacagacatcgccagcctgcaggaggagctgaagaaggtgcgggcagagctggagcgctggaggaaggccgcctctgaatatgagaaggagatcaccagcctgcagaacagcttccagctgcgctgccagcagtgtgaggaccagcagcgggaggaggccacccggctgcagggcgagctggagaagctgaggaaggagtggaatgccctggagacagagtgccacagcctgaagagagaaaatgtgctgctgagcagcgagctgcagaggcaggagaaggagctgcacaacagccagaagcagagcctggagctgaccagtgacctgagcatcctgcagatgagcaggaaggagctggagaaccaggtgggcagcctgaaggagcagcacctgcgggacagcgctgacctgaagaccctgctgagcaaggccgagaaccaggccaaggatgtgcagaaggagtatgagaagacccagacagtgctgtctgagctgaagctgaagtttgagatgacagagcaggagaagcagagcatcacagatgagctgaagcagtgcaagaacaacctgaagctgctgcgggagaagggcaacaaccccagcatcctgcagcctgtgccccgcatccaccggcccatccctggcttccctgtgctggtgttccgcagcatcgtggtggagcagaagccctggccctggatgcccatgctggccgccctggtggccgtgacagccatcgtgctgtatgtgcccggcctggcccgggccagcccctag

SEQ ID NO: 115698 - DNA, 2373 bp, Artificial Sequence
  derived and/or modified sequence
atgcccagcgccctggccatcttcacctgccggcccaacagccaccctttccaggagagacacgtctacctcgacgaaccaatcaagataggtaggagcgtggcgaggtgtcgtcctgcacagaacaacgcgacattcgactgtaaggtattgtcaaggaaccatgccctggtttggtttgatcacaagactggtaaattctacctgcaagacacgaagtcgagcaatggaacattcatcaactcacagcgcctgtcgcggggctctgaggagtcccctccatgcgagattctttctggcgatattatccagtttggggtggatgtgacagaaaacacaaggaaagtgactcacgggtgtatcgtgagcaccataaagctatttttgcctgacggcatggaagcacgcctgcggagcgacgttatacatgcaccgctcccctctcctgtcgacaaggttgccgccaacacaccctccatgtatagtcaggaactattccagctgtcccagtatctgcaagaggcactacaccgagaacagatgctcgagcaaaagttggctacactgcagcgtctactggctattactcaggaggcttctgacacgagctggcaggctttgattgatgaggatcgcttactctctaggttggaagtcatgggcaaccagctccaagcttgtagcaaaaatcagacagaggattcactccggaaggagctaatcgccctacaggaggataaacataactacgaaacgactgctaaagagagtcttaggagggttcttcaggagaaaatcgaggtggttaggaaattaagcgaggttgaaaggtcactgagcaacacagaagatgagtgtacccacctcaaagaaatgaatgagaggacccaggaggagctgagggagttggccaataagtataacggagctgtcaacgaaatcaaggatttaagtgacaagcttaaggtggcagagggcaagcaggaggaaatccagcagaagggccaggcggaaaaaaaagaattgcagcataagattgatgaaatggaggagaaagaacaggaactccaggccaagatagaagctctgcaagctgataacgatttcactaacgagcgcctcaccgcccttcaagagaagctcatcgtagaagggcatctgaccaaagccgtcgaagagacaaagctttcaaaggaaaatcagaccagggctaaagaaagcgattttagtgatacattatcccccagcaaagaaaagtccagtgatgataccacagatgcacagatggatgagcaggatcttaacgaaccactagccaaagtgagcctccttaaagacgatctccagggggcccagtcagaaattgaggccaagcaagaaatccagcacctgcggaaggagctgattgaagcccaggagctggccaggacctccaaacagaagtgtttcgaactccaggccctgctagaggaggagaggaaagcctatcgaaaccaggtcgaggagtcaactaaacagatccaggttctccaagcccagctgcagcgcctccacatcgacaccgaaaatttgcgcgaggagaaagactcagaaatcacatctaccagagatgaactgctgtctgcccgggatgagatactgctgctgcatcaagccgcggcaaaagttgcttcagagagagacactgatatcgccagcctccaagaggagcttaagaaggtccgggccgagcttgagagatggcgaaaggctgcctctgagtacgagaaagagataacctcactccagaacagctttcagctgagatgccagcaatgtgaagatcaacaacgggaggaggccacacgcctccagggagagctcgagaagctgcggaaagaatggaacgcccttgagacagagtgccacagcttgaaaagagagaatgttcttctgagttcagagcttcagcggcaggaaaaggaattacataactcccaaaaacaatcgctcgagctaaccagcgatctttctatacttcagatgagccggaaggagctggagaatcaggtcgggtccctcaaagaacagcaccttcgggacagtgccgatctaaagacactcttgtctaaggcagaaaatcaagcaaaagatgtgcagaaagagtacgagaagacccagaccgtcctaagcgagctaaagctgaaatttgaaatgaccgaacaggagaaacagtccatcactgacgagctgaagcagtgcaagaacaacctgaagcttttgcgggaaaaaggtaataacaagccctggccatggatgcctatgctcgctgcactcgtggccgtgacagccatcgttttgtacgttccaggactggcccgggcctcgccgtag

SEQ ID NO: 115699 - DNA, 1356 bp, Artificial Sequence
  derived and/or modified sequence
atggaggagaaggagcaggagctgcaggccaagatcgaggccctgcaggcagataacgactttaccaatgagaggctgactgctttgcaagagaaccagacccgtgctaaagaaagcgacttttctgacacattatccccctccaaggaaaaaagctccgatgacaccactgatgcgcagatggacgaacaagacctgaacgagccactggccaaggttagtctgctgaaggatgatttgcaaggcgcgcaaagtgagattgaagccaaacaggagattcagcacctacgtaaagaactgatcgaggcacaagaattggctaggacttctaaacagaagtgcttcgaactgcaggcattgctggaagaagaacgtaaggcatatcggaaccaagtggaggaatctaccaaacagatccaggtactgcaagcccagctccaacgcctccacattgacacggagaacctccgggaagagaaggattctgaaattacgagtacaagagacgagctgctcagcgctagagacgaaatcctcctactgcaccaggctgccgcaaaggtcgcttctgagagagacacagatatcgcctccctccaagaggaacttaaaaaggttagggccgaactcgagcggtggcgcaaggccgcatctgagtatgaaaaagagataacaagtttgcagaactcctttcagttgagatgtcagcagtgcgaagaccagcagagagaggaagccacgcgattgcagggagaactcgaaaagctgcgcaaagaatggaacgcgctcgaaaccgagtgccactcattgaagagagaaaacgtcctcctgagctcggaactgcagcggcaagaaaaagaactccataacagtcaaaagcagtcattagagctaactagcgacctgtctatcctccagatgtcacgcaaggagttggagaatcaagtcggatccctgaaagaacaacacctaagggactcggccgaccttaagactctgctgagcaaagcagagaatcaggcaaaggatgtccagaaggagtatgagaagacccagacagtgctcagtgagttaaagctgaagttcgagatgactgaacaagagaagcaatcaataacagatgaactcaaacagtgcaaaaataaccttaagctgctccgagagaagggaaataatccctccattctgcagcccgtacccaggatccataggcctatcccgggcttcccagtgctggtgttcagaagtatagtagtcgagcagaaaccttggccatggatgccaatgctggctgcgctggtagccgtgaccgctattgtgctatacgtccccgggctggcacgtgcttcaccatag

SEQ ID NO: 115700 - DNA, 2373 bp, Artificial Sequence
  derived and/or modified sequence
atgccaagtgccctggccatatttacctgcaggcctaactcacacccgttccaggaacgacacgtttacttagatgaacctataaagattggaaggagcgtcgccaggtgccgcccagctcagaacaacgccacatttgattgcaaagtgctgtctagaaatcacgcattggtctggtttgaccacaagactgggaaattctatctccaagataccaagtcttccaatgggacattcattaattcccagcgcctgtcaagggggtctgaagaatcacccccttgtgagatcctcagcggtgatatcatccagtttggggttgatgtcaccgagaatactcggaaggtgacgcacgggtgcattgtgagcaccataaaattatttttaccagacgggatggaggctcgacttcgctccgacgtcattcatgccccacttccttcccccgtggataaagtggctgccaatacgccatcaatgtactcacaggagctgtttcaactttctcagtacttgcaggaggccctccatcgtgaacagatgcttgagcaaaagctggcaacgctgcagcgcctgctcgcaattacacaagaggcctccgatacctcctggcaagcgctaatagatgaggatcggctattgtcgcggctcgaggtcatggggaatcagctccaagcctgctccaagaatcagactgaggatagcttacggaaggagttgattgccctgcaggaggataaacataactacgaaaccaccgcgaaagaatccctccggagggtcttgcaggaaaagatcgaggtggtgcgaaaattatctgaggtggagagatcacttagcaacaccgaggatgagtgcactcacctgaaagaaatgaacgaaagaactcaagaggagctccgggaactggctaataagtataatggagcggtgaacgaaataaaggatctctcagacaagctgaaagttgcagaaggcaaacaagaagagattcagcaaaaagggcaagccgagaagaaggaacttcagcacaaaattgatgaaatggaagagaaagaacaagaactccaggccaagattgaggctctgcaggccgacaacgatttcacgaacgagcgcctgactgcactgcaggaaaaactgatcgtggagggccacctcaccaaagcagtagaggaaactaagctctcaaaggagaaccagacccgcgctaaagagtcggacttcagcgataccttatcaccctcaaaagagaaatccagtgacgatactactgacgctcagatggacgaacaggacttgaatgagcccctcgcaaaagtgtctctactaaaggacgacctgcaaggggctcagtccgagatcgaagcaaagcaggagattcagcatctgaggaaggagctgattgaggcacaagagctggctagaacatctaagcaaaaatgctttgaattacaggcccttctcgaagaagagcgaaaggcttacaggaaccaggtggaagagtctacgaagcagattcaagtcctccaggctcagttgcagaggctgcatattgataccgaaaatctccgggaggaaaaagacagtgagatcaccagcacacgcgacgagcttctgagtgctagagatgagattctcttacttcatcaggctgccgctaaggtcgcgtccgaacgagatacggacattgcctcattgcaggaggagttgaaaaaggtccgggcagagttggagcgatggcggaaagctgccagtgaatacgaaaaggagataacctccctgcagaatagcttccaactgcgatgtcagcagtgcgaagatcaacaacgcgaggaggcaacaaggcttcagggtgaactagagaagctcaggaaggagtggaatgctctggaaaccgaatgtcactcgctcaagagggagaacgttctgctgagcagtgagctgcagagacaggaaaaagagctgcacaacagccagaagcagagtctggagctgacatccgatctgagcatccttcagatgtctcggaaagagctggagaatcaagtggggtcgttaaaggaacagcacctccgcgactctgcggacctgaagacactgctgagcaaagcggagaatcaggcaaaagatgtgcagaaggaatacgaaaagacgcaaacagtgctgtctgaactaaagctcaagtttgagatgactgagcaagagaaacaaagcatcacagacgagctgaagcagtgcaagaataaccttaaactgctccgggaaaagggaaataacaaaccctggccatggatgccaatgctggcggcactggtagccgttaccgcaatcgtcctgtacgtgcccggactcgccagggccagtccctag

SEQ ID NO: 115701 - DNA, 1356 bp, Artificial Sequence
  derived and/or modified sequence
atggaggagaaggaacaggagttgcaagctaaaattgaggctctgcaggccgataacgattttacgaacgagaggctcaccgccctgcaggaaaatcaaacccgagctaaggaatcggatttttcagacacactgagccccagcaaagagaagagctcagatgacactacggatgcacagatggacgaacaggaccttaacgagcccctggccaaagtgagcctgctaaaagacgacttgcagggggcacaaagtgagatagaggcgaagcaagagattcagcaccttcgcaaggagctgattgaagcacaggagctggcgcgaactagcaagcagaaatgcttcgagctccaggcattattggaagaggagcggaaagcgtaccgaaatcaggtcgaggagagcactaaacagatccaggtcttgcaagcccagctgcaaagacttcacatcgatactgagaacttgagagaggagaaggactcagagattaccagcaccagggatgagttgttgtctgctcgggatgagattctgctactccaccaggccgcagctaaagtggccagcgagcgcgacaccgacatcgcttctcttcaagaagaactgaaaaaggttagggcagagctggagaggtggaggaaggccgctagtgagtatgagaaggagatcacctctctccaaaactcgtttcaattgagatgtcaacaatgtgaagaccagcaacgtgaggaagctacacgcctgcagggtgaactggaaaaattgcgaaaagaatggaatgcgctggagaccgagtgccatagtctcaagagggagaatgtcctgctgagtagcgagcttcaaagacaggaaaaggaactacataacagtcaaaagcagtccttggagttgacttcggatctgtccattctacaaatgtcccgtaaggaactggagaaccaggttggaagcctaaaagaacagcacttaagggactcagccgacctgaagacactgctgagcaaggccgaaaatcaggcgaaggacgtacagaaggaatacgagaaaacacagaccgtgctctccgaactgaagctcaaattcgagatgacggaacaagagaagcagtctatcactgacgaacttaaacagtgtaagaacaatcttaagctcctccgggaaaaaggtaataaccctagtatcctccaacctgtgccacggatccatcgaccgatccccggatttcctgttttggtgtttcggtcaatcgtggtggagcagaaaccatggccttggatgcctatgctggccgcactcgttgctgtgaccgctattgtactttatgtgcctggcctggcccgagcttctccctag

SEQ ID NO: 115702 - DNA, 4027 bp, Artificial Sequence
  derived and/or modified sequence
ggtgggataggggcataggcttgtgaagggcagtccggatccggaggaactcctctttgtccctggtaggagagacacccccagtctatcctcgatgccgtcagccttggccatcttcacttgccgcccgaactcgcacccgtttcaggagcgtcatgtctacctggacgagcccatcaaaatcggccgctcagtggcccgctgtcgaccagcgcagaataatgccacttttgattgcaaagtgctatcaaggaaccacgctctcgtctggtttgatcacaagacgggcaagttttatcttcaagacactaaaagtagtaatggtacttttataaatagccagagattgagtcgaggctctgaagaaagtccaccatgtgaaattctttccggtgacattatccagtttggagtagacgtgacagagaatacacggaaagttacccatgggtgtattgtttccacaataaaactttttctaccagatggtatggaagcccggctccgctcagatgtcatccatgcaccattaccaagtcctgttgacaaagttgctgctaacactccaagtatgtactctcaggaactattccagctttctcagtatctacaggaggccttacatcgggaacaaatgttggaacagaagttagccacgcttcagcggctactagccatcacccaagaggcttcagataccagttggcaggctttaatagatgaagatagactcttatcacggttagaagttatgggaaaccaattacaggcatgctccaaaaatcaaacagaagatagtttacgaaaggaacttatagcattacaagaggataaacataactatgagacaacagccaaagagtccctgaggcgggttcttcaggagaaaattgaagtggttagaaaactttcagaagttgagcgaagtctgagtaatactgaagatgaatgtacccatctgaaagaaatgaatgaaaggactcaggaagaattaagagaattagccaacaaatataatggagcagttaatgagattaaagatttatctgataaattaaaggtagcagagggaaaacaagaggaaatccaacagaagggacaggctgagaaaaaagaattacaacataaaatagatgaaatggaagaaaaagaacaggagctccaggcaaaaatagaagctttgcaagctgataatgatttcaccaatgaaaggctaacagctttacaagagaagctgatcgtcgaagggcatctaaccaaagcggtagaagaaacaaagctttcaaaagaaaatcagacaagagcaaaagaatctgatttttcagatactctgagtccaagcaaggaaaaaagcagtgacgacactacagacgcccaaatggatgagcaagacctaaatgagcctcttgccaaagtgtcccttttaaaagatgacttgcagggtgcacagtcagaaattgaggcaaagcaagaaatacagcatcttcgaaaggaattgatcgaagcccaggagctagctagaacaagtaaacaaaaatgctttgaacttcaagctcttttggaagaagaaagaaaagcctatcgaaatcaagttgaggaatccactaaacaaatacaggttcttcaagcccaattgcagaggttacacatcgatactgagaatctccgggaggagaaggacagtgaaatcacaagtactagagatgaattgcttagtgcccgagatgaaattttgctccttcatcaagcagcagcaaaggttgcctctgagcgggacactgacattgcttctttacaagaagagcttaagaaggtgagagctgagcttgagcggtggcggaaagcagcgtctgaatatgagaaagaaatcacaagtctgcaaaacagttttcagcttagatgtcaacagtgtgaggaccagcagagagaagaagcaacaaggttgcaaggtgaactagagaagttgagaaaggaatggaatgcattggaaaccgaatgccattctctaaaaagggaaaatgttttgctatcatcagaactgcaacggcaagaaaaagaattgcacaattctcagaagcagagtttagagcttaccagtgatctcagcatccttcaaatgtctaggaaagaacttgagaatcaagtgggatccttgaaagaacagcatcttcgggattcagctgatttaaaaactcttctcagtaaggcagaaaaccaagcaaaggatgtgcagaaagagtatgaaaagacacagactgtactctcagaactgaagttgaagtttgaaatgactgagcaggaaaagcagtcaatcacagatgagctcaaacagtgtaaaaacaacctgaagctgctccgagagaaaggaaataataaaccctggccctggatgcccatgttggctgccctggttgcagtaacagccatcgtgctgtacgtgccaggtctggccagagcttctccatgagagcgttccttgagtccgtacaccgtcctccctctagaagctggcatcacactcatgctggggacaaacagaaccattttcttcctctttacctcttaaaacagcagaagtacaagaatacagctgtagggtcattgctttaaattatataaaatgtatctgtctataaagaagatataaaattgtgactttattctactgtaagcaataatttgcttgcaatttttcatgtaatttttaaattagtatgttaagattctgaatattatggtggcctaaagtaggcttcttggtacaccagattatttataacattaaatttatgagtattttactctgaattctgatcaccagataattcatttttctgatttgataactacccaaaccaaacaaccaatacatacatgggaagagaggccctgtgtgctcagtgcctatcagtttgaaatatatacacatatatatattttttacatatttacgccatttttacttgttatgaaaccactgagctattgggaacaagacttagagacaactatttgcgtggatttttttttttttaaggaaaaatacgtttggaaaataaactgttatggtgataatttggggaatatgtgcacgcttgttcagccttaatgtgacttgaagatgtggaggacatcaactttgaaaaactttccatgagagtgtattttcttgagcaaactgaagtatttctgggagcaaaaacatagtaattacacaatttcagtgcagtcaaccaaaatgttgagtcaattggaatgtaatttattaaaccatgtatttaaagagatatttttctttaaaagccaagttactttctcatatacagcattttaggaagcatgattttttttttctatcatctattcctccaagcatgtttaattgaagaaagtattaatatctctttagataagcttgtattgacctaatttggtttatgatgtgtcagagctaattcatgttcagggtgagcgttgtacctaccaacaaatttcctggttgggtatgcaaatggttattttctttttattgttgttaattgggactttctgttaatgaaaagcactattcccaagattaatagtgttctatgcacaatgaagcacctaaaaacactgcttgatattataaatttaaaacacaagtgaaagtttagccatggttttgtgcggcatcatagttatgtcaataaagtttatttaggtcatagaatatcctaaagtatcacatagttaaatttttcagtcagtgaagaccgggagggaatgtcagtgaattggcttgaatgttctgtggcaatccacaggtctagccaaatattgaaataggagtttagggtataatttgccttgtgatgtttggcagtcactgtttatactttaaaggttatattttaagctatttgagattgcttttgggaagatcactagatttatggaggaattagtcacaaatgacttgtagaaaatactgtcatatagttcatttcatcattttctgttgcaggaagccactccaccacagaat

SEQ ID NO: 115703 - DNA, 1383 bp, Artificial Sequence
  derived and/or modified sequence
gtttccagttggcaagtggacagccttgaacaaaagccccagccctcagcaaagcagacatgatccacattataatttaatatgagctacgtgtaataaccagcattccattttggacaagggtggtgaagaaaaaatcagacaagagcaaaagaatctgatttttcagatactctgagtccaagcaaggaaaaaagcagtgacgacactacagacgcccaaatggatgagcaagacctaaatgagcctcttgccaaagtgtcccttttaaaagatgacttgcagggtgcacagtcagaaattgaggcaaagcaagaaatacagcatcttcgaaaggaattgatcgaagcccaggagctagctagaacaagtaaacaaaaatgctttgaacttcaagctcttttggaagaagaaagaaaagcctatcgaaatcaagttgaggaatccactaaacaaatacaggttcttcaagcccaattgcagaggttacacatcgatactgagaatctccgggaggagaaggacagtgaaatcacaagtactagagatgaattgcttagtgcccgagatgaaattttgctccttcatcaagcagcagcaaaggttgcctctgagcgggacactgacattgcttctttacaagaagagcttaagaaggtgagagctgagcttgagcggtggcggaaagcagcgtctgaatatgagaaagaaatcacaagtctgcaaaacagttttcagcttagatgtcaacagtgtgaggaccagcagagagaagaagcaacaaggttgcaaggtgaactagagaagttgagaaaggaatggaatgcattggaaaccgaatgccattctctaaaaagggaaaatgttttgctatcatcagaactgcaacggcaagaaaaagaattgcacaattctcagaagcagagtttagagcttaccagtgatctcagcatccttcaaatgtctaggaaagaacttgagaatcaagtgggatccttgaaagaacagcatcttcgggattcagctgatttaaaaactcttctcagtaaggcagaaaaccaagcaaaggatgtgcagaaagagtatgaaaagacacagactgtactctcagaactgaagttgaagtttgaaatgactgagcaggaaaagcagtcaatcacagatgagctcaaacagtgtaaaaacaacctgaagctgctccgagagaaaggaaataataaaccctggccctggatgcccatgttggctgccctggttgcagtaacagccatcgtgctgtacgtgccaggtctggccagagcttctccatgagagcgttccttgagtccgtacaccgtcctccctctagaagctggcatcacactcatgctggggacaaacaga

SEQ ID NO: 115704 - DNA, 2494 bp, Artificial Sequence
  derived and/or modified sequence
ggtgggataggggcataggcttgtgaagggcagtccggatccggaggaactcctctttgtccctggtaggagagacacccccagtctatcctcgatgccgtcagccttggccatcttcacttgccgcccgaactcgcacccgtttcaggagcgtcatgtctacctggacgagcccatcaaaatcggccgctcagtggcccgctgtcgaccagcgcagaataatgccacttttgattgcaaagtgctatcaaggaaccacgctctcgtctggtttgatcacaagacgggcaagttttatcttcaagacactaaaagtagtaatggtacttttataaatagccagagattgagtcgaggctctgaagaaagtccaccatgtgaaattctttccggtgacattatccagtttggagtagacgtgacagagaatacacggaaagttacccatgggtgtattgtttccacaataaaactttttctaccagatggtatggaagcccggctccgctcagatgtcatccatgcaccattaccaagtcctgttgacaaagttgctgctaacactccaagtatgtactctcaggaactattccagctttctcagtatctacaggaggccttacatcgggaacaaatgttggaacagaagttagccacgcttcagcggctactagccatcacccaagaggcttcagataccagttggcaggctttaatagatgaagatagactcttatcacggttagaagttatgggaaaccaattacaggcatgctccaaaaatcaaacagaagatagtttacgaaaggaacttatagcattacaagaggataaacataactatgagacaacagccaaagagtccctgaggcgggttcttcaggagaaaattgaagtggttagaaaactttcagaagttgagcgaagtctgagtaatactgaagatgaatgtacccatctgaaagaaatgaatgaaaggactcaggaagaattaagagaattagccaacaaatataatggagcagttaatgagattaaagatttatctgataaattaaaggtagcagagggaaaacaagaggaaatccaacagaagggacaggctgagaaaaaagaattacaacataaaatagatgaaatggaagaaaaagaacaggagctccaggcaaaaatagaagctttgcaagctgataatgatttcaccaatgaaaggctaacagctttacaagaaaatcagacaagagcaaaagaatctgatttttcagatactctgagtccaagcaaggaaaaaagcagtgacgacactacagacgcccaaatggatgagcaagacctaaatgagcctcttgccaaagtgtcccttttaaaagatgacttgcagggtgcacagtcagaaattgaggcaaagcaagaaatacagcatcttcgaaaggaattgatcgaagcccaggagctagctagaacaagtaaacaaaaatgctttgaacttcaagctcttttggaagaagaaagaaaagcctatcgaaatcaagttgaggaatccactaaacaaatacaggttcttcaagcccaattgcagaggttacacatcgatactgagaatctccgggaggagaaggacagtgaaatcacaagtactagagatgaattgcttagtgcccgagatgaaattttgctccttcatcaagcagcagcaaaggttgcctctgagcgggacactgacattgcttctttacaagaagagcttaagaaggtgagagctgagcttgagcggtggcggaaagcagcgtctgaatatgagaaagaaatcacaagtctgcaaaacagttttcagcttagatgtcaacagtgtgaggaccagcagagagaagaagcaacaaggttgcaaggtgaactagagaagttgagaaaggaatggaatgcattggaaaccgaatgccattctctaaaaagggaaaatgttttgctatcatcagaactgcaacggcaagaaaaagaattgcacaattctcagaagcagagtttagagcttaccagtgatctcagcatccttcaaatgtctaggaaagaacttgagaatcaagtgggatccttgaaagaacagcatcttcgggattcagctgatttaaaaactcttctcagtaaggcagaaaaccaagcaaaggatgtgcagaaagagtatgaaaagacacagactgtactctcagaactgaagttgaagtttgaaatgactgagcaggaaaagcagtcaatcacagatgagctcaaacagtgtaaaaacaacctgaagctgctccgagagaaaggaaataatccttccatattacaacccgtcccacgtattcatcggcctattcctggctttcctgttttggtgtttcggtccattgtggtagaacagaaaccctggccctggatgcccatgttggctgccctggttgcagtaacagccatcgtgctgtacgtgccaggtctggccagagcttctccatga

SEQ ID NO: 115705 - DNA, 1089 bp, Artificial Sequence
  derived and/or modified sequence
atggacgagcaggacctgaacgagcccctggccaaggtgagcctgctgaaggacgacctgcagggcgcccagagcgagatcgaggccaagcaggagatccagcacctgagaaaggagctgatcgaggcccaggagctggccagaaccagcaagcagaagtgcttcgagctgcaggccctgctggaggaggagagaaaggcctacagaaaccaggtggaggagagcaccaagcagatccaggtgctgcaggcccagctgcagagactgcacatcgacaccgagaacctgagagaggagaaggacagcgagatcaccagcaccagagacgagctgctgagcgccagagacgagatcctgctgctgcaccaggccgccgccaaggtggccagcgagagagacaccgacatcgccagcctgcaggaggagctgaagaaggtgagagccgagctggagagatggagaaaggccgccagcgagtacgagaaggagatcaccagcctgcagaacagcttccagctgagatgccagcagtgcgaggaccagcagagagaggaggccaccagactgcagggcgagctggagaagctgagaaaggagtggaacgccctggagaccgagtgccacagcctgaagagagagaacgtgctgctgagcagcgagctgcagagacaggagaaggagctgcacaacagccagaagcagagcctggagctgaccagcgacctgagcatcctgcagatgagcagaaaggagctggagaaccaggtgggcagcctgaaggagcagcacctgagagacagcgccgacctgaagaccctgctgagcaaggccgagaaccaggccaaggacgtgcagaaggagtacgagaagacccagaccgtgctgagcgagctgaagctgaagttcgagatgaccgagcaggagaagcagagcatcaccgacgagctgaagcagtgcaagaacaacctgaagctgctgagagagaagggcaacaacaagccctggccctggatgcccatgctggccgccctggtggccgtgaccgccatcgtgctgtacgtgcccggcctggccagagccagcccctag

SEQ ID NO: 115706 - DNA, 1089 bp, Artificial Sequence
  derived and/or modified sequence
atggacgagcaggatctgaatgaaccgctggccaaggtgagcttgcttaaggacgatcttcaaggtgctcagtcagagattgaggccaaacaggagattcaacacctacgcaaagaactcatagaagcacaggaattggccagaacttccaagcaaaaatgcttcgagctgcaggctctgttggaggaggaacgtaaagcctatagaaatcaggtagaagagtcaaccaaacaaatccaggtgttgcaggcacagctccagaggcttcacattgacacagagaatctcagggaagaaaaagattcggagatcacgagcactagagacgagttgctctccgcgcgagatgaaatcctcctgttgcaccaggcagcagccaaagtggcgagtgaaagagacactgatatcgcctcactccaggaagaactcaaaaaagtgcgtgcagaacttgaacgatggcgcaaggcagcttccgagtacgaaaaagagatcacctctttacagaattctttccagctgcgctgtcagcaatgcgaggaccagcagagagaagaagcaacacggcttcagggggagctcgagaaactgaggaaggagtggaacgccctggagaccgagtgtcactcactcaagcgggagaatgtgctgctctcaagcgagctccagcggcaggagaaggaactgcacaactcacagaagcagtcattagagctcacttccgatctaagcatcctgcagatgagccggaaggagttggagaaccaggttgggtccctcaaggagcagcacctacgcgatagtgctgatctgaagactctgctctcaaaggctgaaaaccaggctaaagacgtgcagaaggaatatgagaagacacagacagtgttgtctgaactgaagctcaagttcgagatgacagagcaagaaaaacagtccattacagatgaattaaagcagtgcaaaaacaatctgaagctgctgagagaaaagggaaataataagccctggccctggatgcctatgctcgccgctctggtggcggttactgccatagtgctttatgtgcccggccttgccagggctagcccctag

SEQ ID NO: 115707 - DNA, 1089 bp, Artificial Sequence
  derived and/or modified sequence
atggatgagcaggacctgaatgagcccctggccaaggtgtccctgctgaaggatgacctgcagggcgcccagagcgagattgaggccaagcaggagatccagcacctgaggaaggagctgattgaggcccaggagctggcccggaccagcaagcagaagtgctttgagctgcaggccctgctggaggaggagaggaaggcctacagaaaccaggtggaggagagcaccaagcagatccaggtgctgcaggcccagctgcagaggctgcacatcgacacagagaacctgcgggaggagaaggacagcgagatcaccagcaccagagatgagctgctgagcgccagagatgagatcctgctgctgcaccaggccgccgccaaggtggccagcgagcgggacacagacatcgccagcctgcaggaggagctgaagaaggtgcgggcagagctggagcgctggaggaaggccgcctctgaatatgagaaggagatcaccagcctgcagaacagcttccagctgcgctgccagcagtgtgaggaccagcagcgggaggaggccacccggctgcagggcgagctggagaagctgaggaaggagtggaatgccctggagacagagtgccacagcctgaagagagaaaatgtgctgctgagcagcgagctgcagaggcaggagaaggagctgcacaacagccagaagcagagcctggagctgaccagtgacctgagcatcctgcagatgagcaggaaggagctggagaaccaggtgggcagcctgaaggagcagcacctgcgggacagcgctgacctgaagaccctgctgagcaaggccgagaaccaggccaaggatgtgcagaaggagtatgagaagacccagacagtgctgtctgagctgaagctgaagtttgagatgacagagcaggagaagcagagcatcacagatgagctgaagcagtgcaagaacaacctgaagctgctgcgggagaagggcaacaacaagccctggccctggatgcccatgctggccgccctggtggccgtgacagccatcgtgctgtatgtgcccggcctggcccgggccagcccctag

SEQ ID NO: 115708 - DNA, 1089 bp, Artificial Sequence
  derived and/or modified sequence
atggacgagcaggacctgaacgagcccctggccaaggtgagcctgctgaaagacgatttgcagggagctcagagtgagatcgaagccaaacaagagatccagcatcttaggaaagagttgattgaagctcaggagctggctcggacctccaaacagaaatgcttcgagctgcaggcgctgctcgaggaggagcgcaaggcctacaggaatcaggtagaggagagtactaagcagatccaggtgttgcaggcccagctgcagcgtctgcacattgacaccgagaatttacgggaagagaaagattcagagattacttccacccgggacgaactgttatccgcgcgggacgagatcctgctcctacaccaggcggccgctaaggtcgccagtgaacgtgatacagacatcgcatcactccaagaggagctcaaaaaggtacgagccgaactcgaaagatggcggaaggcggcgtccgagtacgagaaagaaattacaagtttgcagaatagttttcagttaaggtgccaacagtgcgaggaccagcagcgagaagaagccaccagactgcagggcgagctggagaaactcaggaaagaatggaacgctctcgaaaccgagtgccattcactgaagagggagaacgtcctgctgtcaagcgaactccagagacaggaaaaagaactgcacaattctcagaaacaatcattagagctgacttccgatttgtcaattctgcagatgagcaggaaggaattggagaaccaagtggggtccctcaaagaacagcaccttagagacagcgcagatctgaaaaccctcctttctaaagccgagaatcaagccaaagacgtgcagaaagagtacgagaagacacagaccgtcctgagcgaactcaaactgaagtttgagatgacagaacaggagaaacagtcaattacggatgaactcaagcaatgcaaaaacaatctaaagctgctgcgagagaaaggcaacaacaaaccatggccttggatgccaatgctcgctgctctcgtcgcggtgactgccatagtgctctacgtgccgggcctggctcgggcttcaccatag

SEQ ID NO: 115709 - DNA, 1089 bp, Artificial Sequence
  derived and/or modified sequence
atggatgaacaggatctcaatgaacccttagccaaagtgagcttactgaaagacgacctccaaggcgcacagtcagaaatcgaggccaaacaagaaatacaacaccttcgcaaggaattgattgaggcccaggagctcgccagaacatctaagcagaaatgctttgagcttcaggctctgctcgaagaggagcggaaggcttaccgcaatcaggtggaagagtccacaaaacaaattcaggtactgcaggctcagcttcaaaggctgcacatcgataccgagaaccttcgggaggagaaggactccgaaatcaccagcactcgagacgaacttctgtccgccagagatgaaatcctgctgctccaccaagcggctgctaaggtggcatctgaaagagacactgatatcgcctccctgcaggaagagctaaaaaaggtcagagccgagctggagagatggcggaaggctgcgagcgagtatgaaaaggaaattacatcccttcaaaatagttttcaattgcgctgccagcagtgtgaggaccagcagcgcgaagaagcaacaaggctgcaaggcgagctggaaaaactcaggaaggaatggaacgctttagagacagagtgccactccttaaagcgtgagaacgtgctcctgtctagcgaactgcagcgccaggagaaagagctccataattctcagaaacagtcactcgagctaacctcagacctgtcaatcctccagatgtctcgcaaggagttagaaaaccaggttggcagcctgaaagagcagcatcttcgagatagtgccgacctgaagacacttttgtcaaaggctgaaaaccaggccaaagatgtccagaaagaatacgaaaaaacccagaccgtcctctccgagctgaagctcaaatttgagatgactgaacaggaaaagcaaagcatcaccgacgaattgaaacaatgcaaaaacaatctgaagctgctccgcgaaaaggggaacaacaagccgtggccctggatgccaatgttagctgcactggtggcagtgacagcaatagtactttacgtgccagggcttgccagagctagcccttag

SEQ ID NO: 115710 - protein, 296 aa, Artificial Sequence
  derived and/or modified sequence
MDEQDLNEPLAKVSLLKAQLQRLHIDTENLREEKDSEITSTRDELLSARDEILLLHQAAAKVASERDTDIASLQEELKKVRAELERWRKAASEYEKEITSLQNSFQLRCQQCEDQQREEATRLQGELEKLRKEWNALETECHSLKRENVLLSSELQRQEKELHNSQKQSLELTSDLSILQMSRKELENQVGSLKEQHLRDSADLKTLLSKAENQAKDVQKEYEKTQTVLSELKLKFEMTEQEKQSITDELKQCKNNLKLLREKGNNKPWPWMPMLAALVAVTAIVLYVPGLARASP

SEQ ID NO: 115711 - DNA, 891 bp, Artificial Sequence
  derived and/or modified sequence
atggacgagcaggacctgaacgagcccctggccaaggtgagcctgctgaaggcccagctgcagagactgcacatcgacaccgagaacctgagagaggagaaggacagcgagatcaccagcaccagagacgagctgctgagcgccagagacgagatcctgctgctgcaccaggccgccgccaaggtggccagcgagagagacaccgacatcgccagcctgcaggaggagctgaagaaggtgagagccgagctggagagatggagaaaggccgccagcgagtacgagaaggagatcaccagcctgcagaacagcttccagctgagatgccagcagtgcgaggaccagcagagagaggaggccaccagactgcagggcgagctggagaagctgagaaaggagtggaacgccctggagaccgagtgccacagcctgaagagagagaacgtgctgctgagcagcgagctgcagagacaggagaaggagctgcacaacagccagaagcagagcctggagctgaccagcgacctgagcatcctgcagatgagcagaaaggagctggagaaccaggtgggcagcctgaaggagcagcacctgagagacagcgccgacctgaagaccctgctgagcaaggccgagaaccaggccaaggacgtgcagaaggagtacgagaagacccagaccgtgctgagcgagctgaagctgaagttcgagatgaccgagcaggagaagcagagcatcaccgacgagctgaagcagtgcaagaacaacctgaagctgctgagagagaagggcaacaacaagccctggccctggatgcccatgctggccgccctggtggccgtgaccgccatcgtgctgtacgtgcccggcctggccagagccagcccctag

SEQ ID NO: 115712 - DNA, 891 bp, Artificial Sequence
  derived and/or modified sequence
atggacgagcaggacctgaatgaacctcttgctaaagtgagtctactgaaggcccagctgcaacgcctgcacatcgacaccgagaatctgcgagaggagaaggatagtgagatcacatcaacgcgcgatgagctcttgtccgctcgagacgaaattctcctattgcaccaggctgccgccaaagtggctagcgagagggacacggatatcgcaagcctacaagaagaactgaaaaaggtgagggccgagcttgagcgctggcgcaaagctgccagcgaatacgaaaaagagatcacaagcctacagaattcattccaactgagatgtcagcagtgcgaagaccagcaacgggaagaggccaccagactgcaaggagagctggaaaagctgcgcaaggagtggaacgccctggagactgaatgccacagcttgaagagagaaaatgtgcttctcagcagtgaactgcagcgccaggagaaggagctacataattctcaaaagcagtcccttgaattgaccagcgatctgtccattcttcagatgtcgcggaaggagcttgagaatcaggtgggatccctcaaagagcagcatctgcgagattctgccgacctcaaaactttattgagcaaggcggaaaaccaagctaaggacgtgcagaaagagtacgagaaaacacagaccgtgctcagtgagctgaaactcaagttcgaaatgaccgagcaagagaaacagagtattaccgacgagctgaagcagtgtaagaataatttaaagctgctgagagagaagggtaacaataagccttggccctggatgcctatgctggccgctttagtggccgtcaccgccattgtgctgtacgtgccggggctggcccgtgcatccccttag

SEQ ID NO: 115713 - DNA, 891 bp, Artificial Sequence
  derived and/or modified sequence
atggatgagcaggacctgaatgagcccctggccaaggtgtccctgctgaaggcccagctgcagaggctgcacatcgacacagagaacctgcgggaggagaaggacagcgagatcaccagcaccagagatgagctgctgagcgccagagatgagatcctgctgctgcaccaggccgccgccaaggtggccagcgagcgggacacagacatcgccagcctgcaggaggagctgaagaaggtgcgggcagagctggagcgctggaggaaggccgcctctgaatatgagaaggagatcaccagcctgcagaacagcttccagctgcgctgccagcagtgtgaggaccagcagcgggaggaggccacccggctgcagggcgagctggagaagctgaggaaggagtggaatgccctggagacagagtgccacagcctgaagagagaaaatgtgctgctgagcagcgagctgcagaggcaggagaaggagctgcacaacagccagaagcagagcctggagctgaccagtgacctgagcatcctgcagatgagcaggaaggagctggagaaccaggtgggcagcctgaaggagcagcacctgcgggacagcgctgacctgaagaccctgctgagcaaggccgagaaccaggccaaggatgtgcagaaggagtatgagaagacccagacagtgctgtctgagctgaagctgaagtttgagatgacagagcaggagaagcagagcatcacagatgagctgaagcagtgcaagaacaacctgaagctgctgcgggagaagggcaacaacaagccctggccctggatgcccatgctggccgccctggtggccgtgacagccatcgtgctgtatgtgcccggcctggcccgggccagcccctag

SEQ ID NO: 115714 - DNA, 891 bp, Artificial Sequence
  derived and/or modified sequence
atggacgagcaggacctgaacgagcccctggccaaggtgagcctgcttaaggcacagctgcagcggctccatatcgataccgaaaatctgagagaggaaaaagactcagaaattacatcaactcgggatgagctgctctcagcacgggatgaaatactgctgctgcaccaagctgccgccaaggtggcttccgagagagacacggatatagcgtcactacaggaggaattgaagaaagtgcgcgccgagttagagagatggcggaaggccgcttccgagtatgaaaaagagatcacttctctgcagaatagcttccagctgcgctgtcagcaatgtgaagatcaacagcgcgaggaggccacacgcctgcagggcgagttagaaaagctcagaaaggagtggaatgcgctagagacagaatgtcacagcttgaaaagggaaaacgttctgttgagcagcgagctgcaacgccaggagaaggagctccacaattcccagaagcagtcattggagttgacttcagacctgtctatcctgcagatgtcccgcaaggagctcgagaatcaggtcgggagtctaaaagagcaacacttgcgcgatagcgccgaccttaagacactgctttcgaaggctgagaatcaggctaaggacgttcagaaggaatacgaaaaaacacaaacagtgctgtccgaactgaagcttaagtttgagatgacagaacaagaaaaacagtcaattaccgacgaattgaagcagtgcaaaaacaatttgaagctgctgcgggagaaaggaaacaacaagccctggccttggatgccgatgttagctgcactggttgccgtgacggccatcgtgctgtacgtgcccggtcttgctcgagcatcaccatag

SEQ ID NO: 115715 - DNA, 891 bp, Artificial Sequence
  derived and/or modified sequence
atggatgaacaagacttgaacgaaccgcttgctaaggtgagcctgctgaaagcccagttgcagaggctacatatagatactgaaaacctgagggaggagaaagacagcgaaataacctctacccgagatgagctgctctctgccagagatgagatccttctgctgcaccaggccgctgcaaaagttgctagcgagcgcgatactgatatcgcatctctccaagaagaactgaaaaaggtacgtgctgagctggaaagatggcggaaagccgcttccgaatacgagaaggaaataactagtctgcagaactccttccagcttcggtgccaacagtgcgaagatcagcagagggaagaagctacaagactgcagggcgagctagagaagttacgcaaggagtggaatgcccttgagaccgagtgtcatagtctgaagagagaaaacgtgctgttgtcgtccgaactccagaggcaagaaaaggagcttcataactcacagaagcagagccttgagcttacatctgacctcagtatccttcagatgtccaggaaagagctagagaaccaagtcggcagtctcaaagagcagcacctgcgggattctgcagatttaaaaaccttgttatctaaggctgaaaatcaagccaaagacgtgcaaaaagaatacgaaaagacgcagaccgtactcagcgagcttaaactgaaattcgagatgaccgagcaggaaaagcaaagtatcacagacgaactcaagcagtgcaaaaataacctgaagctgctgcgggagaagggcaataacaaaccttggccctggatgcctatgttggccgcactggtggctgtgactgctatagttctgtacgttccagggctcgctagagccagcccctag

SEQ ID NO: 115716 - protein, 164 aa, Artificial Sequence
  derived and/or modified sequence
MVQPEYRIYEMNKRLQSRTEDSDNLWWDAFATEFFEDDATLTLSFCLEDGPKRYTIGRTLIPRYFSTVFEGGVTDLYYILKHSKESYHNSSITVDCDQCTMVTQHGKPMFTKVCTEGRLILEFTFDDLMRIKTWHFTIRQYRELVPRSILAMHAQDPQVLDQLS

SEQ ID NO: 115717 - protein, 371 aa, Artificial Sequence
  derived and/or modified sequence
MSSTPHDPFYSSPFGPFYRRHTPYMVQPEYRIYEMNKRLQSRTEDSDNLWWDAFATEFFEDDATLTLSFCLEDGPKRYTIGRTLIPRYFSTVFEGGVTDLYYILKHSKESYHNSSITVDCDQCTMVTQHGKPMFTKVCTEGRLILEFTFDDLMRIKTWHFTIRQYRELVPRSILAMHAQDPQVLDQLSKNITRMGLTNFTLNYLRLCVILEPMQELMSRHKTYNLSPRDCLKTCLFQKWQRMVAPPAEPTRQPTTKRRKRKNSTSSTSNSSAGNNANSTGSKKKTTAANLSLSSQDVMVVGEPTLMGGEFGDEDERLITRLENTQYDAANGMDDEEDFNNSPALGNNSPWNSKPPATQETKSENPPPQASQ

SEQ ID NO: 115718 - DNA, 1116 bp, Artificial Sequence
  derived and/or modified sequence
atgtcctcaacacctcatgaccccttctactcttccccctttgggcccttttaccggcgacatacgccttacatggtacaacccgaataccggatatacgagatgaacaagaggctgcaatcacggacggaagattccgacaacctctggtgggacgccttcgccactgagttttttgaggatgacgctaccctgacattgtccttctgtctggaggacggcccaaaacgatacactatcgggaggacactgattccacgctatttcagcaccgttttcgaagggggagtgaccgatctgtattacatactgaagcatagcaaggaaagctatcataattcttcaatcacagtggactgtgaccagtgcaccatggttacccaacacggcaagcccatgtttacgaaagtgtgcactgagggaaggctcatcttggagtttacgttcgatgacctgatgcgaataaaaacctggcacttcaccatccgacaatatcgggagctggtgccccggtctatcctggctatgcatgctcaggatccccaggtcctggatcagctaagcaaaaacatcactaggatggggctcactaatttcactctgaattacctgcggctctgcgtgatcttggagcccatgcaggagttgatgtctagacacaaaacctacaacctgtctcccagagactgccttaagacatgtctgttccaaaagtggcagaggatggtggctccaccggccgaacccaccaggcagcccaccacaaaaaggaggaagcgcaagaactccacatcatccaccagtaatagttcagcaggtaacaacgctaactctactggtagcaagaagaaaactactgccgctaacctttccctgagctcacaggatgtaatggtcgtgggggaacctacactgatgggaggtgaattcggggacgaagatgagaggctgattacaagactggaaaatacgcaatacgatgctgcaaatggaatggacgatgaagaggattttaacaactccccagctctcgggaacaacagtccatggaattccaagccccctgctactcaagagaccaagagtgaaaatccgcccccccaggcctcacagtag

SEQ ID NO: 115719 - DNA, 1116 bp, Artificial Sequence
  derived and/or modified sequence
atgagcagcacccctcatgaccccttctacagcagccccttcggccccttctacagaagacacaccccctacatggtgcagcctgagtaccgcatctatgagatgaacaagaggctgcagagcaggacagaggacagcgacaacctgtggtgggatgcctttgccacagagttctttgaagatgatgccaccctgaccctgtccttctgcctggaggatggccccaagcgctacaccatcggccgcaccctcatcccccgctacttcagcacagtgtttgaaggaggagtgacagacctgtactacatcctgaagcacagcaaggagagctaccacaacagcagcatcaccgtggactgtgaccagtgcaccatggtgacccagcacggcaagcccatgttcaccaaggtgtgcacagagggccgcctcatcctggagttcacctttgatgacctgatgaggatcaagacctggcacttcaccatccggcagtaccgggagctggtgcccaggagcatcctggccatgcacgcccaggacccccaggtgctggaccagctgagcaagaacatcaccaggatgggcctgaccaacttcaccctgaactacctgcggctgtgtgtgatcctggagcccatgcaggagctgatgagccgccacaagacctacaacctgagcccccgggactgcctgaagacctgcctcttccagaagtggcagaggatggtggcccctcctgctgagcccacccggcagcccaccaccaagaggaggaagaggaagaacagcaccagcagcaccagcaacagcagcgctggcaacaatgccaacagcacaggcagcaagaagaagaccacagctgccaacctgagcctgagcagccaggatgtgatggtggtgggggagcccaccctgatgggcggggagtttggagatgaagatgagcggctcatcacccggctggagaacacccagtatgatgctgccaacggcatggatgatgaggaggacttcaacaacagccctgccctgggcaacaacagcccctggaacagcaagcccccagccacccaggagaccaagtcagaaaatcctccaccccaggccagccagtag

SEQ ID NO: 115720 - DNA, 2295 bp, Artificial Sequence
  derived and/or modified sequence
gggaagaacacagcccatgtgctctgcatggacgttactgatactctgtttagcttgattttcgaaaagcaggcaagatgtccagcacaccacatgaccccttctattcttctcctttcggcccattttataggaggcatacaccatacatggtacagccagagtaccgaatctatgagatgaacaagagactgcagtctcgcacagaggatagtgacaacctctggtgggacgcctttgccactgaattttttgaagatgacgccacattaaccctttcattttgtttggaagatggaccaaagcgatacactatcggcaggaccctcatcccccgttactttagcactgtgtttgaaggaggggtgaccgacctgtattacattctcaaacactcgaaagagtcataccacaactcatccatcacggtggactgcgaccagtgtaccatggtcacccagcacgggaagcccatgtttaccaaggtatgtacagaaggcagactgatcttggagttcacctttgatgatctcatgagaatcaaaacatggcactttaccattagacaataccgagagttagtcccgagaagcatcctagccatgcatgcacaagatcctcaggtcctggatcagctgtccaaaaacatcaccaggatggggctaacaaacttcaccctcaactacctcaggttgtgtgtaatattggagccaatgcaggaactgatgtcgagacataaaacttacaacctcagtccccgagactgcctgaagacctgcttgtttcagaagtggcagaggatggtggctccgccagcagaacccacaaggcaaccaacaaccaaacggagaaaaaggaaaaattccaccagcagcacttccaacagcagcgctgggaacaatgcaaacagcactggcagcaagaagaagaccacagctgcaaacctgagtctgtccagtcaggatgtgatggtggtaggagagccaactctgatgggaggtgagtttggggacgaggacgaaaggctaatcactagattagaaaacacgcaatatgatgcggccaacggcatggacgacgaggaggacttcaacaattcacccgcgctggggaacaacagcccgtggaacagtaaacctcccgccactcaagagaccaaatcagaaaaccccccaccccaggcttcccaataagatgatcggcaccagaatccactgtcaataggcccgtgggtgatcattacaattgcaaatctttacttacaggagaggaaacagaagagataaaaacttttccatgcaaatatctatttctaaaccacaatgatctgattttctttcttctttctttttttctaattgagaggattattcccagtaagcttccatgaccctttcttggaggccttcacaggtaatacagatactggcactgattgtaattaaaatgagagaaaactctagcgcatcttctggcacggttttaacaacgtgtttgtgttgaatttcctttttatgcatcaaacgaaggccatattgtccataaatgctcagtgctcaggatctcattaatatgccgaacctaactacagatgactttttaatattgtaaaatattttctgctttttgacttgcatctgagagtttcttgtttcagtaaaaaaagaaaagacaaaaaaatcagctttggaaagtaatttaaatgtaccttattttttttttctttatgttttctttcattgggcaacagctaagagggcccagcaaggtaatttatggttgagctgatgtcaattggttcttgtcttgagtcgactcaatttagcccaagtgctgaaacaagaaatgtcatttttttcatcaaagacaccagggcagatttttaagtaaagaaagacaattggacccttaagaatttatgcatttgtaaagttgctgttgatccaaatattttcaagccatgtaatccattggttttgtgggcagtttaataaacctgaacctttgtgtgttttctaattgtacctgagttgaccatcctttctttttatagtatatttcttgtatgatattttgtaaagctctcacctggttcttttatggggacttttcgtttttgggcaactccagtgtatttatgtgaaactttataagagaattaatttttccatttgcatattaatatgttcctccacacatgtaaaggcacagtggctccgtgtgttaaaaaacagctgtattttatgtatgctttactgataagtgtgccaataataaactgtgttaatgaccaaa

SEQ ID NO: 115721 - DNA, 1116 bp, Artificial Sequence
  derived and/or modified sequence
atgagcagcaccccccacgaccccttctacagcagccccttcggccccttctacagacgacacacgccgtacatggttcagcccgagtaccggatttacgagatgaacaagaggctccaatcgcgcaccgaggacagcgacaatttgtggtgggacgctttcgcaactgagttttttgaagacgacgccacattgaccctttctttctgtctcgaggatgggcctaaacggtacaccattggccgcaccctgattcctagatacttctccacagtctttgagggcggggtcaccgacctgtactacattcttaaacactctaaggaaagttatcataactcctctattaccgtcgactgcgaccaatgtactatggtaacccaacatggaaaacccatgttcactaaagtgtgtacggaggggaggctgattttagagtttacatttgacgatcttatgaggatcaagacctggcatttcaccattcgtcagtacagggagctggtgcccagatcaatcttggcaatgcacgctcaggacccgcaggtgctggaccagctgtccaaaaatattactagaatgggccttaccaattttaccctgaactacctcagactatgtgtgatcctcgagcccatgcaggagctcatgagcagacacaagacgtacaacctgtctccccgggactgtctaaagacttgcctgttccagaagtggcagcgtatggtggcccccccagctgaaccaaccagacagcccaccaccaaaaggagaaagcgcaagaatagcacatcttcaacttcaaattccagtgccggtaataacgcaaattcgacagggtcaaagaaaaagaccaccgcagcaaacctgagcctgagtagccaggatgtgatggtggtgggtgaacctacacttatgggcggggagtttggagacgaggatgagcggctgatcactcgactcgagaatactcagtatgacgctgcaaacggtatggatgacgaagaagactttaataattctccggctcttggaaataattcaccctggaatagtaaacctcctgccacacaggagactaagtcagaaaatcccccaccacaggcctcacaatag

SEQ ID NO: 115722 - DNA, 1116 bp, Artificial Sequence
  derived and/or modified sequence
atgtctagcaccccacacgaccccttttattcgagccccttcggcccattctatcgacgccacacgccctacatggtccaacctgagtataggatttatgaaatgaacaagaggctgcaaagccgtacggaggacagtgataacctgtggtgggatgcttttgccactgaatttttcgaggatgatgctaccctgaccctttctttctgcctggaggacgggcctaaacggtacaccattggacgtaccttgattcctcggtactttagcactgtgttcgaaggtggggttacagatttatattatattctgaagcactcaaaggaatcttaccacaactcctccattacagtggattgcgaccagtgcacaatggtaactcagcacgggaaacctatgtttaccaaagtttgtacggaagggagactcatactggagtttaccttcgatgatctgatgaggattaagacgtggcactttactataagacagtacagagagctggttcctcgaagcattctggcaatgcacgcccaggatccacaggtcttggatcaattgtctaagaatataacccgcatgggcctcaccaattttacactgaactatcttcgcctgtgcgtcattctagagcccatgcaggaactgatgtcacgccacaaaacttacaacctatcccctcgggactgtctcaaaacttgcttgttccagaaatggcagaggatggtggcacctccagccgagcccacccggcagccgacaacgaaacgccgaaagaggaagaattcaacttcctccacatcaaactcttcagccggaaataacgccaacagtaccggctctaagaagaagactactgccgctaatttatcactgagctcacaagatgtcatggtggtcggcgaacctactctcatgggaggcgaatttggcgatgaagacgaacgcctgatcacccggctagagaatacacaatatgacgccgctaacgggatggatgacgaagaggatttcaataattctcccgcactgggcaacaacagtccctggaactccaaacccccagcaactcaggagaccaaaagcgagaatcctccgccacaagcttcccagtag

SEQ ID NO: 115723 - DNA, 1116 bp, Artificial Sequence
  derived and/or modified sequence
atgagcagcaccccccacgaccccttctacagcagccccttcggccccttctacagaagacacaccccctacatggtgcagcccgagtacagaatctacgagatgaacaagagactgcagagcagaaccgaggacagcgacaacctgtggtgggacgccttcgccaccgagttcttcgaggacgacgccaccctgaccctgagcttctgcctggaggacggccccaagagatacaccatcggcagaaccctgatccccagatacttcagcaccgtgttcgagggcggcgtgaccgacctgtactacatcctgaagcacagcaaggagagctaccacaacagcagcatcaccgtggactgcgaccagtgcaccatggtgacccagcacggcaagcccatgttcaccaaggtgtgcaccgagggcagactgatcctggagttcaccttcgacgacctgatgagaatcaagacctggcacttcaccatcagacagtacagagagctggtgcccagaagcatcctggccatgcacgcccaggacccccaggtgctggaccagctgagcaagaacatcaccagaatgggcctgaccaacttcaccctgaactacctgagactgtgcgtgatcctggagcccatgcaggagctgatgagcagacacaagacctacaacctgagccccagagactgcctgaagacctgcctgttccagaagtggcagagaatggtggccccccccgccgagcccaccagacagcccaccaccaagagaagaaagagaaagaacagcaccagcagcaccagcaacagcagcgccggcaacaacgccaacagcaccggcagcaagaagaagaccaccgccgccaacctgagcctgagcagccaggacgtgatggtggtgggcgagcccaccctgatgggcggcgagttcggcgacgaggacgagagactgatcaccagactggagaacacccagtacgacgccgccaacggcatggacgacgaggaggacttcaacaacagccccgccctgggcaacaacagcccctggaacagcaagccccccgccacccaggagaccaagagcgagaacccccccccccaggccagccagtag

SEQ ID NO: 115724 - protein, 313 aa, Artificial Sequence
  derived and/or modified sequence
MSSTPHDPFYSSPFGPFYRRHTPYMVQPEYRIYEMNKRLQSRTEDSDNLWWDAFATEFFEDDATLTLSFCLEDGPKRYTIGRTLIPRYFSTVFEGGVTDLYYILKHSKESYHNSSITVDCDQCTMVTQHGKPMFTKVCTEGRLILEFTFDDLMRIKTWHFTIRQYRELVPRSILAMHAQDPQVLDQLSKNITRMGLTNFTLNYLRLCVILEPMQELMSRHKTYNLSPRDCLKTCLFQKWQRMVAPPAEPTRQPTTKRRKRKNSTSSTSNSSAGNNANSTGSKKKTTAANLSLSSQVPIASIARSPVSGCALRT

SEQ ID NO: 115725 - protein, 110 aa, Artificial Sequence
  derived and/or modified sequence
MSSTPHDPFYSSPFGPFYRRHTPYMVQPEYRIYEMNKRLQSRTEDSDNLWWDAFATEFFEDDATLTLSFCLEDGPKRYIVHSAADARGNCNQLGDSEPDACDGLLQFPIM

SEQ ID NO: 115726 - protein, 106 aa, Artificial Sequence
  derived and/or modified sequence
MSSTPHDPFYSSPFGPFYRRHTPYMVQPEYRIYEMNKRLQSRTEDSDNLWWDAFATEFFEDDATLTLSFCLEDGPKRYRTKNLRPIGEKMNINGKCYRQDPHPPLL

SEQ ID NO: 115727 - DNA, 942 bp, Artificial Sequence
  derived and/or modified sequence
atgagttctaccccacacgacccattctattcttcccctttcggccctttttatcgacgacacacgccatatatggtacaaccagagtatcgcatttatgaaatgaataaacgattacagagcagaactgaggactccgataatctctggtgggatgcgttcgcaactgagttttttgaagacgacgccaccctcactctgtctttctgtcttgaggatggacccaaaagatacactatcggtcggacgctaatccccaggtatttcagtactgtctttgaaggcggcgttaccgatctgtactacattcttaaacacagtaaagagagctatcataattcctccataacagtagattgtgatcaatgtaccatggtcacacaacatggcaaaccaatgttcacaaaagtctgcaccgagggcaggctgatcctggagtttacattcgacgacctgatgcgaataaagacttggcatttcactatccggcagtatagagaattagtccctcgcagcatcttggctatgcatgctcaggaccctcaggtgctcgaccagctgtcgaaaaatatcaccaggatgggcctgacaaatttcaccctgaattacctccgattatgcgtgattctggagcccatgcaggaactcatgtctagacacaagacctacaacttgagtccgcgagattgtttgaaaacttgtctgttccaaaaatggcagcgtatggtcgcaccccccgccgaacctaccaggcagccgacaacgaaaagaagaaagcgaaagaactctacttccagtacctctaacagctcagcaggcaacaatgcaaatagtacaggcagcaaaaaaaagaccaccgcagccaacctgagcctgtctagccaagtgccaatcgcaagcattgcccggagccccgtgtcgggatgtgctctccgaacttag

SEQ ID NO: 115728 - DNA, 570 bp, Artificial Sequence
  derived and/or modified sequence
atggtcacccagcatggaaaacctatgttcactaaagtttgtacggagggccgcctgatccttgagttcactttcgacgacctaatgcgtatcaagacttggcacttcacaattcgtcaatatagagagttggttcctaggtccatcctcgccatgcacgcccaggacccacaggtactggaccagttaagtaaaaatataactcgcatgggcctcacaaacttcaccctgaactatctgcgactgtgcgtgattctggagccaatgcaggagttgatgagcagacacaaaacatacaatctttcacctcgagactgtctgaagacatgcttattccaaaagtggcaaagaatggtggccccacccgcagagccaactcggcagccaaccaccaagcggcggaaacgcaaaaattccacctcctctacttccaatagctcggccggcaataacgcaaattccaccggcagtaaaaaaaagaccacggccgccaacctgagtctttcgtcccaggtgccaatcgcctctatcgctcgctctccagtctccggctgtgctctcaggacttag

SEQ ID NO: 115729 - DNA, 495 bp, Artificial Sequence
  derived and/or modified sequence
atggtgcagcccgagtatagaatatatgaaatgaataagcggctccaatcacgaaccgaagacagtgacaacctctggtgggacgctttcgcaactgaattcttcgaagatgacgctaccttaactttatctttttgcctggaggacggaccgaagcgatatacgattggtagaacactgatcccccgctacttttccaccgtgttcgaaggcggagttaccgatctgtattatatactgaaacactccaaagaatcataccataactctagcattacagtggactgcgatcagtgcacaatggttacacaacacgggaagcctatgtttacgaaggtttgtaccgagggacgactgatcctggagtttacgtttgatgatctgatgagaattaagacgtggcatttcaccatcagacaataccgcgagttggtccctagatcaatcctggccatgcatgctcaggacccccaagtactcgatcagctatcctag

SEQ ID NO: 115730 - DNA, 333 bp, Artificial Sequence
  derived and/or modified sequence
atgtcatccacacctcatgaccccttctattccagtccattcggccccttttacagacgacacacaccttacatggtacagccggaataccgcatttacgagatgaacaaacgactccagtccagaacggaggactccgacaacttatggtgggacgcctttgccaccgagttttttgaggacgacgcaaccctcaccctttccttctgtttggaagatggcccgaagcgatacatagtccacagcgccgctgatgcacgggggaactgcaaccagctgggggactccgaaccggacgcctgcgatggcttgctccagttccctatcatgtag

SEQ ID NO: 115731 - DNA, 321 bp, Artificial Sequence
  derived and/or modified sequence
atgtcctctacccctcacgatccattttattcgtctccgtttggaccattctatcggcgccataccccatacatggtgcagcctgaatacagaatttatgaaatgaataagagactgcaaagtcggacagaagattccgacaacttatggtgggacgcatttgcgactgagttttttgaggacgacgccacacttaccctgtctttttgtctcgaagacggtcctaagcgctaccgcaccaaaaatctgcgacccatcggcgaaaagatgaatattaatggcaagtgctaccgtcaggacccacatccccccctcctgtag

SEQ ID NO: 115732 - DNA, 942 bp, Artificial Sequence
  derived and/or modified sequence
atgagcagcacccctcatgaccccttctacagcagccccttcggccccttctacagaagacacaccccctacatggtgcagcctgagtaccgcatctatgagatgaacaagaggctgcagagcaggacagaggacagcgacaacctgtggtgggatgcctttgccacagagttctttgaagatgatgccaccctgaccctgtccttctgcctggaggatggccccaagcgctacaccatcggccgcaccctcatcccccgctacttcagcacagtgtttgaaggaggagtgacagacctgtactacatcctgaagcacagcaaggagagctaccacaacagcagcatcaccgtggactgtgaccagtgcaccatggtgacccagcacggcaagcccatgttcaccaaggtgtgcacagagggccgcctcatcctggagttcacctttgatgacctgatgaggatcaagacctggcacttcaccatccggcagtaccgggagctggtgcccaggagcatcctggccatgcacgcccaggacccccaggtgctggaccagctgagcaagaacatcaccaggatgggcctgaccaacttcaccctgaactacctgcggctgtgtgtgatcctggagcccatgcaggagctgatgagccgccacaagacctacaacctgagcccccgggactgcctgaagacctgcctcttccagaagtggcagaggatggtggcccctcctgctgagcccacccggcagcccaccaccaagaggaggaagaggaagaacagcaccagcagcaccagcaacagcagcgctggcaacaatgccaacagcacaggcagcaagaagaagaccacagctgccaacctgagcctgagcagccaggtgcccatcgccagcatcgcccggagccctgtgtctggctgtgccctgcggacctag

SEQ ID NO: 115733 - DNA, 570 bp, Artificial Sequence
  derived and/or modified sequence
atggtgacccagcacggcaagcccatgttcaccaaggtgtgcacagagggccgcctcatcctggagttcacctttgatgacctgatgaggatcaagacctggcacttcaccatccggcagtaccgggagctggtgcccaggagcatcctggccatgcacgcccaggacccccaggtgctggaccagctgagcaagaacatcaccaggatgggcctgaccaacttcaccctgaactacctgcggctgtgtgtgatcctggagcccatgcaggagctgatgagccgccacaagacctacaacctgagcccccgggactgcctgaagacctgcctcttccagaagtggcagaggatggtggcccctcctgctgagcccacccggcagcccaccaccaagaggaggaagaggaagaacagcaccagcagcaccagcaacagcagcgctggcaacaatgccaacagcacaggcagcaagaagaagaccacagctgccaacctgagcctgagcagccaggtgcccatcgccagcatcgcccggagccctgtgtctggctgtgccctgcggacctag

SEQ ID NO: 115734 - DNA, 495 bp, Artificial Sequence
  derived and/or modified sequence
atggtgcagcctgagtaccgcatctatgagatgaacaagaggctgcagagcaggacagaggacagcgacaacctgtggtgggatgcctttgccacagagttctttgaagatgatgccaccctgaccctgtccttctgcctggaggatggccccaagcgctacaccatcggccgcaccctcatcccccgctacttcagcacagtgtttgaaggaggagtgacagacctgtactacatcctgaagcacagcaaggagagctaccacaacagcagcatcaccgtggactgtgaccagtgcaccatggtgacccagcacggcaagcccatgttcaccaaggtgtgcacagagggccgcctcatcctggagttcacctttgatgacctgatgaggatcaagacctggcacttcaccatccggcagtaccgggagctggtgcccaggagcatcctggccatgcacgcccaggacccccaggtgctggaccagctgtcctag

SEQ ID NO: 115735 - DNA, 333 bp, Artificial Sequence
  derived and/or modified sequence
atgagcagcacccctcatgaccccttctacagcagccccttcggccccttctacagaagacacaccccctacatggtgcagcctgagtaccgcatctatgagatgaacaagaggctgcagagcaggacagaggacagcgacaacctgtggtgggatgcctttgccacagagttctttgaagatgatgccaccctgaccctgtccttctgcctggaggatggccccaagcgctacatcgtgcacagcgctgctgatgcccggggcaactgcaaccagctgggggacagcgagccagatgcctgtgatggcctgctgcagttccccatcatgtag

SEQ ID NO: 115736 - DNA, 321 bp, Artificial Sequence
  derived and/or modified sequence
atgagcagcacccctcatgaccccttctacagcagccccttcggccccttctacagaagacacaccccctacatggtgcagcctgagtaccgcatctatgagatgaacaagaggctgcagagcaggacagaggacagcgacaacctgtggtgggatgcctttgccacagagttctttgaagatgatgccaccctgaccctgtccttctgcctggaggatggccccaagcgctaccgcaccaagaacctgcggcccatcggggagaagatgaacatcaatggcaagtgctaccggcaggacccccacccccccctgctgtag

SEQ ID NO: 115737 - DNA, 2626 bp, Artificial Sequence
  derived and/or modified sequence
agcgtgttcagcctgcctgcctgcctgcctctgtgtgtgtgtgagcgtgtgtgcgtgcgtctactttgtactgggaagaacacagcccatgtgctctgcatggacgttactgatactctgtttagcttgattttcgaaaagcaggcaagatgtccagcacaccacatgaccccttctattcttctcctttcggcccattttataggaggcatacaccatacatggtacagccagagtaccgaatctatgagatgaacaagagactgcagtctcgcacagaggatagtgacaacctctggtgggacgcctttgccactgaattttttgaagatgacgccacattaaccctttcattttgtttggaagatggaccaaagcgatacactatcggcaggaccctcatcccccgttactttagcactgtgtttgaaggaggggtgaccgacctgtattacattctcaaacactcgaaagagtcataccacaactcatccatcacggtggactgcgaccagtgtaccatggtcacccagcacgggaagcccatgtttaccaaggtatgtacagaaggcagactgatcttggagttcacctttgatgatctcatgagaatcaaaacatggcactttaccattagacaataccgagagttagtcccgagaagcatcctagccatgcatgcacaagatcctcaggtcctggatcagctgtccaaaaacatcaccaggatggggctaacaaacttcaccctcaactacctcaggttgtgtgtaatattggagccaatgcaggaactgatgtcgagacataaaacttacaacctcagtccccgagactgcctgaagacctgcttgtttcagaagtggcagaggatggtggctccgccagcagaacccacaaggcaaccaacaaccaaacggagaaaaaggaaaaattccaccagcagcacttccaacagcagcgctgggaacaatgcaaacagcactggcagcaagaagaagaccacagctgcaaacctgagtctgtccagtcaggtacctattgctagcattgctcgttctccagtgtcaggctgcgcactaaggacataaactcgcgtggttgttacacatcaggaggcgatgtttatttcctgtagaaatcaaatatgcgtctcggcccccgacattgagacttgaccccgttgtacagtacacgagtgtgtctgtcctagattccccgactcctcccactgttattttaagctgagcttctctctcccaaggtttccctgtaataatgtcagctgctgttcacaggatgtgatggtggtaggagagccaactctgatgggaggtgagtttggggacgaggacgaaaggctaatcactagattagaaaacacgcaatatgatgcggccaacggcatggacgacgaggaggacttcaacaattcacccgcgctggggaacaacagcccgtggaacagtaaacctcccgccactcaagagaccaaatcagaaaaccccccaccccaggcttcccaataagatgatcggcaccagaatccactgtcaataggcccgtgggtgatcattacaattgcaaatctttacttacaggagaggaaacagaagagataaaaacttttccatgcaaatatctatttctaaaccacaatgatctgattttctttcttctttctttttttctaattgagaggattattcccagtaagcttccatgaccctttcttggaggccttcacaggtaatacagatactggcactgattgtaattaaaatgagagaaaactctagcgcatcttctggcacggttttaacaacgtgtttgtgttgaatttcctttttatgcatcaaacgaaggccatattgtccataaatgctcagtgctcaggatctcattaatatgccgaacctaactacagatgactttttaatattgtaaaatattttctgctttttgacttgcatctgagagtttcttgtttcagtaaaaaaagaaaagacaaaaaaatcagctttggaaagtaatttaaatgtaccttattttttttttctttatgttttctttcattgggcaacagctaagagggcccagcaaggtaatttatggttgagctgatgtcaattggttcttgtcttgagtcgactcaatttagcccaagtgctgaaacaagaaatgtcatttttttcatcaaagacaccagggcagatttttaagtaaagaaagacaattggacccttaagaatttatgcatttgtaaagttgctgttgatccaaatattttcaagccatgtaatccattggttttgtgggcagtttaataaacctgaacctttgtgtgttttctaattgtacctgagttgaccatcctttctttttatagtatatttcttgtatgatattttgtaaagctctcacctggttcttttatggggacttttcgtttttgggcaactccagtgtatttatgtgaaactttataagagaattaatttttccatttgcatattaatatgttcctccacacatgtaaaggcacagtggctccgtgtgttaaaaaacagctgtattttatgtatgctttactgataagtgtgccaataataaactgtgttaatga

SEQ ID NO: 115738 - DNA, 1108 bp, Artificial Sequence
  derived and/or modified sequence
attcagcggcagatgccagaggaaactgcaaccagctcggggattcggaaccagatgcctgtgatggattattacaatttcctatcatgtaattgcttttctgtttgaccaaagctatcggcaggaccctcatcccccgttactttagcactgtgtttgaaggaggggtgaccgacctgtattacattctcaaacactcgaaagagtcataccacaactcatccatcacggtggactgcgaccagtgtaccatggtcacccagcacgggaagcccatgtttaccaaggtatgtacagaaggcagactgatcttggagttcacctttgatgatctcatgagaatcaaaacatggcactttaccattagacaataccgagagttagtcccgagaagcatcctagccatgcatgcacaagatcctcaggtcctggatcagctgtccaaaaacatcaccaggatggggctaacaaacttcaccctcaactacctcaggttgtgtgtaatattggagccaatgcaggaactgatgtcgagacataaaacttacaacctcagtccccgagactgcctgaagacctgcttgtttcagaagtggcagaggatggtggctccgccagcagaacccacaaggcaaccaacaaccaaacggagaaaaaggaaaaattccaccagcagcacttccaacagcagcgctgggaacaatgcaaacagcactggcagcaagaagaagaccacagctgcaaacctgagtctgtccagtcaggtacctattgctagcattgctcgttctccagtgtcaggctgcgcactaaggacataaactcgcgtggttgttacacatcaggaggcgatgtttatttcctgtagaaatcaaatatgcgtctcggcccccgacattgagacttgaccccgttgtacagtacacgagtgtgtctgtcctagattccccgactcctcccactgttattttaagctgagcttctctctcccaaggtttccctgtaataatgtcagctgctgttcacaggatgtgatggtggtaggagagccaactctgatgggaggtgagtttggggacgaggacgaaaggctaatcactagattaga

SEQ ID NO: 115739 - DNA, 567 bp, Artificial Sequence
  derived and/or modified sequence
gagggctccgacagcagttcccagccagcgtgttcagcctgcctgcctgcctgcctctgaggcatacaccatacatggtacagccagagtaccgaatctatgagatgaacaagagactgcagtctcgcacagaggatagtgacaacctctggtgggacgcctttgccactgaattttttgaagatgacgccacattaaccctttcattttgtttggaagatggaccaaagcgatacactatcggcaggaccctcatcccccgttactttagcactgtgtttgaaggaggggtgaccgacctgtattacattctcaaacactcgaaagagtcataccacaactcatccatcacggtggactgcgaccagtgtaccatggtcacccagcacgggaagcccatgtttaccaaggtatgtacagaaggcagactgatcttggagttcacctttgatgatctcatgagaatcaaaacatggcactttaccattagacaataccgagagttagtcccgagaagcatcctagccatgcatgcacaagatcctcaggtcctggatcagctgtcca

SEQ ID NO: 115740 - DNA, 1498 bp, Artificial Sequence
  derived and/or modified sequence
agcgtgttcagcctgcctgcctgcctgcctctgtgtgtgtgtgagcgtgtgtgcgtgcgtctactttgtactgggaagaacacagcccatgtgctctgcatggacgttactgatactctgtttagcttgattttcgaaaagcaggcaagatgtccagcacaccacatgaccccttctattcttctcctttcggcccattttataggaggcatacaccatacatggtacagccagagtaccgaatctatgagatgaacaagagactgcagtctcgcacagaggatagtgacaacctctggtgggacgcctttgccactgaattttttgaagatgacgccacattaaccctttcattttgtttggaagatggaccaaagcgatacattgtgcattcagcggcagatgccagaggaaactgcaaccagctcggggattcggaaccagatgcctgtgatggattattacaatttcctatcatgtaattgcttttctgtttgaccaaagctatcggcaggaccctcatcccccgttactttagcactgtgtttgaaggaggggtgaccgacctgtattacattctcaaacactcgaaagagtcataccacaactcatccatcacggtggactgcgaccagtgtaccatggtcacccagcacgggaagcccatgtttaccaaggtatgtacagaaggcagactgatcttggagttcacctttgatgatctcatgagaatcaaaacatggcactttaccattagacaataccgagagttagtcccgagaagcatcctagccatgcatgcacaagatcctcaggtcctggatcagctgtccaaaaacatcaccaggatggggctaacaaacttcaccctcaactacctcaggttgtgtgtaatattggagccaatgcaggaactgatgtcgagacataaaacttacaacctcagtccccgagactgcctgaagacctgcttgtttcagaagtggcagaggatggtggctccgccagcagaacccacaaggcaaccaacaaccaaacggagaaaaaggaaaaattccaccagcagcacttccaacagcagcgctgggaacaatgcaaacagcactggcagcaagaagaagaccacagctgcaaacctgagtctgtccagtcaggtacctattgctagcattgctcgttctccagtgtcaggctgcgcactaaggacataaactcgcgtggttgttacacatcaggaggcgatgtttatttcctgtagaaatcaaatatgcgtctcggcccccgacattgagacttgaccccgttgtacagtacacgagtgtgtctgtcctagattccccgactcctcccactgttattttaagctgagcttctctctcccaaggtttccctgtaataatgtcagctgctgttcacaggatgtgatggtggtaggagagccaactctgatgggaggtgagtttggggacgaggacgaaaggctaatcactagattaga

SEQ ID NO: 115741 - DNA, 942 bp, Artificial Sequence
  derived and/or modified sequence
atgagcagcaccccccacgaccccttctacagcagccccttcggccctttttaccgtagacatacaccctatatggtgcagcctgaatatagaatttacgagatgaacaagcgccttcagagtaggacagaggatagcgacaatttgtggtgggatgcattcgcaaccgaatttttcgaggacgacgcaacactcaccctgtccttttgtcttgaggatggacccaagcgctacacaatcggcagaacccttatccccaggtactttagtacggtcttcgagggcggggtcactgacctgtattatattctcaagcactctaaggaatcttatcataactcatctataacggtggactgtgaccagtgtacgatggtcacccagcatggaaagccaatgtttaccaaagtgtgtaccgaaggcagactaattttggagtttacatttgacgatcttatgaggatcaagacttggcacttcacgatcaggcagtaccgggaactggtgccccgttccatcctcgcgatgcatgcgcaggacccgcaagtgttggaccaactctctaaaaatatcacgaggatggggcttacaaacttcactcttaactatttacggctctgcgtaatcttggagccaatgcaagaactgatgagccgccataagacctataacctttccccacgagattgccttaagacttgtcttttccagaagtggcagaggatggtcgccccccccgctgaaccgacccggcagccaactaccaaaagacgtaaaaggaaaaactcaaccagcagcacctcgaattctagcgctggtaacaatgcaaatagcacaggatccaaaaagaagaccacagccgctaatctttccctgagtagccaggtccctatagccagtatcgcgcgctcccccgtgagcggctgcgctctcaggacttag

SEQ ID NO: 115742 - DNA, 570 bp, Artificial Sequence
  derived and/or modified sequence
atggtgacccagcacggcaagcccatgttcaccaaggtgtgcaccgagggaagactgatcttggaatttacatttgatgatctaatgagaattaagacatggcactttaccatccgtcagtacagagagctcgtgcctcgatctatcctcgccatgcacgcccaggatcctcaggtcttggaccagctctctaagaacatcacacgaatggggctgactaacttcacactaaattacctgcgcctgtgcgtgatcttggagccaatgcaggagctgatgtctcggcacaagacatacaatctaagcccgagggactgtctgaagacatgtctttttcagaagtggcagcggatggtggcacctccagccgagcccacccggcagcctaccacaaagcgtcggaagcgcaagaattcaacttcttccacaagcaattcctccgcaggaaataacgctaattccacagggtcgaaaaaaaagactaccgccgctaatctgtccctgagttcccaggtgcctattgcctctatcgcaaggagccctgtctctgggtgcgccttgcgtacctag

SEQ ID NO: 115743 - DNA, 495 bp, Artificial Sequence
  derived and/or modified sequence
atggtgcagcccgagtaccggatctacgagatgaacaagcggctgcagagccggaccgaggacagcgacaacctctggtgggatgcgtttgctacagaattctttgaagacgacgccacactgactctgagtttctgcctcgaggacgggcctaagcgatacaccattggccgaaccctcatccctcggtactttagcactgttttcgagggtggcgtcacagatctgtactatatcctcaagcatagcaaggaatcgtaccataacagtagcatcacagtggactgcgatcaatgtacaatggtaacacaacatggcaaacccatgttcaccaaggtgtgcaccgaagggcggctgattttggagttcacgtttgacgatctgatgcgtataaagacatggcactttacgatacgacagtacagagagctcgtgcccaggagcattctggcaatgcatgcccaggatccacaggtgctggaccagctcagctag

SEQ ID NO: 115744 - DNA, 333 bp, Artificial Sequence
  derived and/or modified sequence
atgagcagcaccccccacgaccccttctacagcagccccttcggccctttctatcggcgtcacacaccctacatggtgcagcccgaatataggatttacgaaatgaacaaacggttacagagccgcaccgaagacagcgataacttgtggtgggacgcttttgccacagagttctttgaagacgacgccacactgactctatccttctgcctggaggatgggcctaaaaggtatattgttcacagtgccgcagacgctagagggaactgtaaccagttaggcgacagtgagccggacgcttgcgacggcctgttgcagtttccgattatgtag

SEQ ID NO: 115745 - DNA, 321 bp, Artificial Sequence
  derived and/or modified sequence
atgagcagcaccccccacgaccccttctacagcagccccttcggccccttttataggagacacactccatatatggtccaacccgagtatagaatctacgaaatgaacaaaagacttcaatcgaggactgaggattccgataatttgtggtgggatgcttttgccaccgagtttttcgaagatgatgccactctgactctctctttttgcctggaggacggacctaagcgataccgcactaaaaatctgcgccccattggcgagaagatgaacatcaatgggaagtgctatagacaggaccctcacccccctcttctctag

SEQ ID NO: 115746 - DNA, 942 bp, Artificial Sequence
  derived and/or modified sequence
atgtcatccaccccacacgaccctttttattcttctcccttcggtcctttttacaggagacatactccgtatatggtacaacccgaatatcgaatctacgaaatgaacaaaagactgcaatcccgtacagaggacagcgataacctctggtgggatgcttttgccacagagttcttcgaggacgatgcaacactaaccctctctttttgcttagaggatggcccaaaacgatataccataggaagaaccctcattcctcgctacttctcaacggtcttcgagggcggagtgacagatctgtattacatccttaagcatagcaaagaatcctatcacaacagctccatcacagtggactgtgaccaatgtaccatggttacccaacacggcaaacccatgtttacaaaggtatgcactgagggtagactcattttggagttcacctttgatgatttgatgcgtatcaagacctggcactttactattcgccagtatagagagcttgtgccaaggagcatcctcgcaatgcacgcacaggaccctcaggtgctggaccagctgtccaaaaacatcacacgtatgggcctgactaactttaccctgaattatctacgtctctgcgtcatccttgagcccatgcaggagctgatgtcccggcataagacttacaatctttctcctagagactgtctgaaaacctgtctgttccagaaatggcaacgaatggtggcaccaccagcggaaccaaccaggcagccaaccaccaagcgcagaaaaagaaaaaatagtaccagcagcacttccaattccagtgcaggaaacaacgccaactcaacagggtccaagaagaagacaactgcagcgaatctgtctttgtctagccaagtgccaatcgcctccattgccaggtctccggtctcgggatgcgcccttagaacctag

SEQ ID NO: 115747 - DNA, 570 bp, Artificial Sequence
  derived and/or modified sequence
atggtgacacagcacggcaaacctatgtttactaaggtgtgtactgaaggaagactcatcctggagtttacctttgacgacctgatgcgcatcaaaacctggcactttacaataagacaatatagagaactggtgcctcgaagtatacttgctatgcacgcccaggacccccaggtgttggatcagctgtcgaagaatattacacggatgggattaacaaatttcacgctgaactatctgcggctctgcgtgatactcgagcccatgcaagagctgatgtcacgccataaaacctataatctttcaccccgagattgcctgaagacctgcttatttcagaaatggcagaggatggtggccccacctgcggagcccaccaggcagcctacaactaaacggaggaaacgtaagaacagcaccagtagtacaagcaactcgtccgctggcaataacgcgaactctactggttcaaagaagaagactacagccgctaatttgagcctgagctctcaggtcccaattgcttcaatcgcaagatcccctgtgtccggttgcgctctgcgcacctag

SEQ ID NO: 115748 - DNA, 495 bp, Artificial Sequence
  derived and/or modified sequence
atggtacagcccgagtaccggatttacgaaatgaacaagcgccttcagtctcgcactgaggattccgacaacctgtggtgggacgcattcgcaaccgagtttttcgaggacgacgcaacccttacactttctttttgcctggaagacggcccaaagagatataccattggaaggaccttaatccccaggtatttttctacggtgtttgaggggggagtgactgatctctactatattcttaaacattctaaggaatcttaccacaactcaagcattaccgtagactgcgatcagtgcactatggtgacacaacacggaaaacctatgtttacaaaggtctgcacagagggcaggctgatcctggaatttacttttgatgatctcatgaggatcaagacctggcacttcactattagacagtatcgagagcttgtcccaaggtctattctggcaatgcatgctcaagatccacaggtgctggaccaactgtcgtag

SEQ ID NO: 115749 - DNA, 333 bp, Artificial Sequence
  derived and/or modified sequence
atgtcatctaccccacacgatcctttttatagcagcccctttggacccttctacagaagacatacgccttacatggtacagcccgagtataggatttatgagatgaataagcggctccagtcccggaccgaagattctgacaatctgtggtgggatgcatttgcaacagagttttttgaggatgatgcaacactgacgttgtccttctgtctcgaggatggccctaagcgatatatcgtgcattccgctgccgatgctagaggcaactgtaatcagttgggagattctgagcctgatgcttgtgatggactgctccagtttcctatcatgtag

SEQ ID NO: 115750 - DNA, 321 bp, Artificial Sequence
  derived and/or modified sequence
atgtcttccacacctcatgatcctttttattcttcgccattcggacccttctatcgcagacacactccgtatatggtccagccggaataccggatttacgaaatgaacaaacgactgcagagcagaaccgaagactctgacaatttatggtgggacgccttcgccaccgagttctttgaggatgacgctacgcttactttatcattctgtctcgaagacggccctaaaaggtataggacaaaaaacctccgccctatcggcgagaaaatgaacattaacggaaagtgctacagacaggatccccatcctcccctgctgtag

SEQ ID NO: 115751 - DNA, 942 bp, Artificial Sequence
  derived and/or modified sequence
atgagcagcaccccccacgaccccttctacagcagccccttcggccccttctacagaagacacaccccctacatggtgcagcccgagtacagaatctacgagatgaacaagagactgcagagcagaaccgaggacagcgacaacctgtggtgggacgccttcgccaccgagttcttcgaggacgacgccaccctgaccctgagcttctgcctggaggacggccccaagagatacaccatcggcagaaccctgatccccagatacttcagcaccgtgttcgagggcggcgtgaccgacctgtactacatcctgaagcacagcaaggagagctaccacaacagcagcatcaccgtggactgcgaccagtgcaccatggtgacccagcacggcaagcccatgttcaccaaggtgtgcaccgagggcagactgatcctggagttcaccttcgacgacctgatgagaatcaagacctggcacttcaccatcagacagtacagagagctggtgcccagaagcatcctggccatgcacgcccaggacccccaggtgctggaccagctgagcaagaacatcaccagaatgggcctgaccaacttcaccctgaactacctgagactgtgcgtgatcctggagcccatgcaggagctgatgagcagacacaagacctacaacctgagccccagagactgcctgaagacctgcctgttccagaagtggcagagaatggtggccccccccgccgagcccaccagacagcccaccaccaagagaagaaagagaaagaacagcaccagcagcaccagcaacagcagcgccggcaacaacgccaacagcaccggcagcaagaagaagaccaccgccgccaacctgagcctgagcagccaggtgcccatcgccagcatcgccagaagccccgtgagcggctgcgccctgagaacctag

SEQ ID NO: 115752 - DNA, 570 bp, Artificial Sequence
  derived and/or modified sequence
atggtgacccagcacggcaagcccatgttcaccaaggtgtgcaccgagggcagactgatcctggagttcaccttcgacgacctgatgagaatcaagacctggcacttcaccatcagacagtacagagagctggtgcccagaagcatcctggccatgcacgcccaggacccccaggtgctggaccagctgagcaagaacatcaccagaatgggcctgaccaacttcaccctgaactacctgagactgtgcgtgatcctggagcccatgcaggagctgatgagcagacacaagacctacaacctgagccccagagactgcctgaagacctgcctgttccagaagtggcagagaatggtggccccccccgccgagcccaccagacagcccaccaccaagagaagaaagagaaagaacagcaccagcagcaccagcaacagcagcgccggcaacaacgccaacagcaccggcagcaagaagaagaccaccgccgccaacctgagcctgagcagccaggtgcccatcgccagcatcgccagaagccccgtgagcggctgcgccctgagaacctag

SEQ ID NO: 115753 - DNA, 495 bp, Artificial Sequence
  derived and/or modified sequence
atggtgcagcccgagtacagaatctacgagatgaacaagagactgcagagcagaaccgaggacagcgacaacctgtggtgggacgccttcgccaccgagttcttcgaggacgacgccaccctgaccctgagcttctgcctggaggacggccccaagagatacaccatcggcagaaccctgatccccagatacttcagcaccgtgttcgagggcggcgtgaccgacctgtactacatcctgaagcacagcaaggagagctaccacaacagcagcatcaccgtggactgcgaccagtgcaccatggtgacccagcacggcaagcccatgttcaccaaggtgtgcaccgagggcagactgatcctggagttcaccttcgacgacctgatgagaatcaagacctggcacttcaccatcagacagtacagagagctggtgcccagaagcatcctggccatgcacgcccaggacccccaggtgctggaccagctgagctag

SEQ ID NO: 115754 - DNA, 333 bp, Artificial Sequence
  derived and/or modified sequence
atgagcagcaccccccacgaccccttctacagcagccccttcggccccttctacagaagacacaccccctacatggtgcagcccgagtacagaatctacgagatgaacaagagactgcagagcagaaccgaggacagcgacaacctgtggtgggacgccttcgccaccgagttcttcgaggacgacgccaccctgaccctgagcttctgcctggaggacggccccaagagatacatcgtgcacagcgccgccgacgccagaggcaactgcaaccagctgggcgacagcgagcccgacgcctgcgacggcctgctgcagttccccatcatgtag

SEQ ID NO: 115755 - DNA, 321 bp, Artificial Sequence
  derived and/or modified sequence
atgagcagcaccccccacgaccccttctacagcagccccttcggccccttctacagaagacacaccccctacatggtgcagcccgagtacagaatctacgagatgaacaagagactgcagagcagaaccgaggacagcgacaacctgtggtgggacgccttcgccaccgagttcttcgaggacgacgccaccctgaccctgagcttctgcctggaggacggccccaagagatacagaaccaagaacctgagacccatcggcgagaagatgaacatcaacggcaagtgctacagacaggacccccacccccccctgctgtag

SEQ ID NO: 115756 - DNA, 2955 bp, Artificial Sequence
  derived and/or modified sequence
atggcccccggcatgagcggcagaggcggcgccgccctgctgtgcctgagcgccctgctggcccacgccagcggcagaagccaccccgccagccccagcccccccggcccccaggccagccccgtgctgcccgtgagctacagactgagccacaccagactggccttcttcctgagagaggccagaccccccagccccgccgtggccaacagcagcctgcagagaagcgagcccttcgtggtgttccagaccaaggagctgcccgtgctgaacgtgagcctgggccccttcagcaccagccaggtggtggccagagagctgctgcagcccagcagcaccctggacatccccgagagactgaccgtgaactggaaggtgagagccttcatcgtgagaagccacgtgcccgccagccagcccgtggtgcaggtgctgttctacgtggccggcagagactgggacgacttcggcgtgaccgagagactgccctgcgtgagactgcacgccttcagagacgccagagagcaccccctgctgagaatcggcagcatcagcctgttcagacccccccccagaagaaccctgcaggagcacagactggacagcaacctgatgatcagactgcccgacagacccctgaagcccggcgaggtgctgagcatcctgctgtacctggcccccaacagcagcagccccagcagccccagcgtggagcacttcaccctgagagtgaaggccaagaagggcgtgaccctgctgggcaccaagagcagaagcggccagtggcacgtgaccagcgagctgctgaccggcgccaagcacagcaccgccaccgtggacgtggcctgggcccagagcacccccctgccccccagagagggccagggccccctggagatcctgcagctggacttcgagatggagaacttcaccagccagagcgtgaagagaagaatcatgtggcacatcgactacagaggccacggcgccctgcccgacctggagagagccgtgaccgagctgaccgtgatccagagagacgtgcaggccatcctgcccctggccatggacaccgagatcatcaacaccgccatcctgaccggcagaaccgtggccatccccgtgaaggtgatcgccatcgaggtgaacggcctggtgctggacatcagcgccctggtggagtgcgagagcgacaacgaggacatcatcaaggtgagcagcagctgcgactacgtgttcgtgagcggcaaggagagcagaggcagcatgaacgccagagtgaccttcagatacgacgtgctgaacgcccccctggagatgaccgtgtgggtgcccaagctgcccctgcacatcgagctgagcgacgccagactgagccaggtgaagggctggagagtgcccatcctgcccgacagaagaagcgtgagagagagcgaggacgaggacgaggaggaggaggagagaagacagagcgccagcagaggctgcaccctgcagtaccagcacgccaccctgcaggtgttcacccagttccacaccaccagcagcgagggcaccgaccaggtggtgaccatgctgggccccgactggctggtggaggtgaccgacctggtgagcgacttcatgagagtgggcgaccccagagtggcccacatggtggacagcagcaccctggccggcctggagcccggcaccacccccttcaaggtggtgagccccctgaccgaggccgtgctgggcgagaccctgctgaccgtgaccgaggagaaggtgagcatcacccagctgcaggcccaggtggtggccagcctggccctgagcctgagacccagccccggcagcagccacaccatcctggccaccaccgccgcccagcagaccctgagcttcctgaagcaggaggccctgctgagcctgtggctgagctacagcgacggcaccaccgcccccctgagcctgtacagccccagagactacggcctgctggtgagcagcctggacgagcacgtggccaccgtgacccaggacagagccttccccctggtggtggccgaggccgagggcagcggcgagctgctgagagccgagctgaccatcgccgagagctgccagaagaccaagagaaagagcgtgctggccaccacccccgtgggcctgagagtgcacttcggcagagacgaggaggaccccacctacgactaccccggccccagccagcccggccccggcggcggcgaggacgaggccagaggcgccggcccccccggcagcgccctgcccgcccccgaggcccccggccccggcaccgccagccccgtggtgccccccaccgaggacttcctgcccctgcccaccggcttcctgcaggtgcccagaggcctgaccgacctggagatcggcatgtacgccctgctgggcgtgttctgcctggccatcctggtgttcctgatcaactgcatcgtgttcgtgctgagatacagacacaagagaatcccccccgagggccagaccagcatggaccacagccaccactgggtgttcctgggcaacggccagcccctgagagtgcagggcgagctgagcccccccgccggcaaccccctggagaccgtgcccgccttctgccacggcgaccaccacagcagcggcagcagccagaccagcgtgcagagccaggtgcacggcagaggcgacggcagcagcggcggcagcgccagagaccaggccgaggaccccgccagcagccccaccagcaagagaaagagagtgaagttcaccaccttcaccaccctgcccagcgaggagctggcctacgacagcgtgcccgccggcgaggaggacgaggaggaggaggaggacctgggctggggctgccccgacgtggccggccccaccagacccaccgccccccccgacctgcacaactacatgagaagaatcaaggagatcgcctag

SEQ ID NO: 115757 - DNA, 2955 bp, Artificial Sequence
  derived and/or modified sequence
atggcgccaggaatgtctggtagaggcggagctgctctactgtgcttgagcgcgctactagcccatgcatctggccggtcccatccagctagcccatctccacccggtccccaagcttctcctgtcctgccagttagctatcgtttaagccacacacgtctggcctttttcttacgggaggcacgacccccgtctcccgccgtggcaaactcctcgctccagcgaagtgaaccctttgtggtctttcaaacaaaggagttgcccgtgttaaatgtgagtctcggccccttttcgacgagtcaggtcgttgccagggagttgctgcagccctcatctacactggacatccctgagcgacttacggtcaattggaaggttcgggcctttattgtccgtagtcacgttcccgccagtcaacccgttgttcaggtgctcttctacgttgctggtcgggattgggacgattttggcgtcacagaaagactcccctgtgtgcgcctgcacgcttttagggatgccagggagcatccccttctgagaattggttcaatctcattatttagaccccctcccagacggaccctacaggaacataggttggacagtaatttaatgattcggctcccagatagaccgcttaagcccggagaagttcttagcattctcctctatcttgcccccaattccagctcaccaagctctcccagtgtagagcactttacccttagggtgaaagccaaaaagggcgtgaccctgctgggtacaaaaagccggtcagggcagtggcacgtgacatccgagcttttgaccggggccaaacactctaccgctactgtcgacgtggcatgggcccagtctacgcccctgccaccgcgggaaggccagggcccgctagaaattctacaactggatttcgagatggaaaatttcacctcccaatccgtaaagcgaagaattatgtggcacatcgactatcgcggacacggcgctctgccggatttagaacgggcggtgaccgagctgactgtgatccagagagacgtgcaggcgatcttgccccttgccatggacacggaaatcattaacacagctatcctaaccggcagaacggtcgcaatcccagttaaggttattgcaatcgaagtgaatggactagtcctcgatatatcagcattagtcgaatgtgagtccgataatgaagacattataaaagtaagcagttcttgtgattacgtcttcgtgagcggaaaagaatcgaggggatcgatgaatgcccgggtgacgttccgttacgatgttctgaatgcgccactggagatgacggtttgggtccctaagttgcccctgcatattgaattatcggacgcacgactctcccaggtgaaagggtggcgcgttccaatcctgccggacaggcgctccgtccgcgagagtgaggatgaagacgaagaagaagaggaaaggcggcagagcgcatcccgcggatgcacactgcaataccagcatgcgacgctgcaggtattcacacagttccacacaactagcagcgagggaactgaccaagttgtgacaatgcttggccccgattggctcgtagaggttacggatctggtgtctgatttcatgagagtgggggatccccgggtggcccatatggtggacagctctacactagccggcttagaaccaggaaccacaccttttaaagtggtctctccactaaccgaggcagtactcggcgagactctgctcaccgttacagaagagaaagtgtctatcacccagcttcaggctcaggtcgtggcaagccttgccttgagtcttcgaccatctcctggatcctcccatactatactggccacaacagcagcccaacaaaccttatctttcttaaagcaggaggctctcctgtctttatggctcagctactccgacggtacgaccgccccattaagtttgtactcccctcgcgactacgggctgctggtaagcagcctggatgagcacgtcgccacagtcacccaagatcgggcattccccctcgttgttgcagaggccgaaggttcaggagaattactacgcgccgaacttacgatagccgagtcctgccaaaagaccaagcggaaatccgtgctcgccacaacaccagtaggacttcgcgtccattttgggagagacgaagaggaccccacttacgactacccgggacctagccagccgggaccgggaggtggggaagacgaagcgcgcggcgccggtcctccaggatcagcactgccggcacccgaggcccctggccccggaaccgctagtcccgtggtgccaccaacagaggactttctcccactgccaacaggctttctacaagttcccagagggctcacagaccttgagatcggaatgtacgctctgctcggcgttttttgtctggcaatcctggtctttctgataaactgtatcgtctttgtactaagataccgccacaagcgaataccacctgagggccaaacctcgatggaccattcccaccactgggtctttctgggaaatggacagcccctgagggttcagggcgaactgtcccctcctgccggtaaccccctggagactgtgccagccttctgccatggcgatcaccactcatcaggaagttcacaaaccagcgtgcagtcccaggtccatggaaggggggacggttcatctgggggctccgctagagaccaggcagaggatcccgcctcatcccctacttcgaagaggaaacgggtaaagttcaccactttcactaccctcccatcagaagaactggcctatgatagcgttcccgctggtgaagaagatgaggaggaagaagaagatctggggtggggttgtcctgatgtggctggccctacccggcctacagctccccccgacctacacaactacatgcgacggatcaaagaaattgcctag

SEQ ID NO: 115758 - DNA, 2955 bp, Artificial Sequence
  derived and/or modified sequence
atggcccctggcatgagcggccggggcggggccgccctgctgtgcctgagcgccctgctggcccacgccagcggccgcagccacccagccagccccagccccccaggcccccaggccagccctgtgctgcctgtgtcctaccgcctgagccacacccggctggccttcttcctgcgggaggcccggccccccagccctgctgtggccaacagcagcctgcagaggtctgagccctttgtggtgttccagaccaaggagctgcctgtgctgaatgtgtccctgggccccttcagcaccagccaggtggtggcccgggagctgctgcagcccagcagcaccctggacatccctgagcggctgactgtgaactggaaggtgcgggccttcatcgtgcgcagccacgtgcctgccagccagcctgtggtgcaggtgctcttctacgtggccggccgggactgggatgactttggagtgacagagcggctgccctgtgtgcggctgcacgccttcagagatgcccgggagcaccccctgctgagaattggcagcatcagcctcttccggcccccacccaggaggaccctgcaggagcaccggctggacagcaacctgatgatccggctgcctgaccggcccctgaagccaggagaggtgctgagcatcctgctgtacctggcccccaacagcagcagccccagcagccccagcgtggagcacttcaccctgcgggtgaaggccaagaagggcgtgaccctgctgggcaccaagagccgcagcggccagtggcacgtgaccagcgagctgctgaccggggccaagcacagcacagccaccgtggatgtggcctgggcccagagcacccccctgcccccccgggagggccagggccccctggagatcctgcagctggactttgagatggagaacttcaccagccagagcgtgaagaggcgcatcatgtggcacatcgactaccggggccacggggccctgcctgacctggagagagctgtgacagagctgaccgtcatccagagagatgtgcaggccatcctgcccctggccatggacacagagatcatcaacacagccatcctgactggaagaacagtggccatccctgtgaaggtgattgccatcgaggtgaatggcctggtgctggacatcagcgccctggtggagtgtgagagtgacaatgaagacatcatcaaggtgagcagcagctgtgactatgtgtttgtgtctgggaaggagagccggggctccatgaatgcccgggtgaccttccgctatgatgtgctgaatgcccccctggagatgacagtgtgggtgcccaagctgcccctgcacatcgagctgagtgatgcccggctgagccaggtgaagggctggagggtgcccatcctgcctgaccggcgctctgtgcgggagagtgaagatgaagatgaggaggaggaggagcggcggcagagcgccagccggggctgcaccctgcagtaccagcacgccaccctgcaggtgttcacccagttccacaccaccagcagcgagggcacagaccaggtggtgaccatgctgggccctgactggctggtggaggtgacagacctggtgtctgacttcatgagggtgggggacccccgggtggcccacatggtggacagcagcaccctggccggcctggagcccggcaccacccccttcaaggtggtgagccccctgacagaagctgtgctgggggagaccctgctgactgtgacagaggagaaggtgtccatcacccagctgcaggcccaggtggtggccagcctggccctgagcctgcggcccagccctggcagcagccacaccatcctggccaccacagctgcccagcagaccctgtccttcctgaagcaggaggccctgctgagcctgtggctgagctacagtgatggcaccacagcccccctgagcctgtacagcccccgggactatggcctgctggtgagcagcctggatgaacatgtggccaccgtgacccaggaccgggccttccccctggtggtggccgaggccgagggcagcggggagctgctgcgggcagagctgaccatcgccgagagctgccagaagaccaagaggaagtctgtgctggccaccacccctgtgggcctgcgggtgcacttcggcagagatgaggaggaccccacctatgactacccaggccccagccagcccggccctgggggcggggaggatgaggcccggggggccggccccccaggcagcgccctgcctgcccctgaggcccctggccctggaacagccagccctgtggtgcccccaacagaggacttcctgcccctgcccaccggcttcctgcaggtgccccggggcctgacagacctggagatcggcatgtatgccctgctgggcgtcttctgcctggccatcctggtgttcctgatcaactgcatcgtgtttgtgctgcgctaccgccacaagaggatccccccagagggccagacctccatggaccacagccaccactgggtgttcctgggcaatggccagcccctgcgggtgcagggcgagctgagccccccagctggcaaccccctggagaccgtgcctgccttctgccacggggaccaccacagcagcggcagcagccagacctctgtgcagagccaggtgcacggcagaggagatggcagcagcggcggcagcgcccgggaccaggccgaggaccctgccagcagccccaccagcaagaggaagagggtgaagttcaccaccttcaccaccctgcccagcgaggagctggcctatgacagcgtgcctgctggggaggaggatgaggaggaggaggaggacctgggctggggctgcccagatgtggccggccccacccggcccacagcccccccagacctgcacaactacatgaggcgcatcaaggagatcgcctag

SEQ ID NO: 115759 - DNA, 2955 bp, Artificial Sequence
  derived and/or modified sequence
atggcccccggcatgagcggccggggcggcgccgccctgctgtgcttgtcggccttactcgcccacgctagcggcaggtcacacccggcgagtccctcaccccccggcccccaagcctcccccgtgcttccagtcagctaccgtctatcccacacccgcctagctttcttccttcgcgaagcccgtcctccttctccggcagttgctaactcttctctccaacggagcgaaccttttgtcgtatttcagactaaagagctaccggtcctgaacgtgtccctgggacccttttctacatctcaggtcgtggctcgcgagttattacagcctagctcgaccctggatatccccgaacgcctcaccgtgaactggaaggttcgggcattcatcgtccgaagccacgtgcccgcaagccagcccgtagtccaagttctcttttacgtggcaggccgagattgggatgatttcggcgtaaccgagcggttgccctgtgtgcggttacatgctttccgtgatgccagagagcatcctttactgaggatcggcagtatctcattgttcaggccaccccccaggcgtaccctccaggaacacagactcgattcaaatctgatgatccggctcccggaccggccgttaaaaccgggcgaagtcctcagtatactactgtatctggctccaaatagctcttccccaagttccccttccgtcgagcactttacattgcgggtaaaagccaaaaagggcgttacattgcttggaaccaagtcccggtccgggcagtggcatgtgaccagtgaattgctcaccggcgcaaagcacagtactgcaactgtcgacgtggcctgggcacagtccactccactgccaccccgcgaggggcagggacctctggaaattctgcagctggactttgaaatggagaactttacctcacagtccgtgaaacgacggataatgtggcatatcgactaccgcggccacggggctttgcccgatttagaaagagccgtgactgaacttacagttatccagagggacgttcaagctatacttcctcttgctatggacactgaaataattaacactgccatcctaacaggaagaaccgtggctattccagtgaaggtgattgcaatcgaagtgaacggtcttgtgttggacatcagcgctctggttgagtgcgagtctgacaacgaggatatcatcaaggtgtcatcatcatgcgattatgtgttcgtctcaggtaaggagagcagaggttcaatgaacgccagagtcacttttcgatacgacgtcctgaatgccccactggaaatgacagtgtgggtgcccaagctacctcttcacattgaactgagtgacgcccgtttgtcccaagtgaaaggatggagggttcctatcctccccgaccggcgctctgtaagagaatcagaggatgaggacgaagaggaggaagagaggcgccaaagcgccagtcgcggctgcactctgcagtaccagcatgctaccctgcaggtgttcacacaatttcataccacttctagcgagggaaccgaccaggtcgtgaccatgttggggcccgactggctagttgaagtaaccgatctggtcagcgatttcatgagggtgggtgatcctagggtggcacacatggtggattcctccaccctggccggcctggaacctggcactactccttttaaagtggtatcccccctgactgaggcagtgcttggcgagacactgctgaccgtgacagaagagaaagttagcatcacgcagctgcaggcccaagttgttgccagtctggccctctcactgcggccaagtccaggtagttcacacacaatcttggctacaaccgccgctcagcagaccctgtcattcttaaaacaggaagcattactgtctctgtggctctcgtattcagatgggaccactgcccctctgtctttgtattcaccgagagattatggtttgctggtatcttcattggacgagcacgtggccacggtgacgcaggacagagcttttcccctcgtcgtggctgaagcggagggttcaggggagcttctgagagccgaactgactattgctgagagctgtcagaaaaccaaaaggaagagcgtcctcgccaccacacccgttgggctgcgcgtgcattttgggagagacgaggaagaccccacttatgactatcctggtccaagccagcccgggccgggaggcggggaggacgaggcccggggagcggggcccccagggagcgccctgcccgctcctgaagccccagggccagggaccgcgagcccggtggtgccccccactgaggacttcctgcctttgcccactggattcctgcaggtcccccggggcctgaccgatctggagattggtatgtacgccttattgggagtattttgcctcgctattctggtatttcttatcaactgcatcgtctttgtgctgagatacagacacaagcgcattcctcctgaagggcagacttcgatggaccatagccatcattgggtttttctgggcaatggccagcccttacgtgtccagggcgaactgtcaccccccgcgggcaatcccctcgagacagttcccgccttttgtcacggagaccatcactccagcgggagctcccaaacgtccgtgcagtcacaggtccacgggcggggtgacggttcgtcaggaggatcggccagggatcaggccgaagacccagcttctagcccaacaagcaagcggaagcgcgtaaaattcaccaccttcactacacttccatccgaggagctcgcctacgatagtgtgcctgctggagaagaggacgaagaggaggaggaagaccttggctggggatgccccgacgtggctggaccaacacggcctactgcaccccccgatctgcataattatatgaggcgaatcaaggagatcgcctag

SEQ ID NO: 115760 - DNA, 2955 bp, Artificial Sequence
  derived and/or modified sequence
atggctccaggcatgtcaggcagagggggagccgcactcttgtgcctcagcgcattgctggcccacgcctcggggcgatctcaccctgccagtccctccccgcctggccctcaggctagcccagtgctgccagtcagttaccgcctctcccacacaaggctggccttttttctgcgcgaggcacggcctccttcccctgctgtcgctaattccagcctgcagcggagcgagcctttcgtggtgtttcagactaaagaactccccgtgctgaatgtgtctctggggccattttccacctctcaggtggtggcaagagagctcctgcagccttcctctactctcgatatacccgagaggcttactgtgaattggaaagtgcgtgcattcatagtaagaagccatgttcccgcttcgcagccagtcgtacaggttttgttctatgttgctggcagggactgggacgacttcggagtgactgaacggctgccatgcgtgcgtctgcatgcctttagggatgccagagagcatccactgctgcgaattggctccatatcacttttccgcccacctccgagaagaaccttacaggaacacagactagacagcaacctgatgatcagactccctgaccgaccgctgaaaccaggggaagtcttgtctatccttttatatctggctcccaacagttctagtcccagttctccatcggtggaacacttcacactgcgtgtgaaggctaagaaaggtgtcaccctgcttgggactaagtctcggtcaggtcaatggcatgttacctccgagctcctcacgggtgcgaagcacagcaccgctaccgtcgacgtggcctgggcccaatcaacacctctcccacctcgcgaaggccagggacccttggaaattctgcagctggacttcgagatggaaaacttcactagccagagcgtgaagagaaggatcatgtggcatatcgactaccggggtcacggtgccctccctgatttggaacgcgctgtcacagagctgacggtgatacagagggatgtccaggccattctccccctggcaatggatacagagatcataaatactgcaatacttacaggccgtactgtggccataccagtgaaggtgatcgccattgaagttaacggcctggttttagacatctcagcgctcgtcgaatgcgaatccgataacgaggacatcatcaaggtatcatcctcgtgtgactacgtgtttgtgagcggtaaggaatcccggggtagtatgaacgcacgcgtgacctttcgttacgatgtgttgaacgctccattggagatgactgtatgggtgccaaagctaccccttcacatcgaattgtcagacgcccgactctctcaagttaagggctggcgtgtcccaatacttcctgatcggagaagcgtgcgcgaaagcgaggatgaagatgaagaggaagaggaacggagacagtctgcctcacgcggttgcaccctccaatatcagcatgccacactgcaggtgttcactcaattccatactacctcaagcgagggaacggatcaggtggtcaccatgcttggacctgactggctggtggaggtcacagacttagtttctgactttatgcgggtcggcgatcccagggtcgctcacatggtggactcaagcaccttggccggactggagccaggtacaaccccttttaaagtcgtttcccctctgaccgaggccgtgctgggagagaccctgctgacagtgactgaggaaaaagttagcattacccaactgcaagcccaggtcgttgctagcctggctttgtcactgaggcctagtcctgggagctcccataccattcttgccactacagctgcccagcagaccctctcattcctcaagcaggaagctctcttgtctttgtggttaagctactctgacgggaccacggcaccacttagcctgtacagcccaagagactacggcctcctggtatcttccttggacgagcatgtggccacagtgacccaagaccgcgcattccctctggtggtggctgaagcggagggcagtggcgagctcctccgggcagagttgaccatagcagaatcgtgtcagaaaacaaagagaaagtcagtgttggccactactccagtaggcttgagagtacactttggacgtgacgaggaggatcctacttacgattaccccggaccttcacagccaggcccagggggaggggaggatgaggctcgcggagctggacccccaggctcagctctaccagcgccagaggcccctggacccggtaccgcctcacccgtcgtacctcctaccgaggacttcttacctctccctaccggtttcttacaggtgccgaggggtctgactgatctggaaataggcatgtacgcattgctcggtgtcttctgcctcgctatattggtgttcctaataaactgcattgtattcgtgttacggtacagacataaacgtatccctcccgaaggccagactagtatggaccactctcaccactgggtgtttctgggcaatgggcagcccctgcgtgtccaaggggaactctctccacccgctggcaaccctttggaaactgtgcctgccttctgtcacggggatcatcactccagcggctctagtcagacatctgtgcagtctcaagttcacgggaggggcgacggcagttcaggaggcagtgcccgtgatcaggccgaggatccggcatccagtcctacatccaagaggaagcgcgtgaagtttaccacttttaccaccctcccaagtgaggagcttgcctatgatagtgtgccggcaggagaagaggatgaagaagaggaggaagacttgggatggggctgccccgacgtggccggtcctacacgcccaacagctcctcccgatctgcacaactacatgagacggatcaaggaaattgcctag

SEQ ID NO: 115761 - DNA, 4195 bp, Artificial Sequence
  derived and/or modified sequence
aaagtgtccccgaattgcactctctggtcccggagctgcatctgagacagccgggcgccacggcagccctgagttggatgtgaccaagcccagcctggggccaagtcgtcgtcgactgttgctctctcggacccctcccgcccccgcctcggccatggccccggggatgtcgggccgcggcggcgccgccctgctctgcctctcagcgctactcgcccacgcctctggccgctcccacccggccagccccagcccgccggggccgcaggccagcccggtgctgccagtcagctaccgcctgtcgcacacgcggctggccttcttcctgcgggaggcgcggcccccgtcacccgcggtcgccaacagctctctgcagcgctccgagcccttcgtggtgttccagaccaaggagctgccggtcctcaacgtctctctggggcccttcagcaccagccaggtggtggcgcgggagctcctgcagccgtccagcaccctggacatccccgagcgcctgacggtgaactggaaggtgcgggccttcatcgtccgctcgcacgtgcccgcctcgcagcccgtggtccaggtgctgttctacgtagccggccgggactgggacgacttcggcgtcaccgagcggctgccctgtgtccgcctgcatgccttccgggatgcccgggaacaccccctgctgcgcatcgggagcatcagcctgttccgcccgccccccaggaggaccctgcaggagcacaggctggacagcaacctgatgatccgcctgccagaccggcccctcaagcccggggaagtgctcagcatcctcctctatctggcccccaactcctcctcgccctccagccccagcgtggagcacttcacactcagggtgaaggccaagaagggtgtgacccttttaggtaccaagtcacggagtggccagtggcatgtgacctcggagctgctgactggggcaaagcactcaacagccaccgtggatgtggcctgggctcagagcacacccctgccccccagggagggccagggccccttggagatcttgcagctggactttgaaatggagaacttcaccagccagtcagtcaagcggaggatcatgtggcacattgactaccgtggccacggcgccctgcctgacctggagcgggcagtcactgagctgacggtcattcagcgggatgtgcaagccatcctgcccctggccatggacacagagatcatcaacacggccattctgactggccggacagtggccatccctgtcaaggtcattgccatcgaggtgaatggcctcgtcctggacatctccgccctagtggaatgcgagtctgacaatgaagacatcatcaaggtatccagcagctgtgactacgtgtttgtgagtggaaaagagtctcgagggtccatgaacgccagggtcaccttccgctacgacgtcctcaatgctcccctggaaatgacagtctgggtccccaagctgcccttgcacattgagctctcagatgcccgcctcagccaagtgaagggctggagggtacctatcctccccgaccggaggtcagtccgggaaagcgaggatgaggatgaggaggaggaggagcggcggcagagtgcaagccgtggctgcaccctgcagtaccagcatgccaccctgcaggtcttcacccagttccacacgacatcatccgagggcactgaccaggtggtcaccatgttaggcccggactggctggtggaggtcaccgacctagtcagtgacttcatgcgggtgggcgatccccgagtggcacacatggtggacagcagcacgctggcaggactggagccaggcaccaccccctttaaggtggtgtctccgctgacggaggctgtgctcggggagacgctgctgacggtgactgaggagaaggtcagcatcacacagcttcaggcccaggtggtggccagcctggccctctccctgcggcccagccctgggagcagccacaccatcctagccaccacagctgcccaacagaccttgagcttcctcaagcaggaagccctactgagcctctggctctcctacagtgatggcaccacagccccactctccctctacagcccacgagactatggactgctagtgagcagcctggatgagcatgtggccactgtgacccaggaccgggccttccctctggtagtggctgaggccgaggggtcaggggagctgcttcgcgcagagctaaccatcgctgagagctgccagaaaaccaaacgcaagagtgtgctcgccacgacccctgtgggcctgcgggtgcactttgggagggacgaggaggaccccacttatgactacccgggccccagccaaccagggcccggcgggggcgaggacgaggcccggggagctggcccgccgggctctgcgctacccgcaccggaggctccaggcccgggcaccgccagccccgtcgtgccacccacagaagacttcctgccgctgcccaccggcttcctgcaggtgccacggggtctgacagacctggagatcggcatgtacgcgctgctgggcgtcttctgcctcgccatcctcgtcttcctcatcaactgcatcgtttttgtgctgcgctaccggcacaagcgcatcccgcccgagggccagaccagcatggaccactctcaccactgggtgttcctgggcaacgggcagccgctgcgggtgcaaggagagctgtcgccgccagcaggcaacccgctggaaaccgtgcccgccttctgccacggcgaccaccacagcagcggcagctcgcagaccagcgtccagagccaggtgcacggcaggggcgacggctcctcgggcggctcagcccgagaccaagccgaggaccccgccagctcgcccacctccaagcgcaagcgggtcaagttcaccaccttcaccacgctgccgtcagaggagctggcctatgactcggtgcccgcgggcgaagaggacgaggaggaggaagaggacctgggttggggctgcccggatgtggcgggccccacgcggcccactgcacccccggacctgcacaattacatgcgcagaatcaaagagattgcatagaggcgccagccggagtagcagggacccccccccccaacggggtcagctcggggtaggacacagccgggaccccggttcacactgactctgggcggctgaattgattttgtactccctgcccctgcagcttggctccgtgcggagcgggccgcctcagtgtctgggccttccctcgcctcacgccattaccctcttctgccccctgcaggtggagggctcttcctccagtggctcgtaaggaggaaagcaaccccagcctctgttctgccctttccaaacctcctcccatcttaagcaaccccctgccccaagagtgaggcaaggaggtccagcttggggtcaggtgggcccacgctgtgtcccgggcccgcctcccgtcccccgtgtcgtccccctgtgcagggggttctgtgggggtcttgtgtcacaggctgcacaaagactttcctcaaactaatattcagggatttctgtcctgcagggtggggaggtggcagctgcctgccctgccaaggatcttgctgtggacgaaatatctgggggttagggggacagttgtagcatctgctggcattcgggtgcctcccaggacctgggagctgactctacagagaggtctggtgccaagccaggcaccttcctgagttctcaggactcccacctctgccccaagggctttgggcagggacctaaaggggaaagagtcctggatccatctctagccaaatcacaccccagagccagaggcctggggacctccttgccttccccgtcccccacagcaaggtcaacactactacgccttagccacccgtcaccctgctgactgcgacttccctctgcagcacagggcaggcagccacctatgccccacaagacggaacccgggaggggagtagagggcaccagggaatgctgtgagggacttcagggtgggcaaatgcagaagggagccagtgtcgcccctaccccatcccacagccatttttctctcgggttctacccaccactgtgtcggatttttcttaaataaatggaagcggtcagactggaggtgggggcagcagctcccatgaacagagagta

SEQ ID NO: 115762 - protein, 640 aa, Artificial Sequence
  derived and/or modified sequence
MESVVRRCPFLSRVPQAFLQKAGKSLLFYAQNCPKMMEVGAKPAPRALSTAAVHYQQIKETPPASEKDKTAKAKVQQTPDGSQQSPDGTQLPSGHPLPATSQGTASKCPFLAAQMNQRGSSVFCKASLELQEDVQEMNAVRKEVAETSAGPSVVSVKTDGGDPSGLLKNFQDIMQKQRPERVSHLLQDNLPKSVSTFQYDRFFEKKIDEKKNDHTYRVFKTVNRRAHIFPMADDYSDSLITKKQVSVWCSNDYLGMSRHPRVCGAVMDTLKQHGAGAGGTRNISGTSKFHVDLERELADLHGKDAALLFSSCFVANDSTLFTLAKMMPGCEIYSDSGNHASMIQGIRNSRVPKYIFRHNDVSHLRELLQRSDPSVPKIVAFETVHSMDGAVCPLEELCDVAHEFGAITFVDEVHAVGLYGARGGGIGDRDGVMPKMDIISGTLGKAFGCVGGYIASTSSLIDTVRSYAAGFIFTTSLPPMLLAGALESVRILKSAEGRVLRRQHQRNVKLMRQMLMDAGLPVVHCPSHIIPVRVADAAKNTEVCDELMSRHNIYVQAINYPTVPRGEELLRIAPTPHHTPQMMNYFLENLLVTWKQVGLELKPHSSAECNFCRRPLHFEVMSEREKSYFSGLSKLVSAQA

SEQ ID NO: 115763 - protein, 114 aa, Artificial Sequence
  derived and/or modified sequence
MESVVRRCPFLSRVPQAFLQKAGKSLLFYAQNCPKMMEVGAKPAPRALSTAAVHYQQIKETPPASEKDKTAKAKVQQTPDGSQQSPDGTQFRLDTPCLPQARALQANALSWQHR

SEQ ID NO: 115764 - DNA, 1923 bp, Artificial Sequence
  derived and/or modified sequence
atggagtcggtggtgcgccgctgcccatttctttccagggtgcctcaggcatttctgcagaaggccggaaaatcccttctgttctatgctcagaattgtccaaaaatgatggaagttggcgcaaaacccgctccccgggcgcttagcaccgctgccgtacattaccaacagataaaagagacccctcctgcttccgagaaagacaagacggctaaggctaaggttcagcagacgcctgatggctcacagcagtctcccgacggaacccagctgccatccggccaccccctgccagcgaccagccaaggcacggctagcaaatgccccttcctggccgctcagatgaatcagcggggctccagcgtgttttgcaaagctagtttagaactgcaggaagacgttcaagaaatgaatgccgtgcgtaaggaggtggccgagacaagcgcagggccttccgtggtcagtgttaagacagatggcggagatccctcaggactgctgaagaactttcaggacatcatgcagaaacagagacctgagcgcgtcagccatctgctgcaggacaatctccccaagagcgtaagtaccttccagtacgaccgatttttcgagaagaaaatcgacgaaaagaaaaatgaccacacttacagggtgtttaagactgtcaaccgcagagctcacatttttccaatggctgacgattattctgactccctcatcacgaagaagcaggtgtctgtgtggtgtagtaatgactatctcgggatgtcccggcatcctcgggtgtgcggggcagtgatggataccctcaagcagcatggagctggcgccggcggcactcgcaacatctcagggacaagcaagttccacgtcgatctggagcgcgagcttgcagacctacatggcaaggacgccgcgctcttgtttagcagctgtttcgtcgccaatgactcaaccctctttactctcgcaaaaatgatgcctggatgcgaaatctactctgactcaggcaatcacgcttctatgatccagggtatcaggaattcaagggtaccgaaatatatatttaggcataatgacgtgtctcacctgcgcgagctcttgcaaagaagtgacccctccgtgcccaagatcgttgcttttgaaaccgtgcattctatggatggcgccgtgtgtccactcgaggagctctgtgatgtggcccacgagtttggcgcaatcacatttgttgacgaagtgcacgccgttgggctgtatggagctagaggcggcggtattggagatcgggatggagtgatgcctaaaatggacataatttcaggcaccctgggcaaagcctttggatgcgttgggggctacatcgccagtacctcttccctgattgacacagtgagaagttacgctgctggatttatctttacaacatctcttcccccaatgctgctggccggcgcgctggaatcagtacggattttaaagtctgctgaggggagagtgctgaggcggcaacaccagcggaatgtcaagctgatgcgccagatgctcatggatgccggtttgcctgttgtgcactgtccaagtcacatcattccagtacgtgttgctgatgccgccaaaaacactgaagtgtgtgacgagctcatgtccagacataacatttatgtacaggctattaattaccctacagttcccagaggcgaggaactccttaggatcgcccctaccccccaccacaccccccagatgatgaattatttcctcgagaacttactcgttacctggaagcaagttgggcttgagctgaagcctcatagcagtgccgagtgtaacttttgccgcagacccctccactttgaggtgatgtctgagcgcgaaaagtcttacttctccggattgtccaaactcgtttcggcccaagcatag

SEQ ID NO: 115765 - DNA, 1923 bp, Artificial Sequence
  derived and/or modified sequence
atggaatctgtggtgcgccggtgtccattcctgtcacgagtgccccaggcctttctccagaaagcagggaagtccctgcttttttacgcccagaactgcccaaaaatgatggaagtgggtgccaaaccagcccctagagctctgtctactgcagcggttcactaccaacagattaaggagacccctcctgctagcgagaaggacaaaaccgctaaagccaaggtgcagcagacaccggatggatcccagcagagccccgacggcacacagctgccatccggccacccactgccagctaccagtcagggtacggcttcaaaatgccctttccttgccgctcaaatgaatcagcgaggatcctccgtgttctgtaaggcttccttagaactacaagaagacgtgcaggaaatgaatgctgtgagaaaagaagtggctgagacgtcggccggaccgtctgtagtgagcgtgaagaccgatggtggcgatcccagcggtctgctgaaaaacttccaagacataatgcagaaacagcgaccggagagggttagccaccttcttcaggataacctgcctaagtctgtgtccacctttcaatacgacaggtttttcgaaaaaaaaatcgacgagaagaagaacgaccacacatacagggtgtttaagactgtcaaccgcagggctcacatcttcccgatggccgacgactactcagactcgctcatcacaaaaaagcaggtatcagtctggtgctcgaacgattatctgggcatgagcaggcaccctagggtttgcggcgcggtcatggacacccttaagcaacacggcgcgggtgctgggggaaccaggaatattagtgggacctccaaatttcatgtagatctggagcgtgagttggccgatctccacgggaaggatgctgccctgctcttttcctcctgttttgttgctaatgattctaccctcttcaccttggctaaaatgatgccggggtgcgagatctatagcgatagcggaaaccatgcctcgatgatccagggtattagaaatagtagggtgcccaagtacatctttaggcataacgacgtcagtcatttgagggagttgctacagagaagtgacccttcggtgcccaaaatagtcgcctttgagaccgtccattccatggatggggctgtctgtcccctggaagagctctgtgatgtggcccacgagtttggagccattaccttcgtcgacgaagtacacgccgtcggactgtacggcgctaggggaggcggcatcggcgatcgcgatggcgtgatgcctaagatggatataattagtggcacgcttggcaaagccttcgggtgtgttggtggatacatcgcctccaccagttctttaatagacactgtgcggagttatgccgccgggttcatttttacaacctctttgccaccaatgctgcttgcaggcgcgttagagagtgtgaggatcttgaaaagcgctgaaggcagggtcctgcgccggcagcaccaaagaaacgtcaagctgatgcggcagatgctcatggatgctggcctaccggttgtgcattgcccctcccatatcatcccggtgcgagtggccgacgccgccaagaacacggaggtctgcgatgagctgatgagccgccacaacatctatgtccaggccataaattacccaaccgtgccacggggagaggaactgctgagaattgctccaaccccccatcacacgccacaaatgatgaattactttcttgagaacctcctagtgacatggaagcaagtcggccttgaattgaaacctcattctagtgccgagtgcaacttctgccgccggccattgcacttcgaggtgatgagcgaacgcgagaagagctacttctctgggctgagcaagctggttagtgctcaggcctag

SEQ ID NO: 115766 - DNA, 1923 bp, Artificial Sequence
  derived and/or modified sequence
atggaatccgtcgtgcgccggtgcccctttctgtcccgagtgccccaagcctttctgcagaaggcaggaaagagtcttttgttctacgcccagaactgtcccaaaatgatggaggtcggcgccaaacccgcgcccagagcactctccacagcagcggtgcactatcagcaaatcaaagagactccacccgcctcagagaaagataaaactgctaaggcgaaggtccagcagacacccgacgggtcccagcaaagtcctgacgggacccagctgccgtctggccatcccctaccagccacttcacagggcaccgccagtaagtgtcccttcttagcagcccagatgaatcagcgaggaagctctgtgttctgtaaggcgagcttggagcttcaggaggacgttcaggagatgaacgctgtgcggaaagaggttgcggaaacatctgccggcccatcagttgtctcggtcaagaccgacggtggcgatccatctggactgctgaaaaactttcaagacattatgcagaaacagagaccagagagagtgtctcacctgctgcaggataacctacccaagtccgtaagtacctttcagtatgaccgcttcttcgaaaagaagattgacgaaaaaaagaatgatcacacctatagggtgtttaagactgtgaaccgtagggcacacatttttcctatggcagacgactactctgatagtctgatcacgaagaaacaagtgagtgtatggtgtagcaatgattacctaggtatgagcaggcatccgcgggtttgtggagccgtcatggataccctaaaacagcatggggcgggggccggcgggactcgcaacatctcaggcaccagcaagtttcacgttgatttagagagagaactggctgacctgcacggaaaggatgcagcccttctcttcagctcctgctttgtagctaacgatagcacactgttcacactggctaagatgatgcccgggtgcgagatctactcagattctggcaatcatgcctcaatgatccaggggatcagaaacagtcgcgtgcccaagtatatcttccggcacaatgacgtgtcgcaccttcgggaactcctgcagcgttccgacccttcagtgccaaagatcgtcgcctttgagacggtgcacagtatggatggagcagtgtgtccactggaggagctgtgtgatgtcgctcacgagtttggggccattacttttgtcgatgaggtccacgccgttgggttatacggagcaagggggggaggaatcggcgacagagacggagtgatgccaaagatggacattatttctgggaccctgggaaaagcgtttggatgcgtcgggggttacatagcatcaacatcttccctcattgataccgtgcggtcttacgccgccggtttcatctttactacttcactgcctccgatgctgctggctggtgccttggagagcgtccgcatcctcaagtcggccgagggacgggtgctccgaaggcaacatcaacgtaatgtgaagcttatgcgccagatgctgatggacgctggattacctgttgtgcattgcccgtcccatattattcctgtaagggtggccgacgccgctaaaaacacagaggtttgtgacgagcttatgtctaggcacaacatctatgttcaggctataaactatcccactgtcccaagaggggaggaactgctgcgaatcgcaccaacccctcatcacaccccccagatgatgaactacttcctggaaaaccttctcgttacgtggaagcaggtggggctagaactaaagccccactctagcgctgagtgcaatttctgccgacgccccctgcacttcgaagtcatgtcagagcgcgagaaaagttatttttctggcttgtcgaagctagtgtcagcccaggcctag

SEQ ID NO: 115767 - DNA, 1923 bp, Artificial Sequence
  derived and/or modified sequence
atggagtcagtggtgcgccgatgccccttcctatctcgtgtcccccaggcttttcttcagaaagctggaaaatcactgctcttctatgctcagaactgtcccaaaatgatggaagttggcgctaaacccgcaccccgagccctctctacagctgccgtccactaccagcagataaaggagactcccccagcttcggagaaggataagactgcaaaggcaaaagtccaacagacacccgatggaagccagcagagccctgacggcacacagctgccctccggacatcctctgccagccacttcacagggtaccgcctcaaaatgcccgtttctggccgcccagatgaatcaacgcggctcctctgtattctgtaaggcctccctggaattgcaggaagatgttcaagaaatgaatgctgtacggaaggaggtggcagagactagcgcgggccctagtgtggtgtccgtgaagacggacgggggcgaccccagcggcctgttgaaaaactttcaggatattatgcagaagcagcggccggagagggtgtctcacctcctgcaggacaatctgcccaaatccgtgagtaccttccagtacgatcgcttcttcgaaaaaaagatagatgagaagaagaatgaccatacatatcgggttttcaagaccgtaaaccgtcgggcacacatatttcccatggccgatgattatagtgactctctgatcaccaaaaagcaggtgtctgtgtggtgctccaacgactaccttggcatgtctcgacatccacgggtgtgcggagccgtcatggacacattgaagcagcacggcgcaggtgccggtggaacccggaacattagtggaacttcgaagtttcatgtggatctggaaagagaacttgcggacctgcacgggaaggatgcggccctactcttcagcagctgttttgtggccaatgacagtaccctcttcaccctcgctaaaatgatgccaggttgcgagatctactcggatagtggcaatcacgcctctatgattcaagggattcgaaacagtagagtacccaaatatatattccgacacaacgacgtatctcaccttcgcgaactgctgcagagatcggatccttctgtgccgaaaatcgtggccttcgagacggtgcactccatggacggcgccgtgtgccctctcgaagaactgtgcgacgttgcccatgagttcggagctatcacatttgtcgatgaagtgcacgccgtgggcctgtacggagcccggggcgggggtatcggcgacagagatggcgtgatgcctaaaatggacatcatctctggcacccttggcaaggccttcgggtgtgtgggaggatacatcgcgtctacgagctctctaatcgacaccgtacggtcttatgcagctggtttcatcttcaccacctccttgcccccaatgctactagccggggctctcgaatccgtgagaatcctgaagtccgctgagggaagggtgctgcgccgacagcatcagagaaatgtgaagttaatgcgccaaatgctcatggacgccggacttcccgtggtgcactgtccttctcacatcattccagtgcgcgtggccgatgcagctaaaaacacggaagtgtgcgatgagcttatgtccagacataacatttatgtccaagccataaactatcccaccgttccgaggggagaggaactcctgagaatagcgccaacaccccaccataccccccagatgatgaactactttttggagaatctgctcgtgacctggaagcaggtggggctcgagctgaagccccacagttccgccgagtgcaacttttgtagaagacctctgcatttcgaagtgatgtcggagcgcgaaaagtcatacttttccgggttatcgaaactggtctcagcacaagcttag

SEQ ID NO: 115768 - DNA, 1923 bp, Artificial Sequence
  derived and/or modified sequence
atggagagcgtggtgcggcgctgccccttcctgagccgggtgccccaggccttcctgcagaaggccggcaagagcctgctcttctacgcccagaactgccccaagatgatggaggtgggcgccaagccagccccccgggccctgagcacagctgctgtgcactaccagcagatcaaggagaccccaccagccagcgagaaggacaagacagccaaggccaaggtgcagcagaccccagatggcagccagcagagcccagatggcacccagctgcccagcggccaccccctgcctgccaccagccagggcacagccagcaaatgtcccttcctggccgcccagatgaaccagaggggcagctctgtgttctgcaaggccagcctggagctgcaggaggatgtgcaggagatgaatgctgtgaggaaggaggtggccgagaccagcgctggccccagcgtggtgtctgtgaagacagatggaggagaccccagcggcctgctgaagaacttccaggacatcatgcagaagcagaggcctgagcgggtgagccacctgctgcaggacaacctgcccaagtctgtgtccaccttccagtatgaccgcttctttgagaagaagattgatgagaagaagaatgaccacacctacagagtcttcaagacagtgaacagaagagcccacatcttccccatggctgatgactacagcgacagcctcatcaccaagaagcaggtgtctgtgtggtgcagcaatgactacctgggcatgagccgccacccccgggtgtgtggggctgtgatggacaccctgaagcagcacggggccggggccggcggcaccaggaacatcagcggcaccagcaagttccacgtggacctggagcgggagctggccgacctgcacggcaaggatgctgccctgctcttcagcagctgctttgtggccaatgacagcaccctcttcaccctggccaagatgatgcctggctgtgagatctacagcgacagcggcaaccacgcctccatgatccagggcatccggaacagccgggtgcccaagtacatcttccgccacaatgatgtgagccacctgcgggagctgctgcagaggagtgaccccagcgtgcccaagatcgtggcctttgaaacagtgcacagcatggatggagctgtgtgccccctggaggagctgtgtgatgtggcccacgagtttggagccatcacctttgtggatgaggtgcatgctgtgggcctgtatggagcccggggcggcggcatcggggacagagatggagtgatgcccaagatggacatcatcagcggcaccctgggcaaggccttcggctgtgtgggcggctacatcgccagcaccagcagcctgattgacacagtgcgctcctatgctgctggcttcatcttcaccaccagcctgccccccatgctgctggccggggccctggagagcgtgcgcatcctgaagtctgctgagggccgggtgctgcggcggcagcaccagagaaatgtgaagctgatgaggcagatgctgatggatgctggcctgcctgtggtgcactgccccagccacatcatccctgtgcgggtggctgatgctgccaagaacacagaggtgtgtgatgagctgatgagccgccacaacatctacgtgcaggccatcaactaccccaccgtgcccagaggagaggagctgctgcgcatcgcccccaccccccaccacaccccccagatgatgaactacttcctggagaacctgctggtgacctggaagcaggtgggcctggagctgaagccccacagcagcgctgagtgcaacttctgcagaagacccctgcactttgaggtgatgtctgagcgggagaagagctacttcagcggcctgagcaagctggtgtctgcccaggcctag

SEQ ID NO: 115769 - DNA, 2406 bp, Artificial Sequence
  derived and/or modified sequence
ctgtatattaaggcgccggcgatcgcggcctgaggctgctcccggacaagggcaacgagcgtttcgtttggacttctcgacttgagtgcccgcctccttcgccgccgcctctgcagtcctcagcgcagttatgcccagttcttcccgctgtggggacacgaccacggaggaatccttgcttcagggactcgggaccctgctggaccccttcctcgggtttaggggatgtggggaccaggagaaagtcaggatccctaagagtcttccctgcctggatggatgagtggcttcttctccacctagattctttccacaggagccagcatacttcctgaacatggagagtgttgttcgccgctgcccattcttatcccgagtcccccaggcctttctgcagaaagcaggcaaatctctgttgttctatgcccaaaactgccccaagatgatggaagttggggccaagccagcccctcgggcattgtccactgcagcagtacactaccaacagatcaaagaaacccctccggccagtgagaaagacaaaactgctaaggccaaggtccaacagactcctgatggatcccagcagagtccagatggcacacagttccgtctggacaccccttgcctgccacaagccagggcactgcaagcaaatgccctttcctggcagcacagatgaatcagagaggcagcagtgtcttctgcaaagccagtcttgagcttcaggaggatgtgcaggaaatgaatgccgtgaggaaagaggttgctgaaacctcagcaggccccagtgtggttagtgtgaaaaccgatggaggggatcccagtggactgctgaagaacttccaggacatcatgcaaaagcaaagaccagaaagagtgtctcatcttcttcaagataacttgccaaaatctgtttccacttttcagtatgatcgtttctttgagaaaaaaattgatgagaaaaagaatgaccacacctatcgagtttttaaaactgtgaaccggcgagcacacatcttccccatggcagatgactattcagactccctcatcaccaaaaagcaagtgtcagtctggtgcagtaatgactacctaggaatgagtcgccacccacgggtgtgtggggcagttatggacactttgaaacaacatggtgctggggcaggtggtactagaaatatttctggaactagtaaattccatgtggacttagagcgggagctggcagacctccatgggaaagatgccgcactcttgttttcctcgtgctttgtggccaatgactcaaccctcttcaccctggctaagatgatgccaggctgtgagatttactctgattctgggaaccatgcctccatgatccaagggattcgaaacagccgagtgccaaagtacatcttccgccacaatgatgtcagccacctcagagaactgctgcaaagatctgacccctcagtccccaagattgtggcatttgaaactgtccattcaatggatggggcggtgtgcccactggaagagctgtgtgatgtggcccatgagtttggagcaatcaccttcgtggatgaggtccacgcagtggggctttatggggctcgaggcggagggattggggatcgggatggagtcatgccaaaaatggacatcatttctggaacacttggcaaagcctttggttgtgttggagggtacatcgccagcacgagttctctgattgacaccgtacggtcctatgctgctggcttcatcttcaccacctctctgccacccatgctgctggctggagccctggagtctgtgcggatcctgaagagcgctgagggacgggtgcttcgccgccagcaccagcgcaacgtcaaactcatgagacagatgctaatggatgccggcctccctgttgtccactgccccagccacatcatccctgtgcgggttgcagatgctgctaaaaacacagaagtctgtgatgaactaatgagcagacataacatctacgtgcaagcaatcaattaccctacggtgccccggggagaagagctcctacggattgcccccacccctcaccacacaccccagatgatgaactacttccttgagaatctgctagtcacatggaagcaagtggggctggaactgaagcctcattcctcagctgagtgcaacttctgcaggaggccactgcattttgaagtgatgagtgaaagagagaagtcctatttctcaggcttgagcaagttggtatctgctcaggcctgagcatgacctcaattatttcacttaaccccaggccattatcatatccagatggtcttcagagttgtctttatatgtgaattaagttatattaaattttaatctatagtaaaaacatagtcctggaaataaattcttgcttaaatggtg

SEQ ID NO: 115770 - DNA, 1923 bp, Artificial Sequence
  derived and/or modified sequence
atggagagcgtggtgcggcggtgccccttcctgagccgggtgccccaggcttttctccagaaggctgggaagtctttactgttttatgcacagaattgccccaaaatgatggaagtcggcgccaaaccggcccctagagccctgagcaccgctgcagtgcactaccagcagattaaggagacaccaccagctagcgaaaaggacaagaccgccaaagcgaaggtgcagcaaactcctgacggcagccagcaatcacctgatgggacccaactaccgtcgggccacccgctgcctgcaaccagtcaaggaacagcatcaaaatgtcctttcctcgccgcacagatgaatcaaagggggagctctgtcttttgtaaagcctcactggagctgcaggaagacgtacaagaaatgaacgcagttagaaaggaagtggctgaaacctctgccggcccctctgtggtgtccgtcaagaccgacgggggcgaccctagtggactgctgaagaattttcaagatattatgcagaagcaacggcctgaaagggtttctcacctgctccaagataacttaccaaaaagcgtgtccaccttccagtatgataggtttttcgagaaaaaaattgacgagaagaagaatgatcacacgtaccgagtgtttaagactgtcaaccgacgcgcccatatttttcctatggccgacgattactccgattcattgatcaccaagaaacaggtgtctgtgtggtgttccaacgactatcttggaatgagtcgccacccaagagtttgcggcgccgtgatggacaccctcaaacagcatggggctggtgctggaggaacccgcaatatctccggcacatccaagttccatgtggacctcgaaagagaactcgccgatctgcacggaaaggacgccgcattgctgttcagctcatgtttcgtggccaacgatagtactctattcacactcgctaagatgatgcccggatgtgagatctactcggacagtgggaatcatgctagtatgattcaggggataagaaattctcgggtacctaaatatatctttagacataacgatgtttcgcacttaagagagctattacaacgctctgatccatccgtgcccaagatagttgctttcgaaaccgtacattcaatggacggcgccgtttgtcccctggaagagctgtgtgacgtcgctcatgagttcggggccattacctttgtcgacgaagttcatgccgtgggcctttatggtgcccgcggcggcggcataggtgatagagacggtgtaatgcccaagatggacatcatatcaggcacactgggaaaggccttcggctgtgtgggtggctacatcgcctcgacatcttcattaattgataccgtgcggagctacgctgccggattcattttcaccactagtctacccccaatgcttctggcaggcgctcttgaatctgtgcgcatcctgaagagcgctgaggggagagtcctcaggcgacaacaccaacggaacgtaaagctcatgcgtcaaatgctgatggatgctggcttgccagtggtccactgtccctctcatatcattccggtgcgtgtggcagacgctgcgaagaatactgaagtgtgcgacgaactcatgtctaggcacaacatttacgtgcaggccatcaattaccctactgttcctcgtggtgaggaactcctcaggatcgcccctactccacatcatactcctcagatgatgaattattttctggaaaatctgctggttacttggaaacaagtcggactcgagctcaagccgcatagcagcgcggagtgcaatttttgtcgcagacccctgcatttcgaggtgatgagcgagagagaaaaaagctatttctctggattatcgaaactggtgagtgcacaggcctag

SEQ ID NO: 115771 - DNA, 1923 bp, Artificial Sequence
  derived and/or modified sequence
atggagagcgtggtgcggcggtgccccttcctgagccgggtgccccaggcctttctgcagaaggccggaaaatccctgctcttctacgcacaaaattgcccaaagatgatggaggtcggtgctaaacccgccccccgcgctctaagtaccgctgccgttcattaccagcaaattaaggagactcccccggcttccgaaaaggataaaacagccaaggcgaaggttcagcagacccccgatgggagccaacagtcacctgacggcacacagctaccaagtggacacccactgcctgccaccagccagggaacggcctcgaagtgcccatttttggcggcccagatgaaccagcgcggatcgtcagtgttctgtaaggccagcctggagctacaggaggatgtccaagagatgaacgccgttcggaaggaggtggccgagacctctgctggtccttctgtggtttcagtaaagaccgacggcggcgacccctcgggccttctgaagaatttccaagacattatgcagaaacagcgcccagagagggtcagtcatttgctacaggacaatcttcccaaaagcgtgtcaacatttcagtatgatcgttttttcgagaaaaagattgacgagaagaaaaatgatcacacctaccgagtgtttaagactgtaaacagacgtgcccatatattccctatggccgacgattattcagacagcttgataaccaaaaagcaagtgtcagtctggtgctccaatgactacctgggtatgtccagacacccaagggtctgtggtgctgtgatggatacgctgaaacagcatggggcaggtgccggaggcaccagaaacatctccggcacttctaagttccacgtggatctagaacgcgaactcgcggatcttcacggaaaggacgccgccctgttgttttccagttgctttgtggccaatgattctaccctgtttaccctcgccaagatgatgccaggatgcgaaatttattccgattctggcaatcacgcgagtatgatccaaggtatccggaactcacgcgtgccaaaatatatatttaggcacaacgacgtctctcatttgcgggagctgctgcagcgatctgacccgtcagttccaaagatcgtggccttcgaaacggttcatagcatggacggagctgtgtgcccactcgaggaactgtgtgacgtggctcacgagttcggcgctattacctttgtggatgaggtgcacgccgtcggcttatatggcgcgcgtggcgggggtatcggagacagggacggtgttatgcccaagatggacatcattagcggaactttggggaaggcctttggttgtgtcggagggtacatcgcctccacatccagcttgatcgatacagtgaggtcatatgcagctggattcatctttacaacgagtctgccgccgatgctactggccggcgctttagagtccgttcgaatcctgaaatctgctgaggggagagtgctgcgacggcagcatcagaggaatgtgaagctgatgagacaaatgctgatggatgccggactgcctgtcgttcactgcccgagccacatcataccggtcagggtggccgacgctgccaaaaacacagaggtgtgcgacgagctaatgtccaggcacaacatctacgtacaggccattaactatcctacagtgcccagaggcgaggaactgctgcggatcgctcctaccccgcaccacacaccccagatgatgaactatttcctggaaaatcttctggtgacttggaaacaggtgggactcgagctgaagccccattccagcgctgaatgtaatttctgccggagacccctgcacttcgaagtgatgtctgaacgcgagaagtcttatttttccggtctgagcaagctggtctccgcccaggcctag

SEQ ID NO: 115772 - DNA, 1923 bp, Artificial Sequence
  derived and/or modified sequence
atggagagcgtggtgcggcggtgccccttcctgagccgggtgccccaagcctttctgcaaaaagccggaaagtcactgctcttctacgcccagaactgccctaaaatgatggaggtgggcgcaaaacccgccccacgggcgttgtcaactgcagccgtccactaccaacagattaaggagaccccaccggctagtgaaaaggataaaacagccaaggctaaggtccagcagaccccagacggatcccagcagtcacccgatgggacccagctcccaagtggacaccctctgccagctacctcacagggaactgccagcaagtgccccttcctcgccgctcagatgaaccagagggggagctccgtgttctgcaaggctagtctggagctgcaggaggatgtccaggaaatgaacgccgttcggaaagaggttgctgagacttctgccgggccgagcgtcgtctccgtgaagaccgacggcggagacccatccggcctgctcaagaattttcaggatatcatgcaaaagcaacgacccgagcgagtgtcacacctgctccaggataatttacccaagtctgtgagcactttccagtatgacaggttttttgagaagaagattgacgagaaaaagaacgaccacacctatagggtttttaagacagtgaacaggcgtgcccacatttttcccatggcggatgactacagcgattctctcattacaaagaaacaggtgagtgtgtggtgcagcaatgactacctgggaatgagtcgccatccgcgtgtgtgcggggccgtgatggacactctgaagcagcacggggccggcgccggagggactaggaacatttcagggaccagtaaattccatgttgacttggagcgagagctcgccgatcttcacggcaaggacgctgcactactgttcagctcatgttttgttgccaatgattccaccttgtttaccctggcgaagatgatgccaggctgtgaaatttattctgacagtggtaatcacgcgagtatgatccaaggaatacggaacagccgggttccaaaatacattttccgccacaatgatgtctcacacctcagggaactgctccagcgcagcgatccatcagtccccaagatcgttgcttttgaaactgttcactccatggacggagccgtgtgcccactggaagaactttgtgacgtagctcacgagtttggagccataaccttcgttgacgaagtccatgctgtcggcctgtatggcgctcgtgggggggggataggtgacagagacggagttatgccaaaaatggacattatttctggaactctgggaaaagcgttcggatgcgtgggaggctacattgcttctactagctctctaatcgatactgtccgtagctatgccgctgggtttattttcaccacttctctgccccccatgctattggcaggcgcccttgaatccgttcggatattgaagtcagctgaggggcgcgtactaagacggcagcatcagagaaatgttaagttaatgcgacagatgctgatggacgccggacttccagtggtgcactgcccaagtcacattataccggttcgggtggccgacgccgccaagaatacagaggtgtgcgacgagctcatgtctagacataacatctatgtgcaggcaatcaactacccaaccgtcccacgtggcgaagaactattgcggattgctcctaccccccaccacaccccgcagatgatgaactattttctggagaacctgctggtgacgtggaaacaagtgggcctggaactgaaacctcatagttctgcggaatgtaatttttgtaggagacccctgcacttcgaagtcatgtccgagcgcgagaaaagttacttctcagggctgtctaaactcgtgtcagcccaggcgtag

SEQ ID NO: 115773 - DNA, 1923 bp, Artificial Sequence
  derived and/or modified sequence
atggagagcgtggtgcggcggtgccccttcctgagccgggtgccccaggcatttctgcagaaggcaggcaagagtctgttattttacgcccagaattgtccaaagatgatggaggttggggccaagccagccccccgggcgctgagcaccgccgccgtgcactaccagcagataaaggaaacgccccccgcttctgaaaaagataagaccgccaaggcaaaggtgcagcagactcccgatgggagtcaacagtcacccgatggaacccagctcccatctggacacccactaccggcaacatcccaaggtacagcatccaagtgcccctttttagctgcgcaaatgaatcagaggggatctagcgttttctgtaaggcttctctcgaacttcaggaagacgtccaagagatgaacgctgttcggaaagaagtcgcagagacttctgccggcccctccgtagtgtccgtgaagacggacggaggagatccctccgggctgctgaagaactttcaggatataatgcagaagcagcgacctgagcgagtgtcacatctgctgcaggacaatctcccaaagtccgtgtctacatttcaatatgaccgcttctttgaaaaaaaaatcgacgagaaaaagaacgatcatacatacagggtcttcaagacggttaaccgcagagcacacatttttccaatggcagatgattactcagattctctcattactaaaaagcaggtaagtgtgtggtgcagtaacgattaccttggcatgtcaagacacccgcgcgtctgtggagctgtgatggatacgctcaagcagcatggagctggcgctggtggtacaagaaatataagcggcacctccaaattccacgttgacctggagcgcgagttggccgatttgcacggaaaggatgctgcattacttttttctagttgtttcgtggcgaacgattccacactctttacattagccaaaatgatgcccgggtgtgagatctactcagattcgggtaatcacgcttccatgatccagggcatccgaaatagcagggtgccgaagtatatctttcggcacaatgatgttagtcatctgcgggagctcctgcaaagaagtgacccttcagtccccaagatcgtggcatttgaaacagtgcacagcatggatggggctgtttgtcccctggaagagttgtgcgatgtcgcccacgaattcggcgctatcacatttgtagatgaggttcacgccgtgggcctctacggcgcacgaggtggcgggattggtgaccgcgacggagtcatgcctaaaatggacatcatctccggaactcttggcaaggcctttggatgcgttggggggtacatcgcctctacttcaagcttgattgacactgtgcggtcatacgccgctggctttatttttacaacctcactgcctccaatgttgttggccggtgcgctggagagcgtgagaatccttaagagcgcagaaggtcgtgttttacggagacagcatcagcggaatgtcaagctgatgagacagatgttgatggatgctggactgcctgtcgtgcattgcccatcgcacatcatacccgtgagggttgccgacgcagcaaaaaatacagaggtgtgcgatgagctgatgagccgccataatatctacgtccaagccattaattacccaacggtgccccgcggcgaagagctgctgcgtatagccccaactccacaccacacccctcagatgatgaattatttcctggagaacctgctggttacctggaaacaggtaggacttgaacttaaacctcactcctccgccgagtgcaacttctgtcgccgcccactgcatttcgaggtaatgtccgagcgagagaagtcatacttttccgggctctccaagcttgtttctgctcaggcttag

SEQ ID NO: 115774 - DNA, 1923 bp, Artificial Sequence
  derived and/or modified sequence
atggagagcgtggtcaggagatgtccatttctgagcagggttccgcaggcctttttacagaaggcaggtaaatcactgctgttctacgcccaaaactgccccaagatgatggaggtgggggcaaagccagctcccagggcacttagcacagccgctgtccactaccagcaaattaaagaaacgcctccagcgagcgagaaagataagacagccaaagccaaagtgcaacagacacctgatggctcccaacagtctccagacggcacccagctgcctagtggacaccctctcccggcaacatcacagggcacagcctccaaatgcccctttctggcagctcagatgaatcagcgcggaagctccgtgttttgtaaagcatccctggagcttcaggaggacgttcaagagatgaacgccgtacgcaaagaggtcgctgaaacatctgctggaccttctgtggtgtccgttaagactgacggcggtgacccttccgggctactgaagaactttcaggatatcatgcagaaacagaggcctgaaagagtcagccatcttctccaggataacctcccaaagtcagtgagtaccttccagtatgaccggttcttcgagaagaagatcgatgagaagaagaatgatcatacttatagagtattcaagactgttaacaggcgcgcacacatatttccaatggccgatgactacagtgattcactgatcaccaagaaacaggtctccgtctggtgtagcaacgattaccttggaatgtcacggcacccgagagtgtgtggggctgtgatggacaccctaaagcagcacggggcaggggctggagggacgcgaaacattagcggaaccagcaagttccacgtagacctcgaaagggagctggccgacttacatggaaaagatgcggcactcttgttcagcagctgcttcgtggctaacgactctacactgtttactctagccaagatgatgcccggatgtgaaatttacagtgactccgggaaccacgcaagtatgatccagggaatcagaaattctagagtgcccaaatacatttttcgccacaacgacgtgtcccacttgcgagaactgctccagaggtccgatccgtcggtgcccaagatcgttgcttttgaaacggtccattccatggacggagctgtgtgccctctggaggaactgtgcgacgtcgcccacgaatttggtgctattacattcgtagatgaagttcacgccgtgggtctgtacggggcaagggggggtgggataggagatcgggatggagtaatgccaaagatggatattattagtggcaccctgggaaaggcctttggttgtgtggggggttatattgccagtacaagttcccttatcgacacagtgagatcgtacgccgcaggcttcattttcactactagcctaccccctatgttgctcgcaggggctctcgagagcgtccgaatcctgaagtcagctgagggcagagttctgcggaggcagcatcaaaggaatgtgaagctgatgcgacaaatgctcatggatgctggccttccagtggtgcattgcccttcgcacatcatccccgtaagggtggccgacgcagccaagaatacagaggtgtgcgacgagctaatgtcccggcacaatatttacgtgcaggctatcaactatcctaccgtccccaggggcgaggagctcctgcgcatagctccaacacctcatcacacaccgcagatgatgaattattttctggaaaacctccttgttacctggaaacaagtcggccttgaattaaagcctcattcatcagctgagtgtaacttttgcaggcgtccattgcattttgaagtgatgagtgagcgtgagaaatcctatttcagcggcctgtctaaactagtcagtgctcaggcctag

SEQ ID NO: 115775 - DNA, 1923 bp, Artificial Sequence
  derived and/or modified sequence
atggagtcagtggttaggagatgcccattcctctcccgagttcctcaggccttccttcagaaagctggaaaatctctgcttttctacgcccagaactgtcccaaaatgatggaagttggcgcaaagcctgctccaagggccctcagcacagcggcagttcattatcagcaaataaaagagaccccaccagcctccgaaaaggataagacagccaaggcgaaggtccagcagacaccagacgggtcacagcagtcccctgacggcacgcagttaccctctggccatccgttaccagccacgtctcaaggtaccgcttcgaaatgcccatttctcgcagcccaaatgaaccagagaggtagcagcgtattctgcaaggcctcactggaattacaagaagatgtgcaggagatgaacgctgtcagaaaggaagttgcagagactagcgcgggaccctctgtcgtgtccgtgaagactgatggtggcgacccctctggcctgttgaagaacttccaggacataatgcagaaacagcggccagagagggtgtctcatctactgcaggataacctccccaagtccgtatccacattccaatacgaccggttctttgaaaaaaagatcgacgagaagaaaaatgatcatacctacagggtgtttaagacggtgaatcggagagctcacatatttcccatggcagacgactactccgacagcctaattaccaagaagcaggttagtgtgtggtgctctaatgattacctcggcatgtctcgtcacccccgtgtttgcggggctgtcatggatacgctgaagcagcatggcgcaggggctggaggcacacgcaacatctccggaaccagcaagttccatgtggatctcgagagggagcttgctgacctacatgggaaggatgccgctcttctgttttcaagctgctttgtggccaacgactccactctattcacactagccaagatgatgccgggatgcgagatttatagcgactcaggaaaccatgcaagcatgatccagggcatcagaaatagcagggtgccgaaatacattttccgccacaatgatgtgtcccacctccgtgaactgttgcagcggtctgatccaagtgtacccaagattgttgcgtttgagaccgtccactcaatggacggagcagtttgcccactggaggagttatgcgatgtcgcccatgaattcggcgcaataactttcgtagatgaggtccacgcagtgggcctttacggagctcgaggcggtggcatcggcgaccgtgatggggtaatgcctaagatggatatcattagtggaacactggggaaggctttcggctgcgtggggggatatatcgcttcaacctcctccctgatcgacacagtacgcagctacgcggcaggcttcattttcactactagtctcccccctatgctccttgccggagcgctggaatccgttaggatcttgaagagcgccgagggacgcgtgctgcgcagacaacaccagagaaatgtaaaacttatgaggcagatgctgatggatgcaggactacccgttgtccactgtccctcccatataattcccgtgcgagtcgcagatgctgccaagaacactgaagtatgcgacgaactgatgagccgacataatatttacgtgcaagctatcaactacccaacagtgcctaggggtgaggagcttttgagaatagccccaacaccccaccataccccacagatgatgaactactttctggagaatctcctggttacatggaaacaggtaggtcttgagttgaaaccacactctagcgctgaatgtaatttctgtagacgacccctccatttcgaagtgatgagcgaaagagagaaaagctatttttctgggctgtcaaaactcgtgagtgctcaagcctag

SEQ ID NO: 115776 - DNA, 1923 bp, Artificial Sequence
  derived and/or modified sequence
atggaatcagtcgttcgacgttgtccctttctcagccgggttccccaggctttcctccaaaaggctggtaaatcacttctgttctacgctcagaattgtcctaaaatgatggaggttggcgctaagccagctccaagggcgttatctaccgctgctgtccactaccagcaaataaaggagacacctcctgcatcggagaaagataagacggccaaagccaaggtgcagcagacacctgatggttcccagcaatcaccagacgggacccagctgccttctggacatcccctcccagccacgagccagggcaccgcaagtaaatgtccctttcttgctgcacaaatgaatcagcgaggaagttccgtcttctgtaaggccagcttggagctacaagaggacgtgcaagagatgaacgcagtgaggaaggaggttgctgaaacctcagcgggaccttctgttgtgtcagttaagaccgacggcggtgatcccagcggcctgttgaaaaattttcaggacatcatgcaaaagcaaagacccgaacgcgtatcacatctgctgcaagataatctgccaaaaagcgtttcgacatttcagtatgaccgtttctttgagaagaaaatcgacgagaagaagaacgaccacacgtaccgtgtcttcaagacagtgaatagaagagcacacatattccccatggcagacgactactctgactccctgatcactaagaagcaagtttcagtctggtgttctaacgactacctcggcatgtccaggcatcctagagtgtgtggcgcagttatggacactctaaagcaacacggggctggtgctggcggtaccagaaacattagtggtacgagtaagtttcacgtggacctggagagagaactggccgacctgcacggcaaggatgccgctctcctgttctccagctgttttgtggcgaatgattcaacactgttcactctggctaaaatgatgccagggtgcgagatctactccgacagtggcaaccatgcttcgatgatccagggcatcaggaactcgagggtaccaaaatacatctttcgacacaatgatgttagtcacctgcgggaacttcttcagcggagtgatccttctgtgccaaaaatagtggcattcgagaccgtgcactcaatggatggtgctgtctgcccactggaggagctttgtgacgtagctcatgaatttggagctattacttttgtcgatgaggttcatgctgtagggttgtacggggctcgcggtggaggaattggagaccgtgatggtgtcatgcctaaaatggatatcatcagcggcacattggggaaagcctttgggtgcgtaggtggttatattgcttctacctcttccttaatagacactgtgagaagctatgccgctggcttcatcttcactacgagcctgcccccaatgttgctcgccggtgcgctggagtcagtgcgtattctgaaaagcgcagagggcagggttctgcgaagacagcatcagcggaatgtgaagctgatgaggcagatgctgatggatgccggtctgcctgtagtccattgccctagccatatcattccagtgcgggttgccgacgcagcaaagaatacagaggtgtgcgacgaactgatgtcacgccacaacatatacgtgcaggccataaactacccaacagtgccacggggagaggaattgctaaggatcgctcccacccctcatcacaccccacaaatgatgaattatttcctggaaaatctccttgtgacctggaaacaagtagggctggagctcaagccacactccagcgctgagtgcaacttctgtaggagacccctacacttcgaggtgatgagtgaacgggagaaaagctatttcagtggactgtccaagctggttagtgcccaggcttag

SEQ ID NO: 115777 - DNA, 1923 bp, Artificial Sequence
  derived and/or modified sequence
atggaatccgtggttcgtcgctgtccctttctgtctcgggttccacaagccttcctgcagaaagccggaaaatccctactgttctacgctcagaattgtccgaagatgatggaggtgggtgccaagccagctccaagggcgctgagcacagcggcagtccactatcaacagattaaagaaacccctcccgcatccgagaaggataagactgcaaaggcaaaggtccaacagacgcccgatggatcacaacaatctccggacggcacccagttgcctagtggccaccctctcccggctactagtcagggcactgccagtaaatgtcccttcctagctgctcagatgaatcagcgaggaagcagtgtgttttgcaaggcctccctggagttgcaagaggatgttcaggagatgaacgcagtgagaaaggaagtggctgaaacttctgcgggaccatctgtggtgtccgttaaaaccgacgggggtgacccgtcggggctcctgaaaaatttccaggatataatgcagaagcagcggcctgaaagggtgagccaccttttgcaggacaacctgccgaagtcggtcagtacttttcagtatgatagattttttgagaaaaaaattgatgagaaaaagaacgatcatacatacagagtatttaagactgtgaacagacgagctcacatttttcccatggcagatgactacagtgattctcttatcacaaagaagcaagtctcagtctggtgctctaatgattatctgggtatgtcaaggcaccctcgggtctgcggagcagtcatggacaccttgaaacaacacggcgcaggggctgggggtacgcgaaacatcagtgggacgtctaagttccacgtggatttggagcgcgaactcgctgacctccacggaaaagacgcggctctcctcttctccagttgctttgtcgccaacgatagcacactctttacacttgctaaaatgatgcccggatgtgaaatttatagtgatagcggaaaccatgcctcaatgattcaaggaatccggaactctcgggtccccaaatatattttccggcacaatgacgtgtcccaccttcgtgaacttcttcaaaggtccgacccctccgtgccaaagatagttgcgttcgaaaccgttcattcaatggatggggctgtgtgccccctggaagagttgtgcgatgtggcacatgaattcggcgctatcacattcgtcgacgaggtgcacgctgtgggcctgtatggggctcgtggaggcggaatcggcgaccgagatggcgtgatgcccaagatggatatcatctctgggactttgggtaaggcattcggctgcgtcggcggatacatagcgtcaacatcctcacttatcgacactgtgcgcagctatgccgctggctttatcttcacgacaagcctgccccctatgctcttggctggagccctggagagcgtccgcatcctgaaatctgctgaggggagggtcctgcgacgacagcaccagcgaaacgtgaaactaatgaggcaaatgctgatggacgccggactgcctgtggtgcattgtccgagccacatcatccccgtacgggttgcagacgccgctaagaacaccgaagtctgcgacgagctcatgagccgccataatatctatgttcaagctatcaattatcctacggttcctaggggagaggagcttctgaggatcgcacctacaccccaccacaccccccagatgatgaattacttcctggaaaatcttttagtgacatggaaacaggtcgggctggaactgaaacctcatagctcggctgagtgtaatttctgtcgccgacccctgcacttcgaagtgatgagcgagcgcgagaagtcatacttctccggactttctaagctagtctcagcgcaggcatag

SEQ ID NO: 115778 - DNA, 1923 bp, Artificial Sequence
  derived and/or modified sequence
atggagagcgtggtgagaagatgccccttcctgagcagagtgccccaggccttcctgcagaaggccggcaagagcctgctgttctacgcccagaactgccccaagatgatggaggtgggcgccaagcccgcccccagagccctgagcaccgccgccgtgcactaccagcagatcaaggagaccccccccgccagcgagaaggacaagaccgccaaggccaaggtgcagcagacccccgacggcagccagcagagccccgacggcacccagctgcccagcggccaccccctgcccgccaccagccagggcaccgccagcaagtgccccttcctggccgcccagatgaaccagagaggcagcagcgtgttctgcaaggccagcctggagctgcaggaggacgtgcaggagatgaacgccgtgagaaaggaggtggccgagaccagcgccggccccagcgtggtgagcgtgaagaccgacggcggcgaccccagcggcctgctgaagaacttccaggacatcatgcagaagcagagacccgagagagtgagccacctgctgcaggacaacctgcccaagagcgtgagcaccttccagtacgacagattcttcgagaagaagatcgacgagaagaagaacgaccacacctacagagtgttcaagaccgtgaacagaagagcccacatcttccccatggccgacgactacagcgacagcctgatcaccaagaagcaggtgagcgtgtggtgcagcaacgactacctgggcatgagcagacaccccagagtgtgcggcgccgtgatggacaccctgaagcagcacggcgccggcgccggcggcaccagaaacatcagcggcaccagcaagttccacgtggacctggagagagagctggccgacctgcacggcaaggacgccgccctgctgttcagcagctgcttcgtggccaacgacagcaccctgttcaccctggccaagatgatgcccggctgcgagatctacagcgacagcggcaaccacgccagcatgatccagggcatcagaaacagcagagtgcccaagtacatcttcagacacaacgacgtgagccacctgagagagctgctgcagagaagcgaccccagcgtgcccaagatcgtggccttcgagaccgtgcacagcatggacggcgccgtgtgccccctggaggagctgtgcgacgtggcccacgagttcggcgccatcaccttcgtggacgaggtgcacgccgtgggcctgtacggcgccagaggcggcggcatcggcgacagagacggcgtgatgcccaagatggacatcatcagcggcaccctgggcaaggccttcggctgcgtgggcggctacatcgccagcaccagcagcctgatcgacaccgtgagaagctacgccgccggcttcatcttcaccaccagcctgccccccatgctgctggccggcgccctggagagcgtgagaatcctgaagagcgccgagggcagagtgctgagaagacagcaccagagaaacgtgaagctgatgagacagatgctgatggacgccggcctgcccgtggtgcactgccccagccacatcatccccgtgagagtggccgacgccgccaagaacaccgaggtgtgcgacgagctgatgagcagacacaacatctacgtgcaggccatcaactaccccaccgtgcccagaggcgaggagctgctgagaatcgcccccaccccccaccacaccccccagatgatgaactacttcctggagaacctgctggtgacctggaagcaggtgggcctggagctgaagccccacagcagcgccgagtgcaacttctgcagaagacccctgcacttcgaggtgatgagcgagagagagaagagctacttcagcggcctgagcaagctggtgagcgcccaggcctag

SEQ ID NO: 115779 - DNA, 2212 bp, Artificial Sequence
  derived and/or modified sequence
atattaaggcgccggcgatcgcggcctgaggctgctcccggacaagggcaacgagcgtttcgtttggacttctcgacttgagtgcccgcctccttcgccgccgcctctgcagtcctcagcgcaggagccagcatacttcctgaacatggagagtgttgttcgccgctgcccattcttatcccgagtcccccaggcctttctgcagaaagcaggcaaatctctgttgttctatgcccaaaactgccccaagatgatggaagttggggccaagccagcccctcgggcattgtccactgcagcagtacactaccaacagatcaaagaaacccctccggccagtgagaaagacaaaactgctaaggccaaggtccaacagactcctgatggatcccagcagagtccagatggcacacagcttccgtctggacaccccttgcctgccacaagccagggcactgcaagcaaatgccctttcctggcagcacagatgaatcagagaggcagcagtgtcttctgcaaagccagtcttgagcttcaggaggatgtgcaggaaatgaatgccgtgaggaaagaggttgctgaaacctcagcaggccccagtgtggttagtgtgaaaaccgatggaggggatcccagtggactgctgaagaacttccaggacatcatgcaaaagcaaagaccagaaagagtgtctcatcttcttcaagataacttgccaaaatctgtttccacttttcagtatgatcgtttctttgagaaaaaaattgatgagaaaaagaatgaccacacctatcgagtttttaaaactgtgaaccggcgagcacacatcttccccatggcagatgactattcagactccctcatcaccaaaaagcaagtgtcagtctggtgcagtaatgactacctaggaatgagtcgccacccacgggtgtgtggggcagttatggacactttgaaacaacatggtgctggggcaggtggtactagaaatatttctggaactagtaaattccatgtggacttagagcgggagctggcagacctccatgggaaagatgccgcactcttgttttcctcgtgctttgtggccaatgactcaaccctcttcaccctggctaagatgatgccaggctgtgagatttactctgattctgggaaccatgcctccatgatccaagggattcgaaacagccgagtgccaaagtacatcttccgccacaatgatgtcagccacctcagagaactgctgcaaagatctgacccctcagtccccaagattgtggcatttgaaactgtccattcaatggatggggcggtgtgcccactggaagagctgtgtgatgtggcccatgagtttggagcaatcaccttcgtggatgaggtccacgcagtggggctttatggggctcgaggcggagggattggggatcgggatggagtcatgccaaaaatggacatcatttctggaacacttggcaaagcctttggttgtgttggagggtacatcgccagcacgagttctctgattgacaccgtacggtcctatgctgctggcttcatcttcaccacctctctgccacccatgctgctggctggagccctggagtctgtgcggatcctgaagagcgctgagggacgggtgcttcgccgccagcaccagcgcaacgtcaaactcatgagacagatgctaatggatgccggcctccctgttgtccactgccccagccacatcatccctgtgcgggttgcagatgctgctaaaaacacagaagtctgtgatgaactaatgagcagacataacatctacgtgcaagcaatcaattaccctacggtgccccggggagaagagctcctacggattgcccccacccctcaccacacaccccagatgatgaactacttccttgagaatctgctagtcacatggaagcaagtggggctggaactgaagcctcattcctcagctgagtgcaacttctgcaggaggccactgcattttgaagtgatgagtgaaagagagaagtcctatttctcaggcttgagcaagttggtatctgctcaggcctgagcatgacctcaattatttcacttaaccccaggccattatcatatccagatggtcttcagagttgtctttatatgtgaattaagttatattaaattttaatctatagtaaaaacatagtcctggaaataaattcttgcttaaatg

SEQ ID NO: 115780 - DNA, 2430 bp, Artificial Sequence
  derived and/or modified sequence
agcgcccaaggcgcatgcgcagcggtcactcccgctgtatattaaggcgccggcgatcgcggcctgaggctgctcccggacaagggcaacgagcgtttcgtttggacttctcgacttgagtgcccgcctccttcgccgccgcctctgcagtcctcagcgcagttatgcccagttcttcccgctgtggggacacgaccacggaggaatccttgcttcagggactcgggaccctgctggaccccttcctcgggtttaggggatgtggggaccaggagaaagtcaggatccctaagagtcttccctgcctggatggatgagtggcttcttctccacctagatgagccagcatacttcctgaacatggagagtgttgttcgccgctgcccattcttatcccgagtcccccaggcctttctgcagaaagcaggcaaatctctgttgttctatgcccaaaactgccccaagatgatggaagttggggccaagccagcccctcgggcattgtccactgcagcagtacactaccaacagatcaaagaaacccctccggccagtgagaaagacaaaactgctaaggccaaggtccaacagactcctgatggatcccagcagagtccagatggcacacagcttccgtctggacaccccttgcctgccacaagccagggcactgcaagcaaatgccctttcctggcagcacagatgaatcagagaggcagcagtgtcttctgcaaagccagtcttgagcttcaggaggatgtgcaggaaatgaatgccgtgaggaaagaggttgctgaaacctcagcaggccccagtgtggttagtgtgaaaaccgatggaggggatcccagtggactgctgaagaacttccaggacatcatgcaaaagcaaagaccagaaagagtgtctcatcttcttcaagataacttgccaaaatctgtttccacttttcagtatgatcgtttctttgagaaaaaaattgatgagaaaaagaatgaccacacctatcgagtttttaaaactgtgaaccggcgagcacacatcttccccatggcagatgactattcagactccctcatcaccaaaaagcaagtgtcagtctggtgcagtaatgactacctaggaatgagtcgccacccacgggtgtgtggggcagttatggacactttgaaacaacatggtgctggggcaggtggtactagaaatatttctggaactagtaaattccatgtggacttagagcgggagctggcagacctccatgggaaagatgccgcactcttgttttcctcgtgctttgtggccaatgactcaaccctcttcaccctggctaagatgatgccaggctgtgagatttactctgattctgggaaccatgcctccatgatccaagggattcgaaacagccgagtgccaaagtacatcttccgccacaatgatgtcagccacctcagagaactgctgcaaagatctgacccctcagtccccaagattgtggcatttgaaactgtccattcaatggatggggcggtgtgcccactggaagagctgtgtgatgtggcccatgagtttggagcaatcaccttcgtggatgaggtccacgcagtggggctttatggggctcgaggcggagggattggggatcgggatggagtcatgccaaaaatggacatcatttctggaacacttggcaaagcctttggttgtgttggagggtacatcgccagcacgagttctctgattgacaccgtacggtcctatgctgctggcttcatcttcaccacctctctgccacccatgctgctggctggagccctggagtctgtgcggatcctgaagagcgctgagggacgggtgcttcgccgccagcaccagcgcaacgtcaaactcatgagacagatgctaatggatgccggcctccctgttgtccactgccccagccacatcatccctgtgcgggttgcagatgctgctaaaaacacagaagtctgtgatgaactaatgagcagacataacatctacgtgcaagcaatcaattaccctacggtgccccggggagaagagctcctacggattgcccccacccctcaccacacaccccagatgatgaactacttccttgagaatctgctagtcacatggaagcaagtggggctggaactgaagcctcattcctcagctgagtgcaacttctgcaggaggccactgcattttgaagtgatgagtgaaagagagaagtcctatttctcaggcttgagcaagttggtatctgctcaggcctgagcatgacctcaattatttcacttaaccccaggccattatcatatccagatggtcttcagagttgtctttatatgtgaattaagttatattaaattttaatctatagtaaaaacatagtcctggaaataaattcttgcttaaatggtg

SEQ ID NO: 115781 - DNA, 2125 bp, Artificial Sequence
  derived and/or modified sequence
aagaaggcagcgcccaaggcgcatgcgcagcggtcactcccgctgtatattaaggcgccggcgatcgcggcctgaggctgctcccggacaagggcaacgagcgtttcgtttggacttctcgacttgagtgcccgcctccttcgccgccgcctctgcagtcctcagcgcagtctttccacaggagccagcatacttcctgaacatggagagtgttgttcgccgctgcccattcttatcccgagtcccccaggcctttctgcagaaagcaggcaaatctctgttgttctatgcccaaaactgccccaagatgatggaagttggggccaagccagcccctcgggcattgtccactgcagcagtacactaccaacagatcaaagaaacccctccggccagtgagaaagacaaaactgctaaggccaaggtccaacagactcctgatggatcccagcagagtccagatggcacacagcttccgtctggacaccccttgcctgccacaagccagggcactgcaagcaaatgccctttcctggcagcacagatgaatcagagaggcagcagtgtcttctgcaaagccagtcttgagcttcaggaggatgtgcaggaaatgaatgccgtgaggaaagaggttgctgaaacctcagcaggccccagtgtggttagtgtgaaaaccgatggaggggatcccagtggactgctgaagaacttccaggacatcatgcaaaagcaaagaccagaaagagtgtctcatcttcttcaagataacttgccaaaatctgtttccacttttcagtatgatcgtttctttgagaaaaaaattgatgagaaaaagaatgaccacacctatcgagtttttaaaactgtgaaccggcgagcacacatcttccccatggcagatgactattcagactccctcatcaccaaaaagcaagtgtcagtctggtgcagtaatgactacctaggaatgagtcgccacccacgggtgtgtggggcagttatggacactttgaaacaacatggtgctggggcaggtggtactagaaatatttctggaactagtaaattccatgtggacttagagcgggagctggcagacctccatgggaaagatgccgcactcttgttttcctcgtgctttgtggccaatgactcaaccctcttcaccctggctaagatgatgccaggctgtgagatttactctgattctgggaaccatgcctccatgatccaagggattcgaaacagccgagtgccaaagtacatcttccgccacaatgatgtcagccacctcagagaactgctgcaaagatctgacccctcagtccccaagattgtggcatttgaaactgtccattcaatggatggggcggtgtgcccactggaagagctgtgtgatgtggcccatgagtttggagcaatcaccttcgtggatgaggtccacgcagtggggctttatggggctcgaggcggagggattggggatcgggatggagtcatgccaaaaatggacatcatttctggaacacttggcaaagcctttggttgtgttggagggtacatcgccagcacgagttctctgattgacaccgtacggtcctatgctgctggcttcatcttcaccacctctctgccacccatgctgctggctggagccctggagtctgtgcggatcctgaagagcgctgagggacgggtgcttcgccgccagcaccagcgcaacgtcaaactcatgagacagatgctaatggatgccggcctccctgttgtccactgccccagccacatcatccctgtgcgggttgcagatgctgctaaaaacacagaagtctgtgatgaactaatgagcagacataacatctacgtgcaagcaatcaattaccctacggtgccccggggagaagagctcctacggattgcccccacccctcaccacacaccccagatgatgaactacttccttgagaatctgctagtcacatggaagcaagtggggctggaactgaagcctcattcctcagctgagtgcaacttctgcaggaggccactgcattttgaagtgatgagtgaaagagagaagtcctatttctcaggcttgagcaagttggtatctgctcaggcctga

SEQ ID NO: 115782 - DNA, 2356 bp, Artificial Sequence
  derived and/or modified sequence
cggcgatcgcggcctgaggctgctcccggacaagggcaacgagcgtttcgtttggacttctcgacttgagtgcccgcctccttcgccgccgcctctgcagtcctcagcgcagttatgcccagttcttcccgctgtggggacacgaccacggaggaatccttgcttcagggactcgggaccctgctggaccccttcctcgggtttaggggatgtggggaccaggagaaagtcaggatccctaagagtcttccctgcctggatggatgagtggcttcttctccacctagattctttccacaggagccagcatacttcctgaacatggagagtgttgttcgccgctgcccattcttatcccgagtcccccaggcctttctgcagaaagcaggcaaatctctgttgttctatgcccaaaactgccccaagatgatggaagttggggccaagccagcccctcgggcattgtccactgcagcagtacactaccaacagatcaaagaaacccctccggccagtgagaaagacaaaactgctaaggccaaggtccaacagactcctgatggatcccagcagagtccagatggcacacagcttccgtctggacaccccttgcctgccacaagccagggcactgcaagcaaatgccctttcctggcagcacagatgaatcagagaggcagcagtgtcttctgcaaagccagtcttgagcttcaggaggatgtgcaggaaatgaatgccgtgaggaaagaggttgctgaaacctcagcaggccccagtgtggttagtgtgaaaaccgatggaggggatcccagtggactgctgaagaacttccaggacatcatgcaaaagcaaagaccagaaagagtgtctcatcttcttcaagataacttgccaaaatctgtttccacttttcagtatgatcgtttctttgagaaaaaaattgatgagaaaaagaatgaccacacctatcgagtttttaaaactgtgaaccggcgagcacacatcttccccatggcagatgactattcagactccctcatcaccaaaaagcaagtgtcagtctggtgcagtaatgactacctaggaatgagtcgccacccacgggtgtgtggggcagttatggacactttgaaacaacatggtgctggggcaggtggtactagaaatatttctggaactagtaaattccatgtggacttagagcgggagctggcagacctccatgggaaagatgccgcactcttgttttcctcgtgctttgtggccaatgactcaaccctcttcaccctggctaagatgatgccaggctgtgagatttactctgattctgggaaccatgcctccatgatccaagggattcgaaacagccgagtgccaaagtacatcttccgccacaatgatgtcagccacctcagagaactgctgcaaagatctgacccctcagtccccaagattgtggcatttgaaactgtccattcaatggatggggcggtgtgcccactggaagagctgtgtgatgtggcccatgagtttggagcaatcaccttcgtggatgaggtccacgcagtggggctttatggggctcgaggcggagggattggggatcgggatggagtcatgccaaaaatggacatcatttctggaacacttggcaaagcctttggttgtgttggagggtacatcgccagcacgagttctctgattgacaccgtacggtcctatgctgctggcttcatcttcaccacctctctgccacccatgctgctggctggagccctggagtctgtgcggatcctgaagagcgctgagggacgggtgcttcgccgccagcaccagcgcaacgtcaaactcatgagacagatgctaatggatgccggcctccctgttgtccactgccccagccacatcatccctgtgcgggttgcagatgctgctaaaaacacagaagtctgtgatgaactaatgagcagacataacatctacgtgcaagcaatcaattaccctacggtgccccggggagaagagctcctacggattgcccccacccctcaccacacaccccagatgatgaactacttccttgagaatctgctagtcacatggaagcaagtggggctggaactgaagcctcattcctcagctgagtgcaacttctgcaggaggccactgcattttgaagtgatgagtgaaagagagaagtcctatttctcaggcttgagcaagttggtatctgctcaggcctgagcatgacctcaattatttcacttaaccccaggccattatcatatccagatggtcttcagagttgtctttatatgtgaattaagttatattaaattttaatctatagtaaaaa

SEQ ID NO: 115783 - DNA, 1131 bp, Artificial Sequence
  derived and/or modified sequence
atggtatcttggaaaggcatttacttcatcttaacattattttgggggagtttcttcggaagcatattcatgttatcacccttcctgccactgatgttcgtcaacccctcttggtatcgatggattaataatcgtctggtggccacatggttgacactccctgtcgctctcctcgagacaatgtttggcgttaaggtgatcataactggcgacgcgtttgttcccggggaaagatcggtcatcatcatgaaccaccgtaccagaatggattggatgttcctctggaactgtttgatgcgctactcctatctgaggctggagaagatttgcctcaaggctagcctcaagggagttcctggattcggctgggccatgcaggctgccgcctacatttttatacatcgaaagtggaaggacgataaatcccacttcgaagacatgatcgattacttctgtgatattcacgaacccttacagctgctcatcttccctgaaggcaccgacctgactgagaactcaaaatctagatccaatgccttcgctgagaagaacggactgcaaaaatatgagtacgtcctgcacccgcggaccacagggtttacattcgtagtggaccggttacgggaaggcaaaaacttggatgccgtacatgacataacggtcgcatacccccataacattcctcaatcagagaaacatctgctgcagggcgacttcccccgagagatccactttcatgttcaccgctatccaattgacactctccccacgagcaaggaggacttgcaactgtggtgtcacaagagatgggaggaaaaggaggaacgactgaggtctttctatcagggggaaaagaatttttacttcactgggcagtccgtgatccccccatgcaagtcagagctgcgggttttggtggtgaagcttctgtctatcctctactggaccctcttcagccctgcaatgtgcctgctcatatacctctattccctcgtgaaatggtactttataataaccattgtaatatttgtgctgcaggaaagaatcttcggtggtcttgaaattatagagttagcctgttacagacttcttcataaacagccgcaccttaatagtaaaaaaaacgagtag

SEQ ID NO: 115784 - DNA, 993 bp, Artificial Sequence
  derived and/or modified sequence
atggtctcctggaagggcatttactttatcctcaccctcttttggggtagctttttcggtagtatttttatgttaagcccattcttgccactgatgttcgttaacccatcctggtacaggtggatcaacaacagactcgttgcgacatggctgactttgccggtagctctcctcgaaacaatgttcggagtcaaagtgatcattacaggggacgcttttgttcctggagagcgctccgtgattattatgaaccatcggacccgaatggattggatgtttttgtggaattgtcttatgagatatagttacctccgccttgaaaagatttgtctgaaggcatctctcaaaggtgtgccaggatttggttgggctatgcaagctgcggcgtatatctttattcatcggaagtggaaggacgataagagccatttcgaggacatgattgactatttctgtgacatacatgagccactccaactgctcatttttccagaggggacggatctaaccgaaaacagcaagagccgcagcaacgcatttgccgagaaaaatggactccagaagtacgaatacgtactgcacccccgaactaccggatttacttttgtggtggaccgccttcgcgaggggaaaaacctggatgctgttcacgatattacagtggcatacccccataacattccccagagtgaaaagcatctgttgcagggcgacttccctcgggagattcacttccacgtacaccggtaccccatcgacacacttcctacgtctaaggaagatttgcagctctggtgtcataaaagatgggaagagaaggaggaaagactcagaagtttctatcagggagagaaaaatttctacttcacaggtcagtcggtgatacctccctgcaaatccgagctgcgggtcctcgtggttaaactgtatactgtcttggaccctgtacagccatgcaacgtgccaacacacatcttcgtgcagtcctgctag

SEQ ID NO: 115785 - DNA, 1131 bp, Artificial Sequence
  derived and/or modified sequence
atggtgtcctggaaaggaatttactttatccttaccttgttttgggggtccttcttcggctccatcttcatgctctctccttttctcccgctaatgttcgtgaatccctcctggtataggtggattaacaaccgcttagtggcgacatggctgactctgcctgtggcgctgctagaaactatgttcggtgtgaaagtcataattactggagacgcattcgttcctggagaacgttctgtcattattatgaaccaccggactaggatggactggatgttcctctggaactgcctgatgaggtattcctacctgaggctggagaagatttgcttgaaagcctctcttaagggcgttcctgggttcggctgggccatgcaggcagctgcctacatattcatccaccgcaagtggaaggacgacaagagccacttcgaggatatgatcgactacttttgcgatattcatgaacccttgcagctactgatttttccggaaggcactgatctgaccgagaattcaaagtcaaggtctaacgcctttgccgagaagaacggcctacagaaatatgaatacgtactccatccccggaccaccggctttacttttgtggtggataggcttcgggagggcaaaaatctggacgccgtccacgacatcaccgtggcgtatccacataatattcctcaaagtgaaaagcaccttctccagggggatttcccccgggaaattcatttccatgtgcacaggtaccctatcgatacgctacccacttccaaagaggatctccagctctggtgccataaacgctgggaggagaaagaagagcgacttagaagtttctatcaaggtgagaaaaatttctactttaccgggcagtcagtgatccctccctgcaaaagcgaactgcgagtgctcgtggtgaaactgctttccattctctactggaccctcttttctcccgctatgtgtctcctgatttacctgtacagcctggtaaagtggtacttcatcattactattgtaatttttgtgttgcaagaacggatctttggtggactggaaatcattgagcttgcttgttacaggctattgcataaacagccgcacctgaatagtaagaagaacgagtag

SEQ ID NO: 115786 - DNA, 1131 bp, Artificial Sequence
  derived and/or modified sequence
atggtgtcctggaagggcatctacttcatcctgaccctcttctggggcagcttcttcggcagcatcttcatgctgagccccttcctgcccctgatgtttgtgaaccccagctggtaccgctggatcaacaaccggctggtggccacctggctgaccctgcctgtggccctgctggagaccatgtttggagtgaaggtgatcatcactggagatgcctttgtgcctggagagaggagcgtcatcatcatgaaccacaggaccaggatggactggatgttcctgtggaactgcctgatgagatacagctacctgcggctggagaagatctgcctgaaggccagcctgaagggcgtgcccggcttcggctgggccatgcaggccgccgcctacatcttcatccacaggaagtggaaggatgacaagagccactttgaggacatgattgactacttctgtgacatccacgagcccctgcagctgctgatcttccctgagggcacagacctgacagagaacagcaagagccgcagcaatgcctttgctgagaagaatggcctgcagaagtatgaatatgtgctgcaccccaggaccaccggcttcacctttgtggtggaccggctgcgggagggcaagaacctggatgctgtgcatgacatcaccgtggcctacccccacaacatcccccagagcgagaagcacctgctgcagggcgacttcccccgggagatccacttccacgtgcaccgctaccccatcgacaccctgcccaccagcaaggaggacctgcagctgtggtgccacaagcgctgggaggagaaggaggagcggctgcgctccttctaccagggcgagaagaacttctacttcaccggccagagcgtcatccccccctgcaagtctgagctgcgggtgctggtggtgaagctgctgagcatcctgtactggaccctcttcagccctgccatgtgcctgctgatctacctgtacagcctggtgaagtggtacttcatcatcaccatcgtcatctttgtgctgcaggagcgcatctttggaggcctggagatcatcgagctggcctgctaccgcctgctgcacaagcagccccacctgaacagcaagaagaatgaatag

SEQ ID NO: 115787 - DNA, 993 bp, Artificial Sequence
  derived and/or modified sequence
atggtgtcctggaagggcatctacttcatcctgaccctcttctggggcagcttcttcggcagcatcttcatgctgagccccttcctgcccctgatgtttgtgaaccccagctggtaccgctggatcaacaaccggctggtggccacctggctgaccctgcctgtggccctgctggagaccatgtttggagtgaaggtgatcatcactggagatgcctttgtgcctggagagaggagcgtcatcatcatgaaccacaggaccaggatggactggatgttcctgtggaactgcctgatgagatacagctacctgcggctggagaagatctgcctgaaggccagcctgaagggcgtgcccggcttcggctgggccatgcaggccgccgcctacatcttcatccacaggaagtggaaggatgacaagagccactttgaggacatgattgactacttctgtgacatccacgagcccctgcagctgctgatcttccctgagggcacagacctgacagagaacagcaagagccgcagcaatgcctttgctgagaagaatggcctgcagaagtatgaatatgtgctgcaccccaggaccaccggcttcacctttgtggtggaccggctgcgggagggcaagaacctggatgctgtgcatgacatcaccgtggcctacccccacaacatcccccagagcgagaagcacctgctgcagggcgacttcccccgggagatccacttccacgtgcaccgctaccccatcgacaccctgcccaccagcaaggaggacctgcagctgtggtgccacaagcgctgggaggagaaggaggagcggctgcgctccttctaccagggcgagaagaacttctacttcaccggccagagcgtcatccccccctgcaagtctgagctgcgggtgctggtggtgaagctgtacacagtgctggaccctgtgcagccctgcaatgtgcccacccacatctttgtgcagagctgctag

SEQ ID NO: 115788 - DNA, 4888 bp, Artificial Sequence
  derived and/or modified sequence
gggacgcattactagggcgacggccggacgcctccgcgttacgggatgaattaacggcgggttccgcacggaggttgtgacccctacggagccccagcttgcccacgcaccccactcggcgtcgcgcggcgtgccctgcttgtcacagaatcatggtgtcatggaaagggatttactttatactgactctgttttggggaagcttttttggaagcattttcatgctgagtccctttttacctttgatgtttgtaaacccatcttggtatcgctggatcaacaaccgccttgtggcaacatggctcaccctacctgtggcattattggagaccatgtttggtgtaaaagtgattataactggggatgcatttgttcctggagaaagaagtgtcattatcatgaaccatcggacaagaatggactggatgttcctgtggaattgcctgatgcgatatagctacctcagattggagaaaatttgcctcaaagcgagtctcaaaggtgttcctggatttggttgggccatgcaggctgctgcctatatcttcattcataggaaatggaaggatgacaagagccatttcgaagacatgattgattacttttgtgatattcacgaaccacttcaactcctcatattcccagaagggactgatctcacagaaaacagcaagtctcgaagtaatgcatttgctgaaaaaaatggacttcagaaatatgaatatgttttacatccaagaactacaggctttacttttgtggtagaccgtctaagagaaggtaagaaccttgatgctgtccatgatatcactgtggcgtatcctcacaacattcctcaatcagagaagcacctcctccaaggagactttcccagggaaatccactttcacgtccaccggtatccaatagacaccctccccacatccaaggaggaccttcaactctggtgccacaaacggtgggaagagaaagaagagaggctgcgttccttctatcaaggggagaagaatttttattttaccggacagagtgtcattccaccttgcaagtctgaactcagggtccttgtggtcaaattgctctctatactgtattggaccctgttcagccctgcaatgtgcctactcatatatttgtacagtcttgttaagtggtattttataatcaccattgtaatctttgtgctgcaagagagaatatttggtggactggagatcatagaacttgcatgttaccgacttttacacaaacagccacatttaaattcaaagaaaaatgagtaagattataaggtttgccatgtgaaaacctagagcatattttggaaatgttctaaacctttctaagctcagatgcatttttgcatgactatgtcgaatatttcttactgccatcattatttgttaaagatattttgcacttaattttgtgggaaaaatattgctacaattttttttaatctctgaatgtaatttcgatactgtgtacatagcagggagtgatcggggtgaaataacttgggccagaatattattaaacaatcatcaggcttttagcgacaaggaacacacacatttttcttaaaggcccaatcctaacagactccccgtaccagaggcagatctggaactcgtcaacaacagcccggatcacatgctgttactggactgcccaggtcacctcattgaggtgagcgctgtccctccaggtactcaggcaggtggtgcccaggctccctcccttggcgtccttcttcctgcgccaaacccatctcatccttaagatcagaaaatggaaccccctttgtcgtgaaaccgatcaagcattttgacaggaagcccttcattattcataacattgtatgctgaccaagacgtcagaagaccacctgtgcccttttctctcgtggaagataaaacctggactcagggagcaaccacaggctctccactttgaaactttagtttgaattttaaaagataggaagtaatacagtttaagttcctttctcacactcagtattgcatgcttagtgctggttttcttacaacattttggcaggtgtagctttttctgttaaaaatggtatacatgaagtcacatacttttttaaaggaacactcagaacattctgtcattccagtcagaaactgtcttttgaaatatttctttacaacctaccaaaaaaggaaggttgttttttctacatgtgcttgggtatctaacatctaccattaaaacaacaaatggcttgcagacagggcagtaatggtttatcctaaattactcaaccccttgtagccttgacaaattttaccttaaaaccaaaatgaaacacaaaaattaatccttaataatgatagcaagtgatctttctttttagttttagccttcctttttcaatagtaatatttaaacccacttttgaccaattgtttgcccaaatattcttgtcatttggagtcagtggaaaatccagcacaccaagcaccagtcttcttctgaggcaaaagaaaagtgttgtcattttcactctgttggagctgcacacttttttttctttttttttttctttttttttttgtcgtgtaagaaggatgctggtcagagctgcagaaaatatgaggcaattaaaagtctttagctgttagcaaacctgttagttttacttctgcattgaaccagcctcagaagctacttactgctttatgtactctttgggcattaatgccttctctgtaattatatctcgtttttgcttgacagtgacctacccaataattgcatcgtgcattgccatgaaaggtaaacacattgtgaactgaacttaccaagcagattctgtgagaaagcactggttgaggctgaacactgttgacacatcatttttattggaagagtattaactggtgcctcttctgaaacacaccaacccatattcctctgctcccccaaagctgtttctgatcctgctgggagcaactaactagttattatgcacatctgctccagacccagctctttaacttcatggttttacagcttgttttttctttttcttttctttttttttttttttttttaaaaaagcacctttttttgttgtttccccttaataaaagaggtttctaatttatgtttctctaagatttcctttggttgtatttagaaacacaaatagttttataatcaggattgcatttgtgctgggtaaaagaggagagctgtgctttctaccccaaagttgttggtaatggagccggtctgcccttcctacaaactcaagaggctcattgttcaaggtgtaacaacatttaattgcatgtcctctaacgctttgaaacctttagagggaagatcctcattttttacaattttgttccttttcatcatagaaaacatgtttaagataaaatacaaactttacctaccccaaattcataaagtacatttagtgctgtatagcactaaaacttagagatacagacactgtacttactttttaagaattagagacagtaactccaaaaataattgtccttttttctttctttctttttttacaataaggctcttgaaaattgtcattacttgtgttttcctatacattcatctgtgtgaaagcctttttcttctttgatttaaaaaaattaactatacagttaatggtttagaacttagaactacttagaattaatgctaaagtgtcaggaagaaattaatttagcttcaataattgtgactggcctcaggaattctcccttccacacctgcccacctcacctcactgcaccgcaccgcaccagagccagagcagctgcttgtctgcagcaggacacagttcctacatacgtttcagttctttcatggtaagctcaatggactttgaattgtttacagtgctgtatgtccaattgttaaatgtaccattctgaacgatgttaaagcaagtgtggtttatttatggcatgaaccatgtaacttgaaatatgaacttacaaggaggggcactcattaggtaacaagttcttacaccaaacttccttgatgaaataagccaaaataatcctaaaattcattagaagaacttgataaaagactcaaataaatgttagaaagagcccgtaattttaggactcctataaaattcttccttgtttgttaatgctattaaaactcagattcaagggaaataccagcttccacttgagtcactttgaaatagttaattcaacagcaccatgttagaaatatattggcagccaagactctgaactctgcagaaacatttgtttcacccagacttcaaactctagccctgactatgatgcccctgtgtgcatttacaataaagactccaacggagggagcctgttggtgttaaattgtttacatttctttatacaaataatgtgctttcagtgccttagttacagctccctttctgtttcttgttccaaggattctgtagtatgtagtgtgtttcttaggtaaagtctctttttgctactgaaagggaaatggtctctaaacactggtcactgtagcaggtaaacactactctaacgtggagaaatgagcttcatgctgaggtagtggttgccttagagctgttatttatgctgtagaaaacgaaaatggttttgctacctgataagcttcagattagatatagccctaaagttatcctgtacctgcattaaattttcattttagaagagaatcttggttttggtaattcatttttttttaagatcattatgtgcaaaacaccaagttttaaaaataactcacagaatggccttagttttcaatgtctgatggtatatttgtgagttgtgttatctgtaatatacatcccagaataaaggagtgaattaaatagttt

SEQ ID NO: 115789 - DNA, 1862 bp, Artificial Sequence
  derived and/or modified sequence
gttacgggatgaattaacggcgggttccgcacggaggttgtgacccctacggagccccagcttgcccacgcaccccactcggcgtcgcgcggcgtgccctgcttgtcacaggctgaaaaacagagtgggtactctcttctgggaagctggcaacaaatggatgatgtgatatatgcattccaggggaagggaaattgtggtgcttctgaacccatggtcaattaacgaggcagtttctagctactgcacgtacttcataaagcaggactctaaaagctttggccactccacatcacttgaattatctcctgatttccacctctgctcagatccgccactgcattcgattcttacaggaacgcaggccctataactgtgcttgcaggggatctaggttgcatgttccttaggagaatctaatgcctgatgatctgtcactgtctcctatcatccccagataggaccatctagtctcaggaaaacaagctcagaacgctcgccgattctaccattatgaatcatggtgtcatggaaagggatttactttatactgactctgttttggggaagcttttttggaagcattttcatgctgagtccctttttacctttgatgtttgtaaacccatcttggtatcgctggatcaacaaccgccttgtggcaacatggctcaccctacctgtggcattattggagaccatgtttggtgtaaaagtgattataactggggatgcatttgttcctggagaaagaagtgtcattatcatgaaccatcggacaagaatggactggatgttcctgtggaattgcctgatgcgatatagctacctcagattggagaaaatttgcctcaaagcgagtctcaaaggtgttcctggatttggttgggccatgcaggctgctgcctatatcttcattcataggaaatggaaggatgacaagagccatttcgaagacatgattgattacttttgtgatattcacgaaccacttcaactcctcatattcccagaagggactgatctcacagaaaacagcaagtctcgaagtaatgcatttgctgaaaaaaatggacttcagaaatatgaatatgttttacatccaagaactacaggctttacttttgtggtagaccgtctaagagaaggtaagaaccttgatgctgtccatgatatcactgtggcgtatcctcacaacattcctcaatcagagaagcacctcctccaaggagactttcccagggaaatccactttcacgtccaccggtatccaatagacaccctccccacatccaaggaggaccttcaactctggtgccacaaacggtgggaagagaaagaagagaggctgcgttccttctatcaaggggagaagaatttttattttaccggacagagtgtcattccaccttgcaagtctgaactcagggtccttgtggtcaaattgctctctatactgtattggaccctgttcagccctgcaatgtgcctactcatatatttgtacagtcttgttaagtggtattttataatcaccattgtaatctttgtgctgcaagagagaatatttggtggactggagatcatagaacttgcatgttaccgacttttacacaaacagccacatttaaattcaaagaaaaatgagtaagattataaggtttgccatgtgaaaacctagagcatattttggaaatgttctaaacctttctaagctcagatgcatttttgcatgactatgtcgaatatttcttactgccatcattatttgttaaagatattttgcacttaattttgtgggaaaaatattgctacaattttttttaatctctgaatgtaatttcgatactgtgtacatagca

SEQ ID NO: 115790 - DNA, 1131 bp, Artificial Sequence
  derived and/or modified sequence
atggtgagctggaagggcatctacttcatcctgaccctgttctggggatccttcttcgggtcaattttcatgctatcgcctttcctgccgctgatgtttgtcaaccctagttggtacagatggattaacaaccgactggtggccacctggctgaccctgcctgtagcactcttagagaccatgttcggagtgaaagttatcattacaggagatgcctttgtacctggggagcgctctgtgattatcatgaaccacagaactcggatggattggatgtttctctggaactgtttgatgcgttactcatatctgcgcctggagaagatttgccttaaagcctctcttaagggcgtgcccggatttgggtgggcaatgcaagctgcagcctatatcttcatccacaggaagtggaaagacgataaatcccattttgaagacatgatagattatttctgcgatattcatgaaccactgcaactcttaattttccctgagggcactgaccttactgagaactccaagagtaggtccaatgctttcgcggaaaaaaatggtctgcagaagtacgagtatgttctgcatcctcgcactacaggattcactttcgtggttgacagactgcgggaaggcaagaatctggacgccgttcacgatatcactgtggcctacccacacaacatcccccaaagcgagaaacatctgcttcagggagactttccccgggaaattcattttcatgtgcatcgctatcctatagacaccctgcccacatcaaaagaggacctccagctgtggtgccacaaacggtgggaagaaaaagaagaacgtctcagaagcttttatcagggagaaaagaatttttattttaccggacagagtgtgatccccccatgcaaatccgagctccgggtgctggtggttaaactcctttccatcctttactggaccctgttttccccagcaatgtgcctgttaatctatctgtactctctggtcaaatggtatttcataatcacgattgttatctttgtgcttcaggaaaggattttcggagggctagagattattgagctggcctgttaccgcctgctccataaacagccacatctgaacagcaagaagaatgaatag

SEQ ID NO: 115791 - DNA, 993 bp, Artificial Sequence
  derived and/or modified sequence
atggtgagctggaagggcatctacttcatcctgaccctgttctggggaagtttcttcggcagcatatttatgctgagcccctttttacccctgatgttcgtgaatcccagctggtacagatggattaacaacaggcttgtggccacctggctaaccctaccagtcgcattgctcgagaccatgttcggcgtcaaggtgattattacaggagacgcatttgtgcctggtgaacgatcagtgatcataatgaatcatcgtacccgcatggactggatgtttctctggaattgcctcatgaggtattcttaccttcgactggagaaaatttgcctgaaagcctctttaaaaggggttcccggattcgggtgggcgatgcaggccgcagcctatatctttatccaccggaagtggaaggatgacaaatcccacttcgaagatatgatagactacttttgcgatatccatgagcctctgcagctccttattttccctgagggcactgatttaacagaaaactctaaaagccgctcgaacgcatttgctgagaaaaatgggcttcagaaatacgagtacgtgttgcatcccaggactactgggtttacctttgttgttgatcgcctgcgcgaggggaaaaacttagatgcagtgcatgacataacagtcgcctacccccataatatcccacagagcgaaaagcaccttctgcagggggactttccacgcgagattcattttcacgtacataggtatccgatcgacactctcccaacttccaaggaagacctgcagttatggtgtcacaagaggtgggaggagaaggaagagaggctacgtagcttttatcagggagagaagaacttttactttactggccagtccgtaattcccccgtgcaagtctgagctcagagtgctcgttgttaaactttataccgtcctagaccccgttcagccctgcaacgttcctactcacatctttgtgcagtcttgctag

SEQ ID NO: 115792 - DNA, 1131 bp, Artificial Sequence
  derived and/or modified sequence
atggtgagctggaagggcatctacttcatcctgaccctgttctggggatcgttttttggcagtatattcatgctctctccttttctcccactgatgttcgtgaacccgagctggtaccgctggattaacaataggttagtggccacatggctcaccctccctgtcgcccttcttgaaacaatgtttggcgttaaagtcattataaccggcgatgcctttgtgccaggcgagaggagcgtgattattatgaaccataggactcggatggactggatgttcctgtggaattgtctgatgcggtatagttatctccgactggaaaaaatctgtttgaaggcatcactcaagggggtgcctggcttcggatgggcaatgcaggccgctgcttatatattcatccacagaaagtggaaggatgataagtctcactttgaagacatgattgattacttctgtgacattcacgagcctttacagcttctgatcttccctgaaggaaccgatttaaccgaaaacagcaagagcaggagtaacgcgtttgcagagaagaatggattgcagaagtacgaatacgtgctgcaccccagaacaacaggcttcacctttgtggtcgataggctgagagagggaaagaatctcgatgcagtccacgatattacagtggcttatccacacaatatacctcagagtgagaagcatctgcttcagggggatttccctagggaaattcacttccatgttcatcggtaccctattgacacactcccgactagcaaggaggatctacagctgtggtgccataaacgctgggaggagaaggaagaaagattgaggtctttctatcagggcgaaaagaatttttactttaccgggcagtccgtaattcccccctgtaagtcagagttgcgggtgctggtggtgaagttactttctatcttatattggacgttattttctcctgcgatgtgcctcctgatctacttgtattcgttagtcaaatggtactttattattaccatagtgatctttgttctccaagagcgcatctttggggggttggagataatcgagttggcttgctacaggttgctgcacaagcagcctcatctcaacagtaagaaaaacgaatag

SEQ ID NO: 115793 - DNA, 1131 bp, Artificial Sequence
  derived and/or modified sequence
atggtatcgtggaaaggcatctatttcattctgactctgttttggggtagcttttttggaagcatcttcatgctgtctcctttcctcccattgatgttcgtgaaccctagctggtaccgctggattaacaacagacttgtagccacctggttgactttacctgtagcattactcgaaacaatgtttggagtgaaagtgatcatcactggagatgcttttgtgcccggtgaaaggagcgtgatcatcatgaaccatcgcactagaatggattggatgttcctgtggaattgtctgatgaggtatagctatctccgcctagaaaagatatgtctcaaagcctcattaaagggggttccaggatttggttgggctatgcaggcggcagcctacatctttatccataggaaatggaaagatgataagagccacttcgaggacatgattgactatttttgcgacatccatgaacctctgcagcttctgatctttcctgagggcactgaccttaccgaaaattccaagagcagatctaacgcctttgccgagaaaaatgggctccagaagtatgagtatgtgctacacccacggaccacaggatttacctttgtggtggaccggctcagagagggcaaaaacctggacgcggtccacgacattacggtcgcttatccccacaatattcctcagtcagagaagcatttgctacagggtgatttccccagggaaattcattttcatgtacacaggtacccgattgatactctgccaacttccaaagaggatctccagctctggtgccataaaaggtgggaggaaaaagaggagaggttaaggagcttttaccagggcgagaagaatttctactttaccggccagagtgtgattcccccatgtaagagcgagctgcgggtgctggttgtgaaattgctgtcaatcctatattggaccctgttctctcccgctatgtgtttactgatttacttgtactccttggttaaatggtacttcatcatcacaattgtgattttcgtgctccaagaacgcatctttgggggactggagattattgagctcgcatgctatcggctcctccacaagcagccccacctgaattccaaaaaaaacgagtag

SEQ ID NO: 115794 - DNA, 993 bp, Artificial Sequence
  derived and/or modified sequence
atggtaagttggaagggcatttattttatcctgactctattttggggttctttctttgggagcattttcatgctcagtccgttcctgcctttgatgtttgttaaccccagctggtacagatggattaataaccggcttgtggctacctggctgacactgccagtagcccttttagagaccatgtttggagtcaaagtcatcatcactggggatgctttcgtgccaggggaacgctcagtcattatcatgaatcatcgtactagaatggactggatgttcctgtggaattgtctgatgcgctatagttatttaagactggaaaaaatatgcctcaaggcaagcttaaagggcgtccctgggtttggatgggcgatgcaagccgctgcttacatttttattcatcggaaatggaaggacgataaatcccactttgaagacatgatagactacttctgcgatattcatgagccgcttcagttactgatctttccagagggcacagacctcactgagaatagcaagtcccggagtaatgcctttgctgagaaaaatggcctacagaagtacgaatacgtgcttcatccgaggaccactgggttcactttcgtggtagataggctgcgcgaagggaagaatcttgacgctgtccacgatattacagtcgcttacccacacaacattcctcagtcggagaaacacttgctgcagggagacttcccacgggagattcatttccacgtgcatagatatcccatcgatactctgccgacgtctaaggaggacctccagctgtggtgccataaaagatgggaggagaaagaggagaggttacgtagtttctaccagggcgagaagaacttttatttcaccggtcagagcgttataccaccctgcaagagtgagcttagagtgctggtggttaagctttacacggtactcgaccctgtacagccttgcaatgttcccacccatatcttcgtacagagttgttag

SEQ ID NO: 115795 - DNA, 1131 bp, Artificial Sequence
  derived and/or modified sequence
atggtgtcctggaaaggcatctactttatcttgaccctgttctggggcagcttttttggttcaatttttatgctcagcccgtttcttccactcatgttcgtcaacccctcatggtacagatggatcaataaccggctggtggcgacatggctgaccctacctgtggccctgcttgagactatgttcggagtgaaagtgattatcactggtgacgctttcgtaccgggagagcgctcagtgatcattatgaaccaccgcacccgaatggattggatgttcttgtggaattgtctgatgcggtatagttacttacgactagagaaaatatgcttgaaggcttcccttaagggagttcctggattcggctgggccatgcaggcagccgcatatattttcatccatcgcaagtggaaagatgataaatcccacttcgaagatatgatagattacttctgtgatatccacgagcccctgcagctgctgatctttccagaggggaccgatctgaccgaaaattcaaaaagccgctccaatgcttttgctgagaagaatggattacagaaatatgagtacgtcctgcaccctaggaccacaggctttactttcgttgtggacagactgcgggagggtaagaatctggacgctgtccacgacatcaccgttgcatacccacacaacatccctcagagcgagaaacacctattacaaggagactttccacgtgagatccactttcatgtgcatcgataccctattgacaccctcccaacctcgaaggaggacctccagctgtggtgtcataaaagatgggaggagaaggaggagcggctgcgcagcttttaccagggtgagaagaacttctatttcaccggacagtcagttattccgccatgcaagtcagaattgcgcgttctcgtcgtgaaactcctgagtatactgtattggacattgttctcccccgctatgtgtttgctgatctatctttacagcctggttaagtggtattttattataacaatagtaatcttcgtgctgcaagagagaatctttggaggattagagataatcgagctggcctgttaccggcttcttcataagcaaccccacctgaacagcaaaaaaaacgaatag

SEQ ID NO: 115796 - DNA, 1131 bp, Artificial Sequence
  derived and/or modified sequence
atggtgagctggaagggcatctacttcatcctgaccctgttctggggcagcttcttcggcagcatcttcatgctgagccccttcctgcccctgatgttcgtgaaccccagctggtacagatggatcaacaacagactggtggccacctggctgaccctgcccgtggccctgctggagaccatgttcggcgtgaaggtgatcatcaccggcgacgccttcgtgcccggcgagagaagcgtgatcatcatgaaccacagaaccagaatggactggatgttcctgtggaactgcctgatgagatacagctacctgagactggagaagatctgcctgaaggccagcctgaagggcgtgcccggcttcggctgggccatgcaggccgccgcctacatcttcatccacagaaagtggaaggacgacaagagccacttcgaggacatgatcgactacttctgcgacatccacgagcccctgcagctgctgatcttccccgagggcaccgacctgaccgagaacagcaagagcagaagcaacgccttcgccgagaagaacggcctgcagaagtacgagtacgtgctgcaccccagaaccaccggcttcaccttcgtggtggacagactgagagagggcaagaacctggacgccgtgcacgacatcaccgtggcctacccccacaacatcccccagagcgagaagcacctgctgcagggcgacttccccagagagatccacttccacgtgcacagataccccatcgacaccctgcccaccagcaaggaggacctgcagctgtggtgccacaagagatgggaggagaaggaggagagactgagaagcttctaccagggcgagaagaacttctacttcaccggccagagcgtgatccccccctgcaagagcgagctgagagtgctggtggtgaagctgctgagcatcctgtactggaccctgttcagccccgccatgtgcctgctgatctacctgtacagcctggtgaagtggtacttcatcatcaccatcgtgatcttcgtgctgcaggagagaatcttcggcggcctggagatcatcgagctggcctgctacagactgctgcacaagcagccccacctgaacagcaagaagaacgagtag

SEQ ID NO: 115797 - DNA, 993 bp, Artificial Sequence
  derived and/or modified sequence
atggtgagctggaagggcatctacttcatcctgaccctgttctggggcagcttcttcggcagcatcttcatgctgagccccttcctgcccctgatgttcgtgaaccccagctggtacagatggatcaacaacagactggtggccacctggctgaccctgcccgtggccctgctggagaccatgttcggcgtgaaggtgatcatcaccggcgacgccttcgtgcccggcgagagaagcgtgatcatcatgaaccacagaaccagaatggactggatgttcctgtggaactgcctgatgagatacagctacctgagactggagaagatctgcctgaaggccagcctgaagggcgtgcccggcttcggctgggccatgcaggccgccgcctacatcttcatccacagaaagtggaaggacgacaagagccacttcgaggacatgatcgactacttctgcgacatccacgagcccctgcagctgctgatcttccccgagggcaccgacctgaccgagaacagcaagagcagaagcaacgccttcgccgagaagaacggcctgcagaagtacgagtacgtgctgcaccccagaaccaccggcttcaccttcgtggtggacagactgagagagggcaagaacctggacgccgtgcacgacatcaccgtggcctacccccacaacatcccccagagcgagaagcacctgctgcagggcgacttccccagagagatccacttccacgtgcacagataccccatcgacaccctgcccaccagcaaggaggacctgcagctgtggtgccacaagagatgggaggagaaggaggagagactgagaagcttctaccagggcgagaagaacttctacttcaccggccagagcgtgatccccccctgcaagagcgagctgagagtgctggtggtgaagctgtacaccgtgctggaccccgtgcagccctgcaacgtgcccacccacatcttcgtgcagagctgctag

SEQ ID NO: 115798 - protein, 565 aa, Artificial Sequence
  derived and/or modified sequence
MAKLWFKFQRYFRRKPVRFFTFLALYLTAGSLVFLHSGFVGQPAVSGNQANPAAAGGPAEGAELSFLGDMHLGRGFRDTGEASSIARRYGPWFKGKDGNERAKLGDYGGAWSRALKGRVVREKEEERAKYIGCYLDDTQSRALRGVSFFDYKKMTIFRCQDNCAERGYLYGGLEFGAECYCGHKIQATNVSEAECDMECKGERGSVCGGANRLSVYRLQLAQESARRYGSAVFRGCFRRPDNLSLALPVTAAMLNMSVDKCVDFCTEKEYPLAALAGTACHCGFPTTRFPLHDREDEQLCAQKCSAEEFESCGTPSYFIVYQTQVQDNRCMDRRFLPGKSKQLIALASFPGAGNTWARHLIELATGFYTGSYYFDGSLYNKGFKGERDHWRSGRTICIKTHESGQKEIEAFDAAILLIRNPYKALMAEFNRKYGGHIGFAAHAHWKGKEWPEFVRNYAPWWATHTLDWLKFGKKVLVVHFEDLKQDLFVQLGRMVSLLGVAVREDRLLCVESQKDGNFKRSGLRKLEYDPYTADMQKTISAYIKMVDAALKGRNLTGVPDDYYPR

SEQ ID NO: 115799 - DNA, 1698 bp, Artificial Sequence
  derived and/or modified sequence
atggccaagctgtggttcaagttccagagatacttcagaagaaagcccgtgagattcttcaccttcctggccctgtacctgaccgccggcagcctggtgttcctgcacagcggcttcgtgggccagcccgccgtgagcggcaaccaggccaaccccgccgccgccggcggccccgccgagggcgccgagctgagcttcctgggcgacatgcacctgggcagaggcttcagagacaccggcgaggccagcagcatcgccagaagatacggcccctggttcaagggcaaggacggcaacgagagagccaagctgggcgactacggcggcgcctggagcagagccctgaagggcagagtggtgagagagaaggaggaggagagagccaagtacatcggctgctacctggacgacacccagagcagagccctgagaggcgtgagcttcttcgactacaagaagatgaccatcttcagatgccaggacaactgcgccgagagaggctacctgtacggcggcctggagttcggcgccgagtgctactgcggccacaagatccaggccaccaacgtgagcgaggccgagtgcgacatggagtgcaagggcgagagaggcagcgtgtgcggcggcgccaacagactgagcgtgtacagactgcagctggcccaggagagcgccagaagatacggcagcgccgtgttcagaggctgcttcagaagacccgacaacctgagcctggccctgcccgtgaccgccgccatgctgaacatgagcgtggacaagtgcgtggacttctgcaccgagaaggagtaccccctggccgccctggccggcaccgcctgccactgcggcttccccaccaccagattccccctgcacgacagagaggacgagcagctgtgcgcccagaagtgcagcgccgaggagttcgagagctgcggcacccccagctacttcatcgtgtaccagacccaggtgcaggacaacagatgcatggacagaagattcctgcccggcaagagcaagcagctgatcgccctggccagcttccccggcgccggcaacacctgggccagacacctgatcgagctggccaccggcttctacaccggcagctactacttcgacggcagcctgtacaacaagggcttcaagggcgagagagaccactggagaagcggcagaaccatctgcatcaagacccacgagagcggccagaaggagatcgaggccttcgacgccgccatcctgctgatcagaaacccctacaaggccctgatggccgagttcaacagaaagtacggcggccacatcggcttcgccgcccacgcccactggaagggcaaggagtggcccgagttcgtgagaaactacgccccctggtgggccacccacaccctggactggctgaagttcggcaagaaggtgctggtggtgcacttcgaggacctgaagcaggacctgttcgtgcagctgggcagaatggtgagcctgctgggcgtggccgtgagagaggacagactgctgtgcgtggagagccagaaggacggcaacttcaagagaagcggcctgagaaagctggagtacgacccctacaccgccgacatgcagaagaccatcagcgcctacatcaagatggtggacgccgccctgaagggcagaaacctgaccggcgtgcccgacgactactaccccagatag

SEQ ID NO: 115800 - DNA, 1698 bp, Artificial Sequence
  derived and/or modified sequence
atggcgaagctatggtttaaattccagcggtatttccggagaaaaccggtgagatttttcacattcctcgctctctatctgaccgccggctctctcgtattccttcacagtggattcgttggccagccagccgtctcaggtaatcaggccaaccccgccgcagcgggagggcccgcagaaggagccgaattgtccttcttgggggatatgcacctaggccgagggtttagggacaccggcgaggcttcttccattgcccggcggtatggcccgtggttcaaaggcaaggacggcaatgagcgtgccaaactcggcgactatggaggtgcttggagtcgagcactaaagggacgggtggttcgggaaaaggaagaagagagagccaaatatattggctgttacctcgatgatacgcaatccagagccctgcgaggtgttagtttctttgactataagaagatgactatttttagatgccaggataactgtgccgagcgaggctacttatatgggggcctggaatttggggccgagtgctattgtggccacaaaatccaagcaactaatgtgtccgaagccgaatgcgacatggaatgtaagggcgagagaggctctgtgtgcgggggagctaacagactgagcgtgtatcgcctccagttggcccaggagtccgcgcggagatacggtagtgctgtgttcagggggtgcttcaggcggcctgataatctgtcactcgcactgcccgtgaccgcagcaatgctcaacatgtcagttgacaaatgcgttgatttttgcacagaaaaggagtacccactggccgccctggccgggacagcatgccactgtggcttccctaccacacgctttccgctgcacgatcgagaggacgaacagctgtgcgcacagaaatgcagcgccgaagaattcgaatcttgcggtacaccctcatatttcatcgtctatcagacacaggtgcaggacaacagatgtatggataggagatttctgccagggaaaagcaagcagctaatcgcactggctagcttccctggagccggaaatacctgggcccgccatctaatcgagctggctaccggcttctataccggatcttattacttcgatggcagcctttataataaggggttcaaaggagaacgagatcattggcgtagtggcagaactatatgtatcaagacccatgagagcggccagaaagagatcgaggcctttgacgccgccattcttctgattcggaacccttacaaggccctgatggccgagttcaacaggaagtatggaggccacatcggatttgccgcccatgcacactggaagggtaaggagtggcctgagttcgtgagaaactacgccccctggtgggccactcatacacttgattggctgaaatttgggaagaaagtgcttgtggttcactttgaagacctgaagcaagatctcttcgtgcagctcggccgcatggtgagcctgctgggtgtggccgttcgggaagacagattactgtgcgtggagagtcaaaaagacggtaactttaaaaggtctggcttaagaaagctggaatacgatccttatacggcggatatgcagaagaccatctcagcctatataaagatggtggatgctgctctgaagggaaggaatctgactggcgtcccagatgattattatcctcgttag

SEQ ID NO: 115801 - DNA, 1698 bp, Artificial Sequence
  derived and/or modified sequence
atggcaaagttgtggttcaaattccagagatacttccgtcggaagcccgtacgattctttactttccttgcactctatctgaccgctggctccctggtgttcctgcactccggtttcgtgggtcagcctgccgtgtctggaaatcaggctaaccccgcagctgctggtggccccgctgagggggcggaactgtcttttctgggcgacatgcatctggggcgtggctttagagacacaggggaagcttcatcaattgcgaggcggtacggcccctggttcaagggaaaggacgggaacgagagagccaagcttggagattatggcggggcgtggagtagagccctgaaaggaagagttgtgcgtgaaaaggaggaagagcgggccaagtacatcggatgttacttagatgacacacagagtcgggcactcagaggcgtgtccttttttgactacaagaagatgaccattttccgatgtcaagacaattgcgctgaacgggggtacttatacggaggactggagtttggggcagagtgctattgcggacataagatccaagctactaatgtttccgaagcagaatgcgacatggagtgcaaaggggagcgcggatccgtctgcggcggtgccaatcgactgagtgtataccggctgcagcttgcccaggagtcagcacgacgctatgggtccgccgtattccgaggctgctttcgccggccagacaacctgtccctcgcgctcccagtgaccgccgcgatgttaaatatgagcgtggacaagtgtgtggacttctgcactgaaaaggagtaccccctggctgctctggctggaacagcttgccactgcggattccctacgacccgtttccctctgcatgatagagaagacgaacagctctgtgctcaaaaatgtagtgcagaggaattcgagtcatgcgggaccccatcatactttatcgtttatcagacccaggttcaggataatcgctgcatggacagaagatttctcccgggtaagtctaagcagcttatagccctggcttccttccccggtgccggtaacacctgggccagacatttaatcgagctagctaccggattctacacaggttcttactactttgatgggagcctgtacaacaagggtttcaaaggggaacgagatcactggcgctctggtagaaccatttgtatcaaaactcatgagagcggtcagaaagaaattgaagctttcgatgctgctatccttctcattagaaatccctataaagcactgatggcagaatttaaccgcaagtatggcgggcacatcggatttgccgctcacgctcactggaaagggaaggagtggccagagtttgtgaggaattacgcgccttggtgggctacccacacactggattggctcaaattcgggaagaaggttctcgtcgtccactttgaagacctgaaacaggacttattcgtgcagctgggtcgcatggtttcactcctcggagtggccgttagagaagaccgtctgttatgcgtggaatcgcagaaagatggcaattttaagcggagcgggctgaggaaactcgagtatgatccttatactgccgacatgcagaaaacaatctccgcttatatcaaaatggtggatgctgctttgaaaggaaggaacctcacaggcgtgcctgatgattactaccctaggtag

SEQ ID NO: 115802 - DNA, 1698 bp, Artificial Sequence
  derived and/or modified sequence
atggccaagctgtggttcaagttccagcgctacttccggaggaagcctgtgcgcttcttcaccttcctggccctgtacctgacagctggcagcctggtgttcctgcacagcggctttgtgggccagcctgctgtgtctggcaaccaggccaacccagctgctgctgggggccctgctgagggcgctgagctgtccttcctgggggacatgcacctgggccggggcttccgggacacaggagaggccagcagcatcgccaggagatatggcccctggttcaagggcaaggatggaaatgaaagagccaagctgggggactatggaggagcctggagccgggccctgaagggccgggtggtgcgggagaaggaggaggagcgggccaagtacatcggctgctacctggatgacacccagagccgggccctgcggggcgtgtccttctttgactacaagaagatgaccatcttccgctgccaggacaactgtgccgagcggggctacctgtatggaggcctggagtttggagctgagtgctactgcggccacaagatccaggccaccaacgtgtctgaggccgagtgtgacatggagtgcaagggggagcggggctctgtgtgtggcggggccaaccggctgtctgtgtaccgcctgcagctggcccaggagagcgcccggcgctatggcagcgctgtgttccggggctgcttccggcggccagacaacctgagcctggccctgcctgtgacagctgccatgctgaacatgtctgtggacaagtgtgtggacttctgcacagagaaggagtaccccctggccgccctggccggcacagcctgccactgcggcttccccaccacccgcttccccctgcatgacagagaagatgagcagctgtgtgcccagaagtgcagcgctgaggagtttgagagctgtggcacccccagctacttcatcgtgtaccagacccaggtgcaggacaaccgctgcatggaccggcgcttcctgcccgggaagagcaagcagctgattgccctggccagcttccctggggccggcaacacctgggcccggcacctgattgagctggccaccggcttctacacaggcagctactactttgatggcagcctgtacaacaagggcttcaagggggagcgggaccactggaggagcggccgcaccatctgcatcaagacccatgaaagtggccagaaggagattgaggcctttgatgctgccatcctgctgatccggaacccctacaaggccctgatggccgagttcaacagaaaatatggaggccacatcggctttgctgcccacgcccactggaagggcaaggagtggccagagtttgtgagaaattatgccccctggtgggccacccacaccctggactggctgaagtttgggaagaaggtgctggtggtgcactttgaggacctgaagcaggacctgtttgtgcagctgggccgcatggtgtccctgctgggcgtggccgtgcgggaggaccggctgctgtgtgtggagagccagaaggatggcaacttcaagaggagcggcctgaggaagctggagtatgacccctacacagctgacatgcagaagaccatcagcgcctacatcaagatggtggatgctgccctgaagggcaggaacctgactggagtgcctgatgactactaccccaggtag

SEQ ID NO: 115803 - DNA, 1698 bp, Artificial Sequence
  derived and/or modified sequence
atggccaagctgtggttcaagttccagcggtacttccggcggaagcctgtgaggttcttcacattcctggccctctacctcactgctggcagtttagtgttcctccattccggattcgtcgggcagccagccgttagtggcaaccaggctaaccccgccgccgcaggaggtccagccgaaggagctgaactaagcttcctgggcgacatgcatttgggccgaggcttcagagataccggtgaggccagctccattgcccggagatacggtccttggtttaaaggcaaggacggaaatgaacgggccaaattgggcgactacggaggtgcttggtcccgcgcactcaagggcagggttgtgagggagaaggaggaagaacgggccaaatacatcggctgttacttggacgacacacagtcacgggccctgagaggcgtttctttttttgattacaaaaagatgactatttttagatgccaggacaattgcgctgagcgtggctacctgtacgggggactcgaattcggagccgaatgttattgtggccacaagatccaggcgaccaacgtgagtgaagctgagtgtgatatggagtgcaagggcgagcgcgggagcgtatgtggtggggctaatagactttctgtgtacaggctgcagcttgcccaggagagtgcccgccggtatggatcggccgtctttagaggctgctttcgccggcccgacaacctttccttggcccttccagttactgccgctatgctgaacatgagcgtagataagtgcgtcgatttttgcactgagaaggagtatcctctggcagcactagccggtactgcctgtcactgcgggtttcctaccactagattccccctgcacgatagagaagacgagcagctgtgtgcgcagaagtgttccgccgaggaatttgagagctgcggcactccgagctacttcattgtgtatcaaacacaggttcaggacaacagatgtatggatcgacggttcctgcccggaaaaagcaaacagttaattgctcttgcctctttccctggtgcgggtaatacctgggcaaggcacctgattgagttagccactggtttctacacgggcagctattatttcgacggctctttatacaacaaagggtttaagggagagagggaccactggagaagcgggagaactatttgtatcaaaactcacgagtccggacaaaaggaaatcgaggcttttgacgccgcaattttacttatacgaaacccgtataaggctttgatggctgaattcaacaggaagtatgggggccacattggctttgccgcccacgcacactggaaaggcaaggagtggccagagtttgttcgcaactacgccccttggtgggcaacacatacgttggactggttgaaatttggaaaaaaggttttagttgtgcatttcgaagacctgaaacaggatctcttcgtccaactaggtcggatggtgtccctccttggcgtggctgtgcgggaagatcgacttctgtgtgttgaaagccagaaggacgggaatttcaagcgatcgggcctcaggaagctggaatacgacccatatactgcggacatgcagaagaccatatccgcgtacatcaagatggtggacgccgccctaaagggtagaaatttgaccggcgtgcccgatgactactatcctaggtag

SEQ ID NO: 115804 - DNA, 1698 bp, Artificial Sequence
  derived and/or modified sequence
atggccaagctgtggttcaagttccagcggtacttccggcggaagccggtccggttttttacttttctagctctgtatctgactgcggggagcctggtgtttctccattcaggctttgtgggccagcccgcggtgtctggaaaccaggccaacccagctgccgctggtgggcctgctgaaggtgctgaactgagctttctgggcgatatgcatctgggcagagggttccgggacaccggggaagcctcctccattgcccggcgatacgggccgtggtttaaaggaaaagacggcaatgaaagggctaaacttggcgactacggcggtgcctggtcacgtgccctgaagggcagagtagtgagggagaaagaggaagaaagagctaaatacatcggttgttacctggatgacacacagagtcgggcccttcgcggagttagtttctttgactataaaaaaatgacaattttccgctgtcaagataactgcgcagagcgggggtatctgtacggcggcttggagttcggagcggagtgctattgcggacacaagatccaagcgacgaacgtgagtgaggccgaatgtgatatggaatgtaagggggaacgcggatctgtttgcggaggtgcaaaccggcttagcgtgtacagactgcagttggcccaggaatcagcccgtcgttacggatctgccgtgttccgcggctgctttcgtcggccagacaatctatctttggcgttgcctgtgacagcagccatgttaaatatgtcggtggacaaatgcgtggacttctgcactgaaaaagaatatcctctagccgccctggctggcacggcttgccattgcggctttcccaccactagattccctctacatgacagagaggatgagcaactgtgtgctcagaagtgttctgctgaggagttcgagtcttgtggcacccccagctactttatagtttaccagactcaggtccaggacaatagatgcatggataggcgctttctgcctggtaagtcaaaacagctgatagccctagcttcgttccccggggcaggaaacacatgggctcgacacttaatagaattggctacaggattctacaccggatcttactacttcgatggatctctctacaataaaggatttaaaggtgaacgggaccactggcgctctggaagaacaatctgcattaagacccacgaaagcggtcaaaaggaaatcgaggcctttgacgcagccatcttgcttatcagaaatccctacaaggctctaatggcagagtttaatagaaagtacggaggacacattggattcgcagcgcatgcacactggaaaggaaaggagtggcccgagtttgtgcggaactacgctccgtggtgggccacccatactttggattggctaaagtttgggaaaaaagtcttggtagtgcattttgaggaccttaaacaggacctgttcgtacagttaggcagaatggtgagtctgctcggcgtggcagtccgtgaagatcgcctcctgtgcgtggaaagtcagaaggacggcaactttaaacggagtggcttgagaaagctggagtatgatccttatacggcggacatgcagaagacaatctctgcgtacattaaaatggtagatgctgctttgaaaggaaggaacctgacaggcgttcctgacgattactatcccaggtag

SEQ ID NO: 115805 - DNA, 1698 bp, Artificial Sequence
  derived and/or modified sequence
atggctaagctgtggttcaaattccagaggtacttcaggcgcaagccagtgaggttctttacatttctggctctgtacttgaccgcaggatcgttagtctttctccattcgggatttgtgggtcaaccagccgttagtggcaaccaggctaaccctgccgcagcaggtgggcctgccgagggagccgaattgtcgttcctgggcgacatgcatttgggacgcggatttagagacacgggagaggcctcctccatcgcaaggaggtacggcccttggttcaaggggaaggacggcaacgagagggctaaactaggagattatggcggagcatggagccgggcactgaagggccgagtggtgcgggaaaaggaagaagaaagggctaagtacatcggttgctacctggacgacacccaatcgcgcgcactgaggggagtgtccttcttcgattacaagaagatgaccatctttcggtgccaggacaattgcgccgaacggggttatctgtacggcggattagagtttggcgcagagtgttactgtggccacaaaatccaggcaaccaacgtgtctgaagcagaatgcgatatggaatgcaaaggcgagagagggtcagtgtgcggcggagctaaccgcctgagtgtgtaccgcttgcagctggcacaagagtccgcccgtagatatggttcggccgtttttcggggatgttttcggagacctgataaccttagcctggctcttcccgtgactgcggctatgctgaatatgtctgttgacaagtgcgtggatttttgcaccgagaaggaatacccactggccgctcttgcaggtactgcgtgtcactgcggctttccaacaactcgctttcccctgcatgaccgcgaggacgagcagctctgcgcccagaaatgctccgccgaagagttcgaaagttgcggcacgccgagttacttcattgtatatcagactcaggtccaggataacagatgtatggatcggcgattcctgcccggaaagtctaagcagcttattgcactggcaagttttcctggggcaggaaacacctgggccaggcatcttattgaactggcgaccggcttttacaccggaagttactacttcgacggtagtctctacaataaaggctttaaaggtgagagagaccattggagatcaggtagaaccatttgtatcaaaactcacgagagtggacagaaagaaattgaggcatttgacgctgcaattctcttaattaggaatccttataaggccctaatggccgaattcaataggaaatatgggggacacatcggcttcgccgcacacgcccattggaaagggaaggagtggcccgagttcgtaaggaattatgccccttggtgggcaacccacactctggattggctaaaattcgggaaaaaggtgctcgtagtccactttgaagacctgaaacaggacctcttcgtgcaactcggaaggatggtgtccctcctgggggtcgcagtgcgtgaagaccgcttgctctgtgtggagagtcaaaaggacgggaatttcaagcgaagtggcctacgaaagctcgaatacgacccttatacagccgacatgcagaaaactatttcagcttacatcaaaatggtggacgctgcacttaagggcaggaacttaacgggagtgcccgacgactattaccccagatag

SEQ ID NO: 115806 - DNA, 1698 bp, Artificial Sequence
  derived and/or modified sequence
atggccaagctgtggttcaagttccaacgctactttagaagaaaacctgtccggttttttacttttcttgccctctatctgacagcagggtcactcgtgttcctgcactccggattcgtcgggcagcctgcagtgtctggcaatcaagcaaacccagcagcggcaggtgggccagccgaaggggctgagttaagcttcctcggggatatgcatctgggaaggggcttccgcgacacaggcgaggcaagctcaatcgctcggcgttacggcccatggttcaagggcaaagacggaaatgaacgggcaaaacttggggattacggcggagcttggagcagggccttgaaggggcgtgtggtaagagagaaagaagaggaaagggctaagtacatcggttgctacctcgatgatacacagtcccgagctctgaggggagtttctttcttcgattacaagaagatgacaatcttccgatgccaggataattgtgctgagaggggctacctgtacgggggactagagttcggggcagagtgctactgcggacataagatccaggccacgaacgtgtctgaggcagaatgtgatatggaatgtaaaggagagcgcggaagtgtctgcggcggagctaatcggctaagtgtttataggctacagctcgcacaagaatcggcccgaagatacggcagcgccgtcttccgcggttgctttcgcaggccagacaatctgtctttagcactgccggtcaccgcggcaatgttgaacatgagcgtggataagtgtgtagatttctgcacggagaaagaatatcccctggccgctctcgccggtacggcttgccactgtggctttcccacaactagatttccactacacgatcgggaggacgagcagctgtgcgcacagaagtgtagtgccgaagagttcgagtcttgtggcaccccatcctacttcattgtttaccaaactcaggtgcaggacaatcggtgtatggataggcgcttcttgcctggaaagtccaaacagctgatcgcacttgcctcatttccgggagccggaaatacttgggcccgacatctgattgagctggcaaccggtttctataccggcagctattatttcgatggctctttgtataataaaggattcaaaggagaaagggaccactggcggtcaggaaggaccatatgtattaagacccacgaatctggccaaaaggaaatcgaggcctttgacgcggctatcctgctgatacgaaacccttataaggctttaatggccgagtttaatagaaagtacggagggcacattggatttgccgctcatgctcactggaaagggaaggagtggccagagtttgttaggaattacgctccctggtgggctacgcacaccctggactggcttaagttcgggaaaaaagtgttagtggtgcactttgaagacttaaagcaggatttgtttgtccagcttgggaggatggtgagcctcctaggggtcgccgtcagggaagaccgcctcctgtgcgtggagagtcagaaagacgggaatttcaagagatctggcttacgcaaactggagtatgacccgtacaccgccgacatgcagaagaccatctctgcttacatcaagatggtcgacgcagcactgaagggacgcaacttaactggggtgcccgatgactattacccaaggtag

SEQ ID NO: 115807 - DNA, 4710 bp, Artificial Sequence
  derived and/or modified sequence
tttctcataaaatctctgctggaccagccactcctagtggggagcccagggtggtctgggagtgctgcatgcacccagctgctgtatcaccaggacatcaggaggtggagatgttcgcttgtgtgttctccactgcccaaacccaggtggttattctgcaacagctacaacttgagtaagaccaaaacacaactcaagtggactttctaaaaagagaataatttattttggctcccagacatcaaaattcgcaagggattgcttcaggtggcatccctgagtcctgatgcctgactggatggaggcccaccagcttctgttcccatgaggtagaaaggccaagcttggtcttcagctggggaagaggccagaaacaaggcccccagtgaaataacccagatccattggcctgaggagcagagaaagggcaagaagtgaactgcagctgctggtaaccctcagaaaccttctccaagtgctattctcacagttctttaggaacactctgaagtgaagaacaatatgtaggaaaatgggaccaacttatgtgtgttctgagcctcaaaacccccttgttggcccaaagaagctcaccttcagtttgggagggctggtaagctccatcctttctcatggcctcagccaagcattgaacttgccctccccttctggccttggtgatcactttttcaggaagagtgagactgaggacccccaagtgttccatccctaaggaaagcttgggaaaccaagccccttccatcctctcccaagcaccccagccaagccccagagagccagtccggaatgatcccactatggccaagctctggttcaaattccagcggtacttccgccggaaacctgtgcgcttctttaccttcctggcactctacctgactgctgggagccttgtcttccttcactctggctttgtgggccagcccgctgtctcggggaaccaggcgaaccccgctgctgcaggaggcccagctgagggtgctgagctgtccttcttgggtgacatgcatctgggcagaggtttccgggacacaggtgaagcctcaagcattgctcgcaggtacggaccctggttcaagggcaaggatgggaatgagagagccaagcttggcgactacggtggagcctggagccgagccctcaaggggagggttgtccgggagaaggaggaagagcgagccaagtacatcggctgctacctggatgacacccagagtcgggcccttcgaggagtgtccttttttgactacaaaaagatgaccatcttccgttgccaggacaactgtgctgaacggggttacctgtatggcgggctggagttcggcgccgagtgctactgcggccacaagatccaggcgacgaacgtgagcgaggcagagtgcgacatggagtgcaagggcgagcgaggcagcgtgtgcggcggcgccaaccgcctctctgtctaccggctgcagctggcccaggagtcggcccgcaggtatggaagtgcagtgttccggggctgcttccgcaggcccgacaacctttccctggccttacccgtgacagctgccatgctgaacatgtctgtggacaaatgcgtggacttctgcactgagaaggagtacccgctggcagctcttgcaggcaccgcctgccactgtgggtttcccaccacccgattcccgctccatgacagagaggatgagcagctctgtgcccagaagtgcagcgcggaggagtttgagagctgcgggactcctagttacttcattgtgtaccagacacaagtccaagacaaccgttgcatggacagaaggttcctgccaggcaagtccaagcagctcattgctttggccagcttcccaggtgctggcaacacgtgggctcgccacctcattgaattggccacaggcttctacactggcagctactacttcgatggctccctctacaacaaagggtttaaaggtgagcgggaccactggcgcagcggacggaccatctgcatcaagacgcacgaaagcggccagaaagagatcgaggccttcgacgccgccatcctgctcatccgcaacccctacaaagccctcatggctgagttcaaccgcaagtacggcggccacataggctttgctgcgcatgcccactggaagggcaaagagtggccagagttcgtgaggaactatgccccgtggtgggccactcacacactggactggctcaagtttggcaagaaggtgctggtggtgcactttgaggacctgaagcaggacctctttgtccagctgggccggatggtcagcctgctgggcgtggctgtcagggaggaccggctgctctgtgtggagagccagaaggatggcaacttcaagcgctcagggctccggaagctcgagtatgacccctatactgcggacatgcagaagaccatctctgcctacatcaagatggtggatgcagccctcaaagggcggaacctaacgggtgtccccgatgactactacccaagatgatgcgtccacacagggggagggtagactgggagtcctgaccacgcaggccctggggactcaagacccctggttacccccactcatctgtcctctctttggtctggggacaatccccttggctgctctttgccttcaatgagtttcctgcatgacagaggaggctcaagggaagagattgcccaggcactaccactctgctcacatgttccccccttggcaatgtggggcatcttgtttagggggttctagttacatggactcttttctgtctcctgggtccctgcccccaccactctgggttccatttgtgggagggagggctcatccacatcatggagacttgctggatgccccatggcaattgtcaaggctcttgatgcaagagcccagggggctattgtaaaaacttggccccagatgcttgtcccttctgggctgagatttcgcagcccccttctcatctccacccaagaagtgctggcaccgatgtttaactcaggccaccttctgttctaaagaaagattgctgggaagtttctccgtggccttaggtttctgacatcctggatagtgtggggaggtaatggtgctcacagtaggttaattggagacaccatgtggggccattggtgttatgagccccccaggccacactgcttctcagaaatgagctgcttgcctttccacctccagggcatgaaccctgcccctttctatccatgctgtgtccaggaggtgaccttgagatcctgataccaccttcaaggaacctcaggcaccaacagtgagcccacgaggatggtcacatgccatgtgcagaatttgacttaagagagagccccagtgacacatctctccatggtgggctccagtcagtcttacactgcccttctgacccctacaaatgggtcctttgctatccaggtgagacagcaagagtgttcttaatcagatggaaccacacccaaaatggacccccactaccttcccagaccatatatctccccttgatcatagtccaacagggccagcttcccttgggggccctttaaggaatggggtgaatgaaattgtgtcatttctatacaaacactgctctcttgatgctgaaatgccaaaccgaaggatttctgaggacctaaatcacggagcatcaatcttacaaagtgttggtccagagtcccatctcttccccaaccctggataccagtagcttcccacccagtccaaacctgcaccatccatcattatgtagatgaaaaagccataggtcatagcctctttgctattctattggagtagcctccctaggcagtccctctgaagccttggagtgcaggtaaatgctcattcccaagtagcaaagagaccatggagaaggtgcgtgtaaagagatatatttttgtaagaggaatatgattaatacattccgccccttggaacctggccatgcaaagcaagggcacagggattagacctgtggcacacttccccaattccctcatctgtaggatttgggctgccccaggcccacccagggggctctgaatgtattttgtaccgtgtttctttcccccaggagaatttttagtcttctttcatgaagcagtggaggggttggcctcccttctactgggaggttgactctctctgggagactcttggtccaagacctgggtcagttctttgctggtggtcccctctgaccacaagcttctgcctgaagattcctcaggtcaacaccatcattaaatgcgagttttgttgatgattctaccatgtggtagagtgttgtgtaagacaggttcacaaatgggatgttttcctagtgtgtgtgtgtgtgtgtgtgtgtgtgtatgagagagagagagagagacaacagagacagagagaggcagagaggcatagagagacagagagagagacaagaaacagagatagacagaaaatgttcggggtggcaggcgggttggtgtataactgctttgtgcctgtgtgactctggcatagctgctcagggagaattacgtgcctctgtgtgtaaaattgcctttgtgttctcctgcctttctatgttttgaaactgtatcccacaagttgccggtatgaccatcttatttgtaatgagtctgtgcaggtccttgtgtatggaattgcacccgtgtaaaggaggaaatggtcagtgtgcatgaaa

SEQ ID NO: 115808 - DNA, 4481 bp, Artificial Sequence
  derived and/or modified sequence
atccccggggcgggtgcccgcgcggggcctcgccgcggctcggggcacccgcagtgccgcccgcccgagcgccaggctcacaggagcccggctttcacttcctctcgcttccgcccgcctccctggctcgccggctggcgtcgccaccgcctcctcgtccccggccaccgctgtcgccgctgctgcaattcaaggcgcacactatcccactttcccgctggaggcgcagaggatgccccttgagccagacctggagaaatagccccagggcccggcaggaggagccttggtggcgagaaaggaaatccaggctcccctttccttaaagccactgcagcagctgggaaggcgcccacagagcgggcgcgccaagcgggacgcgggagtcgcagagagggaccccgggcgcctgctgagctcagctggcagagtttgcaagtggcggagacccttcaggtggcatccctgagtcctgatgcctgactggatggaggcccaccagcttctgttcccatgaggtagaaaggccaagcttggtcttcagctggggaagaggccagaaacaaggcccccagtgaaataacccagatccattggcctgaggagcagagaaagggcaagaagtgaactgcagctgctggtaaccctcagaaaccttctccaagtgctattctcacagttctttaggaacactctgaagtgaagaacaatatgtaggaaaatgggaccaacttatgtgtgttctgagcctcaaaacccccttgttggcccaaagaagctcaccttcagtttgggagggctggtaagctccatcctttctcatggcctcagccaagcattgaacttgccctccccttctggccttggtgatcactttttcaggaagagtgagactgaggacccccaagtgttccatccctaaggaaagcttgggaaaccaagccccttccatcctctcccaagcaccccagccaagccccagagagccagtccggaatgatcccactatggccaagctctggttcaaattccagcggtacttccgccggaaacctgtgcgcttctttaccttcctggcactctacctgactgctgggagccttgtcttccttcactctggctttgtgggccagcccgctgtctcggggaaccaggcgaaccccgctgctgcaggaggcccagctgagggtgctgagctgtccttcttgggtgacatgcatctgggcagaggtttccgggacacaggtgaagcctcaagcattgctcgcaggtacggaccctggttcaagggcaaggatgggaatgagagagccaagcttggcgactacggtggagcctggagccgagccctcaaggggagggttgtccgggagaaggaggaagagcgagccaagtacatcggctgctacctggatgacacccagagtcgggcccttcgaggagtgtccttttttgactacaaaaagatgaccatcttccgttgccaggacaactgtgctgaacggggttacctgtatggcgggctggagttcggcgccgagtgctactgcggccacaagatccaggcgacgaacgtgagcgaggcagagtgcgacatggagtgcaagggcgagcgaggcagcgtgtgcggcggcgccaaccgcctctctgtctaccggctgcagctggcccaggagtcggcccgcaggtatggaagtgcagtgttccggggctgcttccgcaggcccgacaacctttccctggccttacccgtgacagctgccatgctgaacatgtctgtggacaaatgcgtggacttctgcactgagaaggagtacccgctggcagctcttgcaggcaccgcctgccactgtgggtttcccaccacccgattcccgctccatgacagagaggatgagcagctctgtgcccagaagtgcagcgcggaggagtttgagagctgcgggactcctagttacttcattgtgtaccagacacaagtccaagacaaccgttgcatggacagaaggttcctgccaggcaagtccaagcagctcattgctttggccagcttcccaggtgctggcaacacgtgggctcgccacctcattgaattggccacaggcttctacactggcagctactacttcgatggctccctctacaacaaagggtttaaaggtgagcgggaccactggcgcagcggacggaccatctgcatcaagacgcacgaaagcggccagaaagagatcgaggccttcgacgccgccatcctgctcatccgcaacccctacaaagccctcatggctgagttcaaccgcaagtacggcggccacataggctttgctgcgcatgcccactggaagggcaaagagtggccagagttcgtgaggaactatgccccgtggtgggccactcacacactggactggctcaagtttggcaagaaggtgctggtggtgcactttgaggacctgaagcaggacctctttgtccagctgggccggatggtcagcctgctgggcgtggctgtcagggaggaccggctgctctgtgtggagagccagaaggatggcaacttcaagcgctcagggctccggaagctcgagtatgacccctatactgcggacatgcagaagaccatctctgcctacatcaagatggtggatgcagccctcaaagggcggaacctaacgggtgtccccgatgactactacccaagatgatgcgtccacacagggggagggtagactgggagtcctgaccacgcaggccctggggactcaagacccctggttacccccactcatctgtcctctctttggtctggggacaatccccttggctgctctttgccttcaatgagtttcctgcatgacagaggaggctcaagggaagagattgcccaggcactaccactctgctcacatgttccccccttggcaatgtggggcatcttgtttagggggttctagttacatggactcttttctgtctcctgggtccctgcccccaccactctgggttccatttgtgggagggagggctcatccacatcatggagacttgctggatgccccatggcaattgtcaaggctcttgatgcaagagcccagggggctattgtaaaaacttggccccagatgcttgtcccttctgggctgagatttcgcagcccccttctcatctccacccaagaagtgctggcaccgatgtttaactcaggccaccttctgttctaaagaaagattgctgggaagtttctccgtggccttaggtttctgacatcctggatagtgtggggaggtaatggtgctcacagtaggttaattggagacaccatgtggggccattggtgttatgagccccccaggccacactgcttctcagaaatgagctgcttgcctttccacctccagggcatgaaccctgcccctttctatccatgctgtgtccaggaggtgaccttgagatcctgataccaccttcaaggaacctcaggcaccaacagtgagcccacgaggatggtcacatgccatgtgcagaatttgacttaagagagagccccagtgacacatctctccatggtgggctccagtcagtcttacactgcccttctgacccctacaaatgggtcctttgctatccaggtgagacagcaagagtgttcttaatcagatggaaccacacccaaaatggacccccactaccttcccagaccatatatctccccttgatcatagtccaacagggccagcttcccttgggggccctttaaggaatggggtgaatgaaattgtgtcatttctatacaaacactgctctcttgatgctgaaatgccaaaccgaaggatttctgaggacctaaatcacggagcatcaatcttacaaagtgttggtccagagtcccatctcttccccaaccctggataccagtagcttcccacccagtccaaacctgcaccatccatcattatgtagatgaaaaagccataggtcatagcctctttgctattctattggagtagcctccctaggcagtccctctgaagccttggagtgcaggtaaatgctcattcccaagtagcaaagagaccatggagaaggtgcgtgtaaagagatatatttttgtaagaggaatatgattaatacattccgccccttggaacctggccatgcaaagcaagggcacagggattagacctgtggcacacttccccaattccctcatctgtaggatttgggctgccccaggcccacccagggggctctgaatgtattttgtaccgtgtttctttcccccaggagaatttttagtcttctttcatgaagcagtggaggggttggcctcccttctactgggaggttgactctctctgggagactcttggtccaagacctgggtcagttctttgctggtggtcccctctgaccacaagcttctgcctgaagattcctcaggtcaacaccatcattaaatgcgagttttgttgatgattcta

SEQ ID NO: 115809 - protein, 213 aa, Artificial Sequence
  derived and/or modified sequence
MTGSFYTHSPLTIQLTLSSHRCNLPPLSSEYTKDVGSKSQLVTANPSIIRQRFQNLLWSRKTFVDNMKIYNHSYIYMPAFSMKTGTEPSLRVYYTLSDVGANQTVLFANPNFLRSIGKFWKSRGIHAKRLSTGLFLVSAALGLCEEVAIYGFWPFSVNMHEQPISHHYYDNVLPFSGFHAMPEEFLQLWYLHKIGALRMQLDPCEDTSLQPTS

SEQ ID NO: 115810 - DNA, 642 bp, Artificial Sequence
  derived and/or modified sequence
atgaccggcagcttctacacccacagccccctgaccatccagctgaccctgagcagccacagatgcaacctgccccccctgagcagcgagtacaccaaggacgtgggcagcaagagccagctggtgaccgccaaccccagcatcatcagacagagattccagaacctgctgtggagcagaaagaccttcgtggacaacatgaagatctacaaccacagctacatctacatgcccgccttcagcatgaagaccggcaccgagcccagcctgagagtgtactacaccctgagcgacgtgggcgccaaccagaccgtgctgttcgccaaccccaacttcctgagaagcatcggcaagttctggaagagcagaggcatccacgccaagagactgagcaccggcctgttcctggtgagcgccgccctgggcctgtgcgaggaggtggccatctacggcttctggcccttcagcgtgaacatgcacgagcagcccatcagccaccactactacgacaacgtgctgcccttcagcggcttccacgccatgcccgaggagttcctgcagctgtggtacctgcacaagatcggcgccctgagaatgcagctggacccctgcgaggacaccagcctgcagcccaccagctag

SEQ ID NO: 115811 - DNA, 642 bp, Artificial Sequence
  derived and/or modified sequence
atgacaggcagtttttatactcactcccccctcaccatccaactgacactgtcatcgcatcggtgcaatcttcctccgctgagtagtgagtacacgaaggatgtgggatccaagagccagttggtgacggcaaacccgtccatcattcgacagcgctttcagaatctactgtggtcacggaagacattcgtcgataacatgaagatatacaatcactcatacatctacatgcctgctttttctatgaagacaggcacagaacccagcctgagagtatactatacactgtcggatgtgggagcaaatcagacagtcctgtttgcaaacccaaatttccttagaagtataggcaaattttggaaatctagaggtattcatgcaaaaaggctctctacaggactgttcctggtgagtgctgctcttgggttatgcgaggaggttgccatctacgggttctggccatttagcgtgaatatgcacgaacagcctataagccatcactattatgataatgtcctgcccttcagcggtttccacgccatgcccgaggagttcttacagctgtggtatctgcacaaaatcggagcactgcgtatgcagctcgacccctgcgaggatacctccctgcagcccacttcatag

SEQ ID NO: 115812 - DNA, 642 bp, Artificial Sequence
  derived and/or modified sequence
atgacaggcagcttctacacccacagccccctgaccatccagctgaccctgagcagccaccgctgcaacctgccccccctgagcagcgagtacaccaaggatgtgggcagcaagagccagctggtgacagccaaccccagcatcatccggcagcgcttccagaacctgctgtggagcaggaagacctttgtggacaacatgaagatctacaaccacagctacatctacatgcctgccttctccatgaagacaggaacagagcccagcctgcgggtgtactacaccctgagtgatgtgggcgccaaccagacagtgctgtttgccaaccccaacttcctgcggagcatcggcaagttctggaagagccggggcatccacgccaagaggctgagcacaggcctcttcctggtgtctgctgccctgggcctgtgtgaggaggtggccatctacggcttctggcccttctctgtgaacatgcatgagcagcccatcagccaccactactatgacaacgtgctgcccttcagcggcttccacgccatgcctgaggagttcctgcagctgtggtacctgcacaagatcggggccctgaggatgcagctggacccctgtgaggacaccagcctgcagcccaccagctag

SEQ ID NO: 115813 - DNA, 642 bp, Artificial Sequence
  derived and/or modified sequence
atgaccggcagcttctacacccacagccccctgaccatccagctgacactatccagccatcgctgtaacctgccgcccctgtcatctgagtacaccaaggatgtgggatctaaaagtcaactggtgactgcaaatccatccataatacggcagcgattccagaacctattatggagtcgtaagacatttgtcgataatatgaagatttataatcactcctatatctacatgcctgcgttcagcatgaaaactggcactgagcccagcctacgggtgtactacacactgtccgacgtaggggcaaatcagacggttctttttgccaaccctaacttccttaggagcattggtaaattttggaaatccaggggcattcatgccaagcggctttcaaccggcttgtttcttgtgtcggccgccctgggactgtgcgaggaagtcgctatatacggattctggccgttctctgtaaacatgcacgagcagcccatcagccatcactactatgataacgtcctgcctttttccggatttcacgcaatgcccgaggaatttctccagctgtggtatctgcacaaaattggcgcactgcggatgcagttagacccatgcgaagacacttcgttacagccaaccagctag

SEQ ID NO: 115814 - DNA, 642 bp, Artificial Sequence
  derived and/or modified sequence
atgacaggctctttctatacacactctcctttaaccattcagctgacactttcctctcacaggtgtaatctgccgcctctatcaagcgaatacaccaaagatgtaggatcaaaaagccagctcgtgactgctaacccgtccatcatacggcaaagattccagaatctactgtggagtcggaaaacattcgtcgacaacatgaagatttataatcactcctacatctatatgccggctttttcaatgaaaacgggtactgaaccctctctgagggtgtattacacactgtccgatgtgggagccaaccagactgtattgttcgctaatccaaatttcctgagaagtatcgggaaattttggaagagcagggggattcacgcaaagcgtttgtccacagggctctttctcgttagtgctgcactgggcttatgtgaagaggtcgccatttacgggttctggccatttagcgtgaatatgcatgagcagcccatctctcaccactattacgacaatgtgcttcccttcagcgggtttcacgcaatgccagaggaattcctacagttgtggtaccttcataagatcggagctttaaggatgcagctcgatccttgcgaggacacatcactccagcccacttcatag

SEQ ID NO: 115815 - protein, 461 aa, Artificial Sequence
  derived and/or modified sequence
MAQADIALIGLAVMGQNLILNMNDHGFVVCAFNRTVSKVDDFLANEAKGTKVVGAQSLKEMVSKLKKPRRIILLVKAGQAVDDFIEKLRRCRDLKAKGILFVGSGVSGGEEGARYGPSLMPGGNKEAWPHIKTIFQGIAAKVGTGEPCCDWVGDEGAGHFVKMVHNGIEYGDMQLICEAYHLMKDVLGMAQDEMAQAFEDWNKTELDSFLIEITANILKFQDTDGKHLLPKIRDSAGQKGTGKWTAISALEYGVPVTLIGEAVFARCLSSLKDERIQASKKLKGPQKFQFDGDKKSFLEDIRKALYASKIISYAQGFMLLRQAATEFGWTLNYGGIALMWRGGCIIRSVFLGKIKDAFDRNPELQNLLLDDFFKSAVENCQDSWRRAVSTGVQAGIPMPCFTTALSFYDGYRHEMLPASLIQAQRDYFGAHTYELLAKPGQFIHTNWTGHGGTVSSSSYNA

SEQ ID NO: 115816 - DNA, 1386 bp, Artificial Sequence
  derived and/or modified sequence
atggcccaggccgatattgcccttattggcctggcagtcatgggccagaaccttattctgaatatgaatgaccacggctttgtagtgtgcgcctttaaccgcacagtctctaaggtcgatgactttctcgctaacgaggccaaaggcacgaaagtggttggcgcgcagtctctgaaagaaatggtttctaagctcaagaaaccccgcagaattattttacttgtgaaagcaggccaggctgtagacgacttcattgaaaagttacggagatgcagggacctgaaggccaaaggcatcctattcgtcgggtcaggggtgagtggtggggaggaaggggctaggtacgggccaagccttatgccaggaggcaataaggaagcttggccccatatcaaaacgatcttccaagggatcgctgcaaaggtcggaacaggcgaaccgtgttgcgactgggtgggagacgagggagccggccacttcgtgaagatggtgcacaacggtatcgaatacggggacatgcagctgatttgcgaagcctatcacctgatgaaggatgtactcggcatggcacaagatgagatggcacaggccttcgaggactggaacaagactgagctggattcatttctgatcgagatcaccgctaatatattaaagtttcaggatactgatggcaaacatctgctaccaaagattcgcgattctgcggggcagaaaggcacgggaaagtggactgcaatctctgcccttgaatatggcgtgcctgtaacgcttataggcgaggccgtattcgctaggtgtttgagttcattgaaagacgaaaggatccaggcatccaagaagctcaagggacctcagaaatttcagtttgacggagacaaaaagtcctttttggaggacatccggaaagccctatacgcctccaaaattattagttacgctcagggatttatgctgctgagacaagccgccactgaattcggttggaccctgaattatggaggcatcgcgctaatgtggcggggcgggtgtatcatccggtcggtgtttttgggtaagattaaggacgctttcgaccggaacccagagctgcagaatctcctgctggatgatttttttaaatccgcagttgagaattgccaggactcctggcggagagccgtttctaccggagtacaggcagggatccccatgccctgcttcacgaccgcattgtctttttacgatgggtaccggcacgaaatgctacctgcctcactcattcaggcccaacgggactacttcggcgctcacacgtacgaactcctagctaaaccagggcagtttatccacacaaactggactggccacggaggaaccgtgtcttcttcatcatacaatgcctag

SEQ ID NO: 115817 - DNA, 1386 bp, Artificial Sequence
  derived and/or modified sequence
atggcccaggccgacatcgccctgattggcctggccgtgatgggccagaacctgatcctgaacatgaatgaccacggctttgtggtgtgtgccttcaacagaacagtgtccaaggtggatgacttcctggccaatgaggccaagggcaccaaggtggtgggcgcccagagcctgaaggagatggtgtccaagctgaagaagccccggcgcatcatcctgctggtgaaggccggccaggccgtggatgacttcatcgagaagctgcggcgctgccgggacctgaaggccaagggcatcctgtttgtgggcagcggcgtgtctggaggagaggagggcgcccgctatggccccagcctgatgcctgggggcaacaaggaggcctggccccacatcaagaccatcttccagggcattgctgccaaggtgggcaccggggagccctgctgtgactgggtgggagatgagggcgccggccactttgtgaagatggtgcacaacggcatcgagtatggagacatgcagctgatctgtgaggcctaccacctgatgaaggatgtgctgggcatggcccaggatgagatggcccaggcctttgaggactggaacaagacagagctggacagcttcctgattgagatcacagccaacatcctgaagttccaggacacagatggcaagcacctgctgcccaagatccgggacagcgctggccagaagggcaccgggaagtggacagccatcagcgccctggagtatggagtgcctgtgaccctgattggagaggccgtgtttgcccgctgcctgagcagcctgaaggatgagcgcatccaggccagcaagaagctgaagggcccccagaagttccagtttgatggagacaagaagagcttcctggaggacatcaggaaggccctgtatgccagcaagatcatctcctatgcccagggcttcatgctgctgcggcaggccgccacagaatttggctggaccctgaactatggaggcatcgccctgatgtggaggggcggctgcatcatccgcagcgtcttcctgggcaagatcaaggatgcctttgacaggaaccctgagctgcagaacctgctgctggatgacttcttcaagtctgctgtggagaactgccaggacagctggaggagagctgtgtccactggagtgcaggccggcatccccatgccctgcttcaccacagccctgtccttctatgatggctacagacatgagatgctgcctgccagcctcatccaggcccagagggactactttggagcccacacctatgagctgctggccaagccaggccagttcatccacaccaactggacaggccacggcggcaccgtgagcagcagcagctacaatgcctag

SEQ ID NO: 115818 - DNA, 1386 bp, Artificial Sequence
  derived and/or modified sequence
atggcccaggccgacatcgccctgatcggcctggccgtgatgggccagaatctgatcctcaacatgaacgatcacggattcgtggtctgcgctttcaatcgaacagtcagtaaggtggatgattttttagcaaacgaagcaaagggtacaaaggtggtgggtgctcaaagccttaaagaaatggtttcaaaacttaaaaagcctagacgcatcattctattggtgaaggccggacaggccgtggatgattttatcgagaagttgagacgctgtagagacctgaaagccaagggcattctgttcgtgggtagtggggtaagcggcggtgaggagggcgctcggtatggcccctctctgatgcctggtgggaacaaagaggcctggccacacataaaaactatcttccagggtatcgcagcaaaggtagggaccggtgagccttgctgcgactgggtcggcgatgaaggtgctggccacttcgttaagatggtacataatggcattgagtatggtgacatgcaactcatatgcgaggcctaccatctaatgaaagacgtgttaggcatggctcaagacgagatggcccaagccttcgaagattggaataagaccgaactggacagctttctgattgagatcaccgcaaacatacttaaattccaagacactgatgggaaacatcttctccctaagatccgcgatagtgctggccagaaaggcaccggaaaatggaccgcaatctcagccctggagtacggagttccggtgacactgattggggaggcagtgttcgctaggtgcctgtcgtccctcaaggacgaaagaattcaagcctccaaaaagctgaagggccctcagaagtttcagttcgacggcgacaaaaagagcttcctggaggacatcagaaaggctttatatgcatctaaaatcatctcctacgcgcaggggtttatgctgctccgtcaggcggctactgagttcgggtggaccctcaactacggcggtattgctctgatgtggcgtgggggctgcatcatcagaagcgtgttcctcggcaagatcaaagacgccttcgatcggaaccccgaactgcaaaacctgcttttggatgacttttttaaaagcgccgttgagaattgtcaggacagttggcggagagccgtctcaacgggtgtccaagccggaatacccatgccgtgctttacaactgccctatccttctatgacgggtaccggcatgaaatgttacccgcatctctaatccaggcacagcgcgactattttggagcgcacacctatgagcttctcgccaagccaggtcaattcatccatacaaattggaccgggcatggaggcaccgtctcgtcaagcagttacaacgcctag

SEQ ID NO: 115819 - DNA, 1474 bp, Artificial Sequence
  derived and/or modified sequence
actcgtcctccgcgcgtcgccgctcttcggttctgctctgtccgccgccatggcccaagctgacatcgcgctgatcggattggccgtcatgggccagaacttaattctgaacatgaatgaccacggctttgtggtctgtgcttttaataggactgtctccaaagttgatgatttcttggccaatgaggcaaagggaaccaaagtggtgggtgcccagtccctgaaagagatggtctccaagctgaagaagccccggcggatcatcctcctggtgaaggctgggcaagctgtggatgatttcatcgagaaattgagacggtgccgagacctcaaggccaagggaattttatttgtggggagcggagtcagtggtggagaggaaggggcccggtatggcccatcgctcatgccaggagggaacaaagaagcgtggccccacatcaagaccatcttccaaggcattgctgcaaaagtgggaactggagaaccctgctgtgactgggtgggagatgagggagcaggccacttcgtgaagatggtgcacaacgggatagagtatggggacatgcagctgatctgtgaggcataccacctgatgaaagacgtgctgggcatggcgcaggacgagatggcccaggcctttgaggattggaataagacagagctagactcattcctgattgaaatcacagccaatattctcaagttccaagacaccgatggcaaacacctgctgccaaagatcagggacagcgcggggcagaagggcacagggaagtggaccgccatctccgccctggaatacggcgtacccgtcaccctcattggagaagctgtctttgctcggtgcttatcatctctgaaggatgagagaattcaagctagcaaaaagctgaagggtccccagaagttccagtttgatggtgataagaaatcattcctggaggacattcggaaggcactctacgcttccaagatcatctcttacgctcaaggctttatgctgctaaggcaggcagccaccgagtttggctggactctcaattatggtggcatcgccctgatgtggagagggggctgcatcattagaagtgtattcctaggaaagataaaggatgcatttgatcgaaacccggaacttcagaacctcctactggacgacttctttaagtcagctgttgaaaactgccaggactcctggcggcgggcagtcagcactggggtccaggctggcattcccatgccctgttttaccactgccctctccttctatgacgggtacagacatgagatgcttccagccagcctcatccaggctcagcgggattacttcggggctcacacctatgaactcttggccaaaccagggcagtttatccacaccaactggacaggccatggtggcaccgtgtcatcctcgtcatacaatgcctgatcatgctgctcctgtcaccctccacgattccacagacca

SEQ ID NO: 115820 - DNA, 1386 bp, Artificial Sequence
  derived and/or modified sequence
atggcccaggcggatatcgccctgattggcctggcagtgatgggccagaatctgatcctaaacatgaacgatcatggatttgtggtctgcgcattcaacaggacggtttcaaaggtggacgactttctggcgaatgaagccaaaggaactaaggtcgtgggcgctcagagtctgaaagaaatggtctctaagctgaagaagccaagaagaataatactgctcgtgaaagcaggccaagccgtcgatgactttatcgaaaaacttcggcgatgtagggacttaaaagccaaaggcatcttattcgtgggctccggcgttagtgggggagaagagggagctcgctacggcccttccttaatgcctgggggaaataaagaggcttggccccacatcaaaacgatcttccagggaatcgctgccaaagtgggaaccggagaaccgtgctgtgattgggtcggagatgaaggcgcaggccatttcgttaagatggtgcacaacggaatagagtatggggacatgcagttgatctgcgaagcctaccacttgatgaaggatgtccttggaatggcacaggatgagatggcgcaagctttcgaggactggaacaaaactgagctggattcattcctgattgagatcacagcgaatattttaaaattccaagatacagatggcaaacacttgctgcccaagatcagggattcagccggacagaagggcaccggaaaatggaccgccatttcagccctggaatacggggtgccagttacactcattggcgaggcggtgtttgccaggtgtttgtccagtctgaaggacgagcggatccaggcatctaagaaattgaaaggcccacagaaattccagttcgacggggacaagaaaagctttctggaggatatacggaaggccctctacgcatcaaagatcatctcctatgctcaaggcttcatgttactgcgccaggcagccacggaatttggatggacccttaactacgggggaattgcactaatgtggcgcggaggatgcatcatccgcagcgtgttcctggggaagatcaaagatgcatttgatagaaatcccgagttgcagaatctgctgttggacgatttttttaaatccgctgtagaaaattgccaggatagttggagaagggctgtgagcacaggagtccaggccggtataccaatgccatgctttaccaccgccttatctttctacgacggttaccgacatgaaatgctgcctgcaagcctcatccaagcccagcgcgattatttcggcgctcacacatacgaacttctggctaaacctggacagtttatccacactaattggactggccatggcggtacggttagcagttcctcctacaacgcatag

SEQ ID NO: 115821 - DNA, 1386 bp, Artificial Sequence
  derived and/or modified sequence
atggcccaggccgacatcgccctgatcggcctggccgtgatgggccagaacctgatcctgaacatgaacgaccacggcttcgtggtgtgcgccttcaacagaaccgtgagcaaggtggacgacttcctggccaacgaggccaagggcaccaaggtggtgggcgcccagagcctgaaggagatggtgagcaagctgaagaagcccagaagaatcatcctgctggtgaaggccggccaggccgtggacgacttcatcgagaagctgagaagatgcagagacctgaaggccaagggcatcctgttcgtgggcagcggcgtgagcggcggcgaggagggcgccagatacggccccagcctgatgcccggcggcaacaaggaggcctggccccacatcaagaccatcttccagggcatcgccgccaaggtgggcaccggcgagccctgctgcgactgggtgggcgacgagggcgccggccacttcgtgaagatggtgcacaacggcatcgagtacggcgacatgcagctgatctgcgaggcctaccacctgatgaaggacgtgctgggcatggcccaggacgagatggcccaggccttcgaggactggaacaagaccgagctggacagcttcctgatcgagatcaccgccaacatcctgaagttccaggacaccgacggcaagcacctgctgcccaagatcagagacagcgccggccagaagggcaccggcaagtggaccgccatcagcgccctggagtacggcgtgcccgtgaccctgatcggcgaggccgtgttcgccagatgcctgagcagcctgaaggacgagagaatccaggccagcaagaagctgaagggcccccagaagttccagttcgacggcgacaagaagagcttcctggaggacatcagaaaggccctgtacgccagcaagatcatcagctacgcccagggcttcatgctgctgagacaggccgccaccgagttcggctggaccctgaactacggcggcatcgccctgatgtggagaggcggctgcatcatcagaagcgtgttcctgggcaagatcaaggacgccttcgacagaaaccccgagctgcagaacctgctgctggacgacttcttcaagagcgccgtggagaactgccaggacagctggagaagagccgtgagcaccggcgtgcaggccggcatccccatgccctgcttcaccaccgccctgagcttctacgacggctacagacacgagatgctgcccgccagcctgatccaggcccagagagactacttcggcgcccacacctacgagctgctggccaagcccggccagttcatccacaccaactggaccggccacggcggcaccgtgagcagcagcagctacaacgcctag

SEQ ID NO: 115822 - DNA, 1413 bp, Artificial Sequence
  derived and/or modified sequence
atggggcaaaatctaatcctgaatatgaatgaccatggctttgtcgtttgtgcatttaatcgcactgtctctaaagttgatgattttctggcaaacgaggctaagggaacgaaggtcgtcggagcccagtccctgaaagagatggtttcaaagctcaaaaaaccccggcgcattatactgctggtcaaggctgggcaggcagtcgacgactttattgagaagctggtccctctcttggacaccggggacatcatcatcgacggaggaaatagcgagtatcgagatacaactcgcaggtgcagagacctaaaggcgaaaggaattctatttgtgggctctggtgtttccggtggcgaggagggagccagatacgggccctcactgatgcccggcggcaacaaagaagcatggccccacataaagacaatcttccaagggattgcagccaaagtagggacgggtgagccctgttgcgattgggtgggggatgagggggcgggtcactttgtcaagatggtacacaacggcatagagtatggcgatatgcaactgatctgtgaggcatatcacctcatgaaagacgtcttaggcatggctcaggatgagatggcccaagcctttgaggactggaataaaacagagctagattccttcttgatcgagattaccgcaaacatcctgaaattccaggatacagacggtaagcacctccttccgaagatacgtgattccgccgggcaaaagggaaccgggaagtggaccgcaatctccgccctggagtacggagtgccggtcactctgattggagaggccgtgttcgcccgatgcttgtctagtctcaaggatgaaagaattcaggcctctaagaaactgaagggtccacagaagttccaatttgatggagataagaagagctttttggaggatattcgcaaagccctctatgcatctaagatcatcagttacgctcagggatttatgctgctgcggcaggcagccaccgaatttggctggactctgaattatggcggcatcgcgcttatgtggagaggaggatgcattatccgatccgtctttcttggcaagatcaaggacgcttttgatcgcaatcccgagctccagaatctgctcctggacgacttcttcaaatccgctgtcgaaaattgtcaggactcatggagacgggcagttagcactggggtgcaagctgggatccctatgccatgttttacgaccgccctgtccttctacgacgggtaccgccacgagatgctccctgcctcccttatccaggcccagcgcgactacttcggcgctcacacgtacgaactactcgcaaaaccaggacagtttattcacactaattggactggtcacgggggcacagttagtagcagttcatataacgcctag

SEQ ID NO: 115823 - DNA, 1290 bp, Artificial Sequence
  derived and/or modified sequence
atgaccaccgccttgtggagtgttctactgataggtctcagtccaaagctgatgatcagttggcctatgcggcaagctgtggacgattttattgaaaagctggtgccactgctcgatacaggagacatcatcatcgatggcggcaactcggaatacagagatacaactaggagatgcagagatctgaaggcgaaggggattctcttcgtcggaagcggggtctctggcggcgaggagggtgcacgttacgggcccagcctgatgccaggaggcaacaaagaggcttggccacacataaaaactatcttccaggggatcgcggctaaggtggggacaggagagccgtgctgcgattgggtgggagatgagggggcagggcatttcgtcaaaatggtccacaacggcattgagtatggggacatgcagctgatctgtgaggcttatcatcttatgaaggatgttctgggtatggcccaagacgagatggcacaggctttcgaggactggaataaaactgaactcgattctttcttgattgaaataacagccaacatcctgaaattccaggacacagacgggaagcatcttctgccaaaaatccgggactccgcaggtcagaaggggaccggcaaatggacagctatttccgcactggaatacggagtgcctgttacactgatcggggaggcagtgttcgctcgctgtctatcctcacttaaagatgagcgaatccaggcatccaagaagctgaaggggcctcagaagttccaattcgacggggacaagaaatctttcctcgaagacattagaaaggcattatacgcctctaaaatcatctcctacgcgcaaggctttatgctactacgccaagccgctacagaattcgggtggacccttaactatgggggcatcgcattgatgtggcgcggtggctgcatcattaggtcagtgtttctgggaaagataaaagatgcttttgaccgcaaccctgaacttcagaatctgcttctcgacgatttcttcaaaagcgccgtggagaattgccaggattcctggaggagagctgtgtccactggcgtgcaggccgggatccccatgccctgttttaccacagccctcagcttttacgacggataccggcacgagatgttgccggcttcactgattcaggcacagagagactactttggagcacacacgtacgaactgctggctaagccagggcagttcatccatacaaattggactggacatggaggaacagtgtcctcatcttcctacaatgcttag

SEQ ID NO: 115824 - DNA, 1413 bp, Artificial Sequence
  derived and/or modified sequence
atgggccagaacctgatcctgaacatgaatgaccacggctttgtggtgtgtgccttcaacagaacagtgtccaaggtggatgacttcctggccaatgaggccaagggcaccaaggtggtgggcgcccagagcctgaaggagatggtgtccaagctgaagaagccccggcgcatcatcctgctggtgaaggccggccaggccgtggatgacttcatcgagaagctggtgcccctgctggacacaggagacatcatcattgatggcggcaacagcgagtacagagacaccacccggcgctgccgggacctgaaggccaagggcatcctgtttgtgggcagcggcgtgtctggaggagaggagggcgcccgctatggccccagcctgatgcctgggggcaacaaggaggcctggccccacatcaagaccatcttccagggcattgctgccaaggtgggcactggagagccctgctgtgactgggtgggagatgaaggagctggccactttgtgaagatggtgcacaatggaattgaatatggagacatgcagctgatctgtgaggcctaccacctgatgaaggatgtgctgggcatggcccaggatgagatggcccaggcctttgaggactggaacaagacagagctggacagcttcctgattgagatcacagccaacatcctgaagttccaggacacagatggcaagcacctgctgcccaagatccgggacagcgctggccagaagggcaccgggaagtggacagccatcagcgccctggagtatggagtgcctgtgaccctcatcggggaggccgtgtttgcccgctgcctgagcagcctgaaggatgagcgcatccaggccagcaagaagctgaagggcccccagaagttccagtttgatggagacaagaagagcttcctggaggacatcaggaaggccctgtatgccagcaagatcatctcctatgcccagggcttcatgctgctgcggcaggccgccacagaatttggctggaccctgaactacggcggcatcgccctgatgtggaggggcggctgcatcatccgctctgtgttcctgggcaagatcaaggatgcctttgacagaaatcctgagctgcagaacctgctgctggatgacttcttcaagtctgctgtggagaactgccaggacagctggaggagagctgtgtccactggagtgcaggccggcatccccatgccctgcttcaccacagccctgtccttctatgatggctacagacatgagatgctgcctgccagcctcatccaggcccagagggactactttggagcccacacctatgagctgctggccaagccaggccagttcatccacaccaactggacaggccatggaggcaccgtgagcagcagcagctacaatgcctag

SEQ ID NO: 115825 - DNA, 1290 bp, Artificial Sequence
  derived and/or modified sequence
atgaccacagccctgtggagcgtgctgctgattggcctgagccccaagctgatgatctcctggcccatgaggcaggccgtggatgacttcatcgagaagctggtgcccctgctggacaccggggacatcatcattgatggcggcaacagcgagtacagagacaccacccggcgctgccgggacctgaaggccaagggcatcctgtttgtgggcagcggcgtgtctggaggagaggagggcgcccgctatggccccagcctgatgcctgggggcaacaaggaggcctggccccacatcaagaccatcttccagggcattgctgccaaggtgggcaccggggagccctgctgtgactgggtgggagatgagggcgccggccactttgtgaagatggtgcacaacggcatcgagtatggagacatgcagctgatctgtgaggcctaccacctgatgaaggatgtgctgggcatggcccaggatgagatggcccaggcctttgaggactggaacaagacagagctggacagcttcctgattgagatcacagccaacatcctgaagttccaggacacagatggcaagcacctgctgcccaagatccgggacagcgctggccagaagggcaccgggaagtggacagccatcagcgccctggagtatggagtgcctgtgaccctgattggagaggccgtgtttgcccgctgcctgagcagcctgaaggatgagcgcatccaggccagcaagaagctgaagggcccccagaagttccagtttgatggagacaagaagagcttcctggaggacatcaggaaggccctgtatgccagcaagatcatctcctatgcccagggcttcatgctgctgcggcaggccgccacagaatttggctggaccctgaactatggaggcatcgccctgatgtggaggggcggctgcatcatccgcagcgtcttcctgggcaagatcaaggatgcctttgacaggaaccctgagctgcagaacctgctgctggatgacttcttcaagtctgctgtggagaactgccaggacagctggaggagagctgtgtccactggagtgcaggccggcatccccatgccctgcttcaccacagccctgtccttctatgatggctacagacatgagatgctgcctgccagcctcatccaggcccagagggactactttggagcccacacctatgagctgctggccaagccaggccagttcatccacaccaactggacaggccacggcggcaccgtgagcagcagcagctacaatgcctag

SEQ ID NO: 115826 - DNA, 1413 bp, Artificial Sequence
  derived and/or modified sequence
atgggccagaacctgatcctgaacatgaacgaccacggcttcgtggtgtgtgctttcaacagaactgtcagtaaagttgacgattttctcgcgaatgaggcgaagggcactaaggtcgtgggggcccagtcactgaaagaaatggtgtcgaaactcaagaaaccccgcagaattatattgctggttaaggccggacaagccgtcgatgattttattgaaaagctggtgcctctgctcgacaccggggacatcatcattgatgggggcaatagcgagtatcgtgacactacccgtagatgccgcgacttgaaagctaaggggatactatttgtggggtctggggttagcggcggagaggagggcgctcggtacggtccttccctcatgccaggtgggaacaaagaggcctggccacacatcaaaactattttccagggaatcgctgccaaagtgggcacaggggagccgtgttgcgactgggttggcgacgagggtgccggacattttgtgaagatggtccataatggaatcgagtatggtgatatgcagcttatctgcgaagcatatcatttaatgaaagatgtcctgggcatggctcaggacgaaatggcacaggccttcgaggattggaacaaaaccgaactggattcatttctgatagaaattactgccaacatactgaaattccaggatacggacggtaaacacctcttgcccaagatccgcgacagtgctggacagaaggggactggcaaatggacagccataagcgccctggaatatggagtaccagtgaccctgatcggggaagcagtctttgcgcggtgtctgtcttccctgaaagacgaaagaattcaagctagcaagaagctcaaaggcccacagaagttccagtttgatggcgacaagaagtcatttctggaggatatccgcaaggccctctatgctagtaagataattagctatgcccaggggttcatgctcctacggcaggctgcaaccgaatttggctggacgctcaactacggcggaattgcccttatgtggcgaggtggatgtatcattaggtcagtgtttctgggaaaaataaaggatgcctttgaccgcaaccccgaacttcagaatctccttctggatgacttttttaagtccgctgtggaaaactgccaggattcttggcggcgtgctgtgtctacgggagtccaagcgggaattcccatgccgtgcttcaccactgctctgtcattttatgatggatacaggcatgaaatgttaccagctagtctcattcaagctcagcgtgattactttggggcccacacatacgagttgttagccaaacctggccagttcatccacaccaactggacaggtcacggagggactgtgtcgagctcttcctataacgcctag

SEQ ID NO: 115827 - DNA, 1290 bp, Artificial Sequence
  derived and/or modified sequence
atgaccaccgccctgtggagcgtgctgctgatcggcctgagccccaagctgatgatcagctggccgatgcgacaggctgttgatgacttcatcgagaaattagttcctcttttagataccggcgatatcatcattgacggaggcaactcggaataccgggacaccacaagaagatgccgagatctgaaagctaagggcatactgtttgtgggctctggggtgagcggaggggaagagggggcccggtacggcccctcactgatgccaggcggtaataaggaagcttggcctcacattaaaacaatttttcaaggaatcgcagcaaaggttggtacaggtgagccctgttgcgactgggtgggtgacgaaggggctggccacttcgtgaagatggttcacaatggaatcgaatacggtgatatgcaacttatttgtgaggcctaccacctcatgaaagatgtgctgggaatggcccaggacgaaatggctcaggcctttgaggactggaataagactgagctcgatagcttccttattgagataactgccaatattctcaagttccaggacactgatggcaaacacctcctccctaaaatacgggattccgccggccagaagggcactggtaagtggacagccataagtgcccttgaatacggtgtgccagtgaccctgatcggggaggccgtgtttgctcggtgtttgtcctctctcaaagatgaaagaatacaggcatctaagaagttaaaaggcccgcagaaatttcaatttgatggcgacaagaagagcttcctcgaagacattagaaaagctttgtacgctagcaagattatttcctatgcacaggggtttatgttgctgaggcaggcagccactgagttcgggtggacactgaactatggaggcatcgctctcatgtggagaggtggctgcattatcaggtcagtgtttctcgggaagattaaagacgcgttcgaccgcaatccagagctccagaacctgttacttgatgacttctttaaaagcgcagttgagaactgtcaagacagctggcggcgcgcagtgtccaccggcgttcaggctggaatcccaatgccctgtttcaccaccgccctgtctttttatgatgggtaccggcatgagatgctgcctgcatctctgattcaggcccaaagagactattttggcgcccacacttacgagttgttggcaaagcccgggcagtttatccacaccaactggactggacacggtggaacagttagcagtagcagctacaacgcatag

SEQ ID NO: 115828 - DNA, 1833 bp, Artificial Sequence
  derived and/or modified sequence
actcgtcctccgcgcgtcgccgctcttcggttctgctctgtccgccgccatggcccaagctgacatcgcgctgatcggattggccgtcatgggccagaacttaattctgaacatgaatgaccacggctttgtggtctgtgcttttaataggactgtctccaaagttgatgatttcttggccaatgaggcaagctgtggatgatttcatcgagaaattggtaccattgttggatactggtgacatcatcattgacggaggaaattctgaatatagggacaccacaagacggtgccgagacctcaaggccaagggaattttatttgtggggagcggagtcagtggtggagaggaaggggcccggtatggcccatcgctcatgccaggagggaacaaagaagcgtggccccacatcaagaccatcttccaaggcattgctgcaaaagtgggaactggagaaccctgctgtgactgggtgggagatgagggagcaggccacttcgtgaagatggtgcacaacgggatagagtatggggacatgcagctgatctgtgaggcataccacctgatgaaagacgtgctgggcatggcgcaggacgagatggcccaggcctttgaggattggaataagacagagctagactcattcctgattgaaatcacagccaatattctcaagttccaagacaccgatggcaaacacctgctgccaaagatcagggacagcgcggggcagaagggcacagggaagtggaccgccatctccgccctggaatacggcgtacccgtcaccctcattggagaagctgtctttgctcggtgcttatcatctctgaaggatgagagaattcaagctagcaaaaagctgaagggtccccagaagttccagtttgatggtgataagaaatcattcctggaggacattcggaaggcactctacgcttccaagatcatctcttacgctcaaggctttatgctgctaaggcaggcagccaccgagtttggctggactctcaattatggtggcatcgccctgatgtggagagggggctgcatcattagaagtgtattcctaggaaagataaaggatgcatttgatcgaaacccggaacttcagaacctcctactggacgacttctttaagtcagctgttgaaaactgccaggactcctggcggcgggcagtcagcactggggtccaggctggcattcccatgccctgttttaccactgccctctccttctatgacgggtacagacatgagatgcttccagccagcctcatccaggctcagcgggattacttcggggctcacacctatgaactcttggccaaaccagggcagtttatccacaccaactggacaggccatggtggcaccgtgtcatcctcgtcatacaatgcctgatcatgctgctcctgtcaccctccacgattccacagaccaggacattccatgtgcctcatggcactgccacctggccctttgccctattttctgttcagttttttaaaagtgttgtaagagactcctgaggaagacacacagtttatttgtaaagtagctctgtgagagccaccatgccctctgcccttgcctcttgggactgaccaggagctgctcatgtgcgtgagagtgggaaccatctccttgcggcagtggcttccgcgtgccccgtgtgctggtgcggttcccatcacgcagacaggaagggtgtttgcgcactctgatcaactggaacctctgtatcatgcggctgaattccctttttcctttactcaataaaagctacatcagactgatgctctttctccagattcttagtctcacctcg

SEQ ID NO: 115829 - DNA, 1413 bp, Artificial Sequence
  derived and/or modified sequence
atgggacagaacctcatactaaacatgaatgatcatgggtttgtggtctgtgcattcaaccgaactgtgagcaaagtggacgatttcctggcaaatgaagcaaaaggcacaaaggtggttggggctcagagcttaaaggagatggtaagcaaattaaagaagccgagaaggattatcctcctggtcaaggcagggcaggccgtggatgacttcatcgagaaactcgtgccacttctggataccggggacataattattgatggcggaaattctgagtaccgggacaccacaagacgctgccgtgatcttaaggctaaaggcatacttttcgtcgggtctggcgtctccgggggtgaggaaggagccaggtacggcccatccttgatgcctgggggtaataaggaggcctggcctcatatcaaaacaatatttcaggggattgctgccaaggtcgggacgggtgagccttgctgtgattgggtgggtgatgaaggtgccggacacttcgtgaaaatggtacataatggaatcgagtacggcgatatgcagttgatctgcgaagcataccaccttatgaaggatgtcctaggcatggctcaggacgaaatggcccaagcctttgaagactggaataaaaccgaactggattcgttcctgatcgagatcaccgccaacattttgaagtttcaggacacagatgggaagcacctcctacctaagattcgcgacagtgcaggccagaaaggcaccggcaaatggaccgcaatatcggctctggagtatggcgtacctgttacacttataggcgaggcggtgtttgctcggtgtctgtctagcttgaaagacgaacgcattcaggcatccaaaaaactcaaggggccacagaagtttcagttcgatggggataagaagagttttctcgaagacattcggaaagctctttacgcttctaaaataatatcatatgcccagggatttatgctgctgcgccaggccgcaacagaattcggatggacactgaactacggcggaatcgcattgatgtggcggggaggatgtattatccgcagcgtgttcctgggtaagatcaaggacgcctttgatcggaaccctgaacttcaaaatttgctgttggacgactttttcaaatccgctgtagagaactgtcaggacagctggcggagggctgtgtctaccggagtgcaagcagggatcccaatgccctgtttcactacagccctgtccttctatgacggctacaggcacgaaatgttacccgcatcattgatccaggcacaacgcgactattttggggcacacacctatgaactattggccaagcccggacaattcattcacaccaattggactggccatggcggtacagttagctcaagctcctataatgcttag

SEQ ID NO: 115830 - DNA, 1290 bp, Artificial Sequence
  derived and/or modified sequence
atgacgaccgcgctttggagtgtgctgctgatagggctgtcccccaagctgatgatttcctggccgatgagacaagcggtagacgatttcattgagaagctggtgccactgctggatactggcgacatcatcattgacggaggcaactcagaatatcgggatacaaccaggcgatgcagggatctgaaggctaaggggatcctctttgtgggctcaggcgtaagcggcggtgaggagggtgccagatatgggccatctttgatgcccggtgggaacaaggaggcctggcctcacatcaagaccatattccaggggatagccgctaaagtgggcaccggggagccatgctgtgattgggtcggagacgagggggctgggcacttcgtgaagatggtgcataatggcatcgaatacggcgatatgcagctgatttgcgaagcctatcacttaatgaaggacgtcttgggaatggctcaggacgagatggcgcaggctttcgaagattggaacaaaacagagctggatagctttctcatcgaaataacggctaacatcctgaaattccaggatactgacggtaagcacctgcttcccaagatcagggacagtgcgggacaaaaaggcacaggcaaatggacagctatcagcgcattggagtatggcgtgcctgttactctaatcggtgaggccgtattcgcgcgatgtctctcgtcactgaaagacgagcggatccaggcctcaaagaagttaaaaggcccacagaaattccagttcgatggcgataaaaaatccttcctggaggacattaggaaggccctgtatgcctctaagattattagctatgcacaaggcttcatgttgctcagacaggccgctaccgaatttggatggacactcaactacggcggaatcgctttgatgtggcggggtggatgcattataagaagcgtgtttctcggcaagatcaaagacgccttcgaccgaaatcccgaacttcagaacctgttgttggacgatttctttaagtcggcagttgagaattgccaagattcctggcgtagagcagtgtcaacgggtgtccaggctggcataccaatgccatgctttactacagccttgtctttctacgacggttatcggcacgaaatgcttcccgcatcgctcatccaggctcagcgagactattttggggctcatacctacgagctgctggctaaacctggccaattcattcataccaattggactggacacgggggaactgtgagtagttcgtcgtataatgcttag

SEQ ID NO: 115831 - DNA, 1413 bp, Artificial Sequence
  derived and/or modified sequence
atgggccagaacctgatcctgaacatgaacgaccacggcttcgtggtgtgcgccttcaacagaaccgtgagcaaggtggacgacttcctggccaacgaggccaagggcaccaaggtggtgggcgcccagagcctgaaggagatggtgagcaagctgaagaagcccagaagaatcatcctgctggtgaaggccggccaggccgtggacgacttcatcgagaagctggtgcccctgctggacaccggcgacatcatcatcgacggcggcaacagcgagtacagagacaccaccagaagatgcagagacctgaaggccaagggcatcctgttcgtgggcagcggcgtgagcggcggcgaggagggcgccagatacggccccagcctgatgcccggcggcaacaaggaggcctggccccacatcaagaccatcttccagggcatcgccgccaaggtgggcaccggcgagccctgctgcgactgggtgggcgacgagggcgccggccacttcgtgaagatggtgcacaacggcatcgagtacggcgacatgcagctgatctgcgaggcctaccacctgatgaaggacgtgctgggcatggcccaggacgagatggcccaggccttcgaggactggaacaagaccgagctggacagcttcctgatcgagatcaccgccaacatcctgaagttccaggacaccgacggcaagcacctgctgcccaagatcagagacagcgccggccagaagggcaccggcaagtggaccgccatcagcgccctggagtacggcgtgcccgtgaccctgatcggcgaggccgtgttcgccagatgcctgagcagcctgaaggacgagagaatccaggccagcaagaagctgaagggcccccagaagttccagttcgacggcgacaagaagagcttcctggaggacatcagaaaggccctgtacgccagcaagatcatcagctacgcccagggcttcatgctgctgagacaggccgccaccgagttcggctggaccctgaactacggcggcatcgccctgatgtggagaggcggctgcatcatcagaagcgtgttcctgggcaagatcaaggacgccttcgacagaaaccccgagctgcagaacctgctgctggacgacttcttcaagagcgccgtggagaactgccaggacagctggagaagagccgtgagcaccggcgtgcaggccggcatccccatgccctgcttcaccaccgccctgagcttctacgacggctacagacacgagatgctgcccgccagcctgatccaggcccagagagactacttcggcgcccacacctacgagctgctggccaagcccggccagttcatccacaccaactggaccggccacggcggcaccgtgagcagcagcagctacaacgcctag

SEQ ID NO: 115832 - DNA, 1290 bp, Artificial Sequence
  derived and/or modified sequence
atgaccaccgccctgtggagcgtgctgctgatcggcctgagccccaagctgatgatcagctggcccatgagacaggccgtggacgacttcatcgagaagctggtgcccctgctggacaccggcgacatcatcatcgacggcggcaacagcgagtacagagacaccaccagaagatgcagagacctgaaggccaagggcatcctgttcgtgggcagcggcgtgagcggcggcgaggagggcgccagatacggccccagcctgatgcccggcggcaacaaggaggcctggccccacatcaagaccatcttccagggcatcgccgccaaggtgggcaccggcgagccctgctgcgactgggtgggcgacgagggcgccggccacttcgtgaagatggtgcacaacggcatcgagtacggcgacatgcagctgatctgcgaggcctaccacctgatgaaggacgtgctgggcatggcccaggacgagatggcccaggccttcgaggactggaacaagaccgagctggacagcttcctgatcgagatcaccgccaacatcctgaagttccaggacaccgacggcaagcacctgctgcccaagatcagagacagcgccggccagaagggcaccggcaagtggaccgccatcagcgccctggagtacggcgtgcccgtgaccctgatcggcgaggccgtgttcgccagatgcctgagcagcctgaaggacgagagaatccaggccagcaagaagctgaagggcccccagaagttccagttcgacggcgacaagaagagcttcctggaggacatcagaaaggccctgtacgccagcaagatcatcagctacgcccagggcttcatgctgctgagacaggccgccaccgagttcggctggaccctgaactacggcggcatcgccctgatgtggagaggcggctgcatcatcagaagcgtgttcctgggcaagatcaaggacgccttcgacagaaaccccgagctgcagaacctgctgctggacgacttcttcaagagcgccgtggagaactgccaggacagctggagaagagccgtgagcaccggcgtgcaggccggcatccccatgccctgcttcaccaccgccctgagcttctacgacggctacagacacgagatgctgcccgccagcctgatccaggcccagagagactacttcggcgcccacacctacgagctgctggccaagcccggccagttcatccacaccaactggaccggccacggcggcaccgtgagcagcagcagctacaacgcctag

SEQ ID NO: 115833 - protein, 622 aa, Artificial Sequence
  derived and/or modified sequence
MTLTLSVLICLGLSVGPRTCVQAGTLPKPTLWAEPASVIARGKPVTLWCQGPLETEEYRLDKEGLPWARKRQNPLEPGAKAKFHIPSTVYDSAGRYRCYYETPAGWSEPSDPLELVATALPSPVVASGGNVTLQCDTLDGLLTFVLVEEEQKLPRTLYSQKLPKGPSQALFPVGPVTPSCRWRFRCYYYYRKNPQVWSNPSDLLEILVPGVSRKPSLLIPQGSVVARGGSLTLQCRSDVGYDIFVLYKEGEHDLVQGSGQQPQAGLSQANFTLGPVSRSHGGQYRCYGAHNLSPRWSAPSDPLDILIAGLIPDIPALSVQPGPKVASGENVTLLCQSWHQIDTFFLTKEGAAHPPLCLKSKYQSYRHQAEFSMSPVTSAQGGTYRCYSAIRSYPYLLSSPSYPQELVVSGPSGDPSLSPTGSTPTPAGPEDQPLTPTGLDPQSGLGRHLGVVTGVSVAFVLLLFLLLFLLLRHRHQSKHRTSAHFYRPAGAAGPEPKDQGLQKRASPVADIQEEILNAAVKDTQPKDGVEMDARQSPHDEDPQAVTYAEVKHSRPRREMASPPSPLSGEFLDTKDRQAEEDRQMDTERVLSSPGPQASPPPPRSLPLTLPRCRLLHLKPPRM

SEQ ID NO: 115834 - DNA, 1869 bp, Artificial Sequence
  derived and/or modified sequence
atgactcttacacttagcgtgctgatctgcctcggtctctccgttggcccccgcacttgcgtgcaggccggaactctgccaaagccaactttatgggccgaaccagcttcagtgatcgcccgcggaaagcccgtgacactgtggtgccagggcccccttgagaccgaagaataccgattggacaaagaagggctgccatgggcccgtaagaggcaaaaccctctagagcccggggcaaaggctaagtttcacatccctagcactgtctatgattccgccggaagataccgttgttattacgagacgcctgcaggatggagcgaacctagcgaccccttggaactggtggccacggctctgccttcaccggtcgttgcctccgggggtaatgtgactttgcagtgcgataccctggacggcctcttgaccttcgtgctggttgaagaagaacagaagctgccaagaaccttatattctcagaagctgcccaagggccccagccaggcgctgtttccagttgggccagtgacaccttcctgcagatggcgttttagatgctattactattatcgcaagaatccacaggtgtggtccaacccgagtgacctgctggagatcttggtgcctggcgtttcacgcaaaccaagtctgctaatccctcagggatctgtggtagcccgagggggaagccttacattgcagtgcagaagcgacgtcgggtatgatatattcgtgctttacaaggagggagagcatgacttggttcagggaagcgggcagcaacctcaggccggactgtctcaggccaacttcactctcgggcctgtgagcaggagccatggcgggcagtatcgctgctatggagcacacaatctctcccctcggtggagtgctccatcagacccgctggacattctgatagccggcctcatccctgatattcccgccttgtccgtacagccaggccccaaagtcgcttctggtgagaacgtgacactgttgtgtcagagctggcaccagatagacaccttctttcttaccaaggaaggggcagcacaccctccactctgtctcaagtctaagtaccaatcatatagacaccaggccgagttttccatgtccccagtgacttctgcccagggcgggacataccggtgctattcggccattcggtcttacccgtacctgctgagttctccaagctatccccaggaactggtggtgagtggcccatccggcgatccttccctaagtcctaccggaagcaccccaacccctgcaggaccagaagatcagcctttgactccaaccgggctggacccgcagagtggcctgggccgccatcttggggtggtgacaggagtatcagtcgcctttgtcctgcttcttttcttgctccttttcctgctcttacgtcatcgacaccagtctaagcaccgcactagtgctcacttttatcggcctgctggcgccgcgggaccggaaccaaaggaccagggccttcagaagagagcatccccagtggctgatattcaggaggagattctaaatgctgccgtgaaggatacacaacctaaggacggtgtcgagatggatgcgcggcagtcaccacatgacgaggacccacaggccgtcacctacgcagaggtcaagcattcgcggcctagacgagagatggccagcccgccctcccccctgtccggtgagttcttagacacgaaagatcggcaggctgaggaggataggcaaatggatacggaacgggtgctcagttcaccaggcccccaagcctcacctccccccccccgctctctcccacttactctgccaaggtgtcgcctactgcatctgaagccgcctcgaatgtag

SEQ ID NO: 115835 - DNA, 1869 bp, Artificial Sequence
  derived and/or modified sequence
atgaccctgaccctgtctgtgctgatctgcctgggcctgtctgtgggccccaggacctgtgtgcaggccggcaccctgcccaagcccaccctgtgggccgagcccgcctctgtgattgcccggggcaagcctgtgaccctgtggtgccagggccccctggagacagaggagtaccgcctggacaaggagggcctgccctgggccaggaagaggcagaaccccctggagcccggggccaaggccaagttccacatccccagcacagtgtatgacagcgctggccgctaccgctgctactatgagaccccagctggctggagcgagcccagcgaccccctggagctggtggccacagccctgcccagccctgtggtggccagcggcggcaatgtgaccctgcagtgtgacaccctggatggcctgctgacctttgtgctggtggaggaggagcagaagctgcccaggaccctgtacagccagaagctgcccaagggccccagccaggccctcttccctgtgggccctgtgacccccagctgccgctggaggttccgctgctactactactacaggaagaacccccaggtgtggagcaaccccagcgacctgctggagatcctggtgcctggggtgtccaggaagcccagcctgctgatcccccagggctctgtggtggcccggggcggcagcctgaccctgcagtgccgcagtgatgtgggctatgacatctttgtgctgtacaaggagggggagcatgacctggtgcagggcagcggccagcagccccaggccggcctgagccaggccaacttcaccctgggccctgtgagccgcagccacggcggccagtaccgctgctatggagcccacaacctgagcccccgctggagcgcccccagcgaccccctggacatcctgattgctggcctcatcccagacatcccagccctgtctgtgcagcccggccccaaggtggccagcggagaaaatgtgaccctgctgtgccagagctggcaccagattgacaccttcttcctgaccaaggagggcgccgcccacccccccctgtgcctgaagagcaagtaccagagctaccgccaccaggccgagttctccatgagccctgtgaccagcgcccagggcggcacctaccgctgctacagcgccatccgcagctacccctacctgctgagcagccccagctacccccaggagctggtggtgtctggccccagcggggaccccagcctgagccccaccggcagcacccccaccccagctggccctgaggaccagcccctgacccccaccggcctggacccccagagcggcctgggccgccacctgggcgtggtgactggagtgtctgtggcctttgtgctgctgctcttcctgctgctcttcctgctgctgcggcaccgccaccagagcaagcacaggaccagcgcccacttctacagacctgctggagctgctggccctgagcccaaggaccagggcctgcagaagagggccagccctgtggccgacatccaggaggagatcctgaatgctgctgtgaaggacacccagcccaaggatggagtggagatggatgcccggcagagcccccatgatgaggacccccaggccgtgacctacgccgaggtgaagcacagccggccccggcgggagatggccagcccccccagccccctgtctggagagttcctggacaccaaggaccggcaggccgaggaggaccggcagatggacacagagcgggtgctgagcagccctggcccccaggccagccccccaccacccaggagcctgcccctgaccctgccccgctgccgcctgctgcacctgaagccacccaggatgtag

SEQ ID NO: 115836 - DNA, 2444 bp, Artificial Sequence
  derived and/or modified sequence
actctgcgtgtttttgtgtcctgccaggcaccgtggtctcatccgcctgcacagctgagtccagtgggagctgacgccatgaccctcaccctctcagtcctgatttgcctcgggctgagtgtgggccccaggacctgcgtgcaggcaggcaccctccccaaacccaccctctgggctgagccagcctctgtgatagctcgggggaagcccgtgaccctctggtgtcaggggcccctggagactgaggagtaccgtctggataaggagggactcccatgggcccggaagagacagaacccactggagcctggagccaaggccaagttccacattccatccacggtgtatgacagtgcagggcgataccgctgctactatgagacccctgcaggctggtcagagcccagtgaccccctggagctggtggcgacagccctgccgagtcctgtggtggcctcaggaggaaatgtgaccctccagtgtgatacactggacggacttctcacgtttgttcttgttgaggaagaacagaagctccccaggaccctgtactcacagaagctccccaaagggccatcccaggccctgttccctgtgggtcccgtgacccccagctgcaggtggaggttcagatgctattactattacaggaaaaaccctcaggtgtggtcgaaccccagtgacctcctggagattctggtcccaggcgtgtctaggaagccctccctcctgatcccgcagggctctgtcgtggcccgcggaggcagcctgaccctgcagtgtcgctctgatgtcggctatgacatattcgttctgtacaaggagggggaacatgacctcgtccagggctctggccagcagccccaggctgggctctcccaggccaacttcaccctgggccctgtgagccgctcccacgggggccagtacagatgctacggtgcacacaacctctcccctaggtggtcggcccccagcgaccccctggacatcctgatcgcaggactgatccctgacatacccgccctctcggtgcagccgggccccaaggtggcctcaggagagaacgtgaccctgctgtgtcagtcatggcatcagatagacactttctttttgaccaaggagggggcagcccatcccccgctgtgtctaaagtcaaagtaccagtcttatagacaccaggctgaattctccatgagtcctgtgacctcagcccagggtggaacctaccgatgctacagcgcaatcaggtcctacccctacctgctgtccagccctagttacccccaggagctcgtggtctcaggaccctctggggatcccagcctctcacctacaggctccacccccacacctgcaggccctgaggaccagcccctcacccccacggggttggatccccagagtggtctgggaaggcacctgggggttgtgactggggtctcagtggccttcgtcctgctgctgttcctcctcctcttcctcctcctccgacatcggcatcagagcaaacacaggacatcggcccatttctaccgtcctgcaggggctgcggggccagagcccaaggaccagggcctgcagaagagggccagcccagttgctgacatccaggaggaaattctcaatgctgccgtgaaggacacacagcccaaggacggggtggagatggatgctcggcagagcccacacgatgaagacccccaggcagtgacgtatgccgaggtgaaacactccagacctaggagagaaatggcctctcctccctccccactgtctggggaattcctggacacaaaggacagacaggcagaagaggacagacagatggacactgagagagtcctttcctctccaggcccccaggcctccccacccccaccacgttccttacctctcactctcccccgctgcaggctgctgcatctgaagccccccaggatgtgacctacgcccagctacacagcttgaccctcagacgggaggcaactgagcctcctccatcccaggaaagggaacctccagctgaacccagcatctacgcccccctggccatccactagcccacgggggacccagatctcatactcaacagaaggagactcagagactccagaaggcacaggagctgcccccagtggacaccaatgaaccccagccagcctggacccctaacaaagaccaccaggacatcctgggaactctgggactcactagattctgcagtcaaagatgactaatatccttgcatttttgaaatgaagccacagacttctcaataaatcaatgagctgagaaaactgaaacagaaattagagcatggtataaatttggaatgataatgtaaatattacacattaaatgatgaaatcggaaaactacaaatgagcgaatgaattagaaaagaataaaacctacgtaattaatgaccttggcaatgacag

SEQ ID NO: 115837 - DNA, 1869 bp, Artificial Sequence
  derived and/or modified sequence
atgaccctgaccctgagcgtgctgatctgcctgggcctgagcgtggggccccggacatgtgtgcaggcgggcacactgcccaaaccaaccctgtgggctgagcctgcgtccgtcatcgcgagaggaaagcccgtgactttgtggtgtcagggtcccttggagacagaagaatatcggctggataaagagggcctgccttgggccagaaaaaggcaaaacccacttgagcccggtgcaaaggctaagttccacatcccctcaacggtgtatgacagcgccgggaggtaccgctgctattatgagaccccagccggctggtcagaaccatctgacccgctcgagctcgtggctacggccctccctagccctgttgtcgcctccgggggtaatgtcacattgcaatgtgacaccctggatgggctgcttacttttgtactcgtggaggaagagcagaagttgccacggactctatacagccagaagctgcctaagggaccgtcacaggccttgtttcccgtggggccagttacacccagttgccggtggcgctttaggtgttactactattataggaagaatccccaggtgtggtcaaatcctagtgatctgctcgagatcctggtccccggagtttccaggaaaccctccttgcttataccgcagggctccgttgtggcgcgcggagggtctctaactcttcaatgccggtcggatgtcgggtacgatattttcgtgctatacaaggagggtgagcatgatctggtgcaggggtcagggcagcagcctcaggcaggcttgtcccaggctaatttcactttgggacctgtttctcgttcccacgggggacaatatcgctgctacggtgcgcataaccttagtcctaggtggtccgcaccctctgaccccctagacatcctgatagctgggctgatccccgacatccctgctctgtccgtgcaaccgggtcccaaggtcgctagtggagagaatgtcactctgctttgccagagttggcaccagatcgataccttttttctgaccaaggaaggagcggcacatcccccactgtgtctgaaatccaaataccagagctatcgccatcaggccgagttcagcatgtctccagtgactagtgctcagggcggaacgtaccgttgctattccgcaatcagatcttacccctacctactgtcctcgccaagttatcctcaagagctggtggtctccggcccctcaggggaccctagcttgagtccaacgggcagtacccccacacctgccggaccggaggaccagccgcttactcccacaggtctcgacccccagtctggtcttggacggcatctcggcgtggttactggagtcagcgtagctttcgttctactattgttccttttactgttcctgttgctgagacatcgccaccagagcaaacaccgtacatcagcacacttttaccgcccggcaggtgctgctggaccagagcccaaggaccaggggctccagaagcgggcttctccagtggcagacatacaggaggagatactgaatgctgctgtcaaggacacacagcccaaggacggcgtggagatggatgcgcgtcagtcaccccacgacgaggaccctcaggccgtcacgtacgcggaagttaagcacagccgccccagaagggagatggctagccctcctagtccattatccggcgagttcctagataccaaagaccgccaggcagaggaggacagacagatggacaccgagcgggtcctctccagccctggtccgcaggcatcaccccccccacctcgctcactacctttgactcttccaagatgtcggcttctgcatctgaagccccccaggatgtag

SEQ ID NO: 115838 - DNA, 1869 bp, Artificial Sequence
  derived and/or modified sequence
atgacactcactctgagcgtgctcatctgcctgggcttaagcgtgggtccacgcacatgtgtgcaggctggaacactccccaaacccactttgtgggcagagccagcctccgttatcgccagggggaagcccgtgactctgtggtgccagggaccactggagactgaagaataccggctggacaaggagggtctgccctgggctcggaagagacagaatccccttgagccgggtgccaaggccaagtttcacatcccgtcaactgtatacgacagtgccggaaggtacaggtgttactacgagacacccgcaggctggtcagagcccagcgacccactggaactggtagctactgccctgccctccccagtagttgctagcgggggaaatgttactctacagtgtgacacactggacggtcttcttacttttgtccttgttgaggaggagcagaagcttcctaggacgctttattcccagaaactgcctaagggccctagtcaagcactctttccagtgggtcctgtcaccccctcttgccggtggcggttcagatgctactattactatcggaaaaatccacaggtttggagtaaccccagtgacctgcttgagattctggtccccggagtcagtcggaagccaagtttgttaatcccccaggggtcggtggttgcccgaggcggaagtctgacgctgcagtgtcggagcgacgttggttacgacatcttcgtgctgtataaggaaggagagcacgatttggtgcaagggtctggtcagcaaccacaggccggtctctctcaggccaattttactctcgggccagtaagcaggagccatggtgggcaatatcgctgctacggtgcgcacaatctgtctcccagatggtccgcaccatctgaccccctcgacattctgattgcgggtcttatccctgatataccagccttatcagttcagcccggacctaaggttgcttctggtgagaatgttacgctgctgtgtcaatcttggcaccagattgacaccttctttctaactaaggagggcgctgcccaccctcccttgtgcctgaagagcaaataccagtcctacagacaccaggccgaattctcaatgtcaccggttacctctgcacagggcggtacgtacagatgttattccgctatccgcagttacccctatctgctgtcttccccatcctaccctcaggaactggtggtgagcggacccagcggagacccatccctgagccctaccgggtctactcctactccggctggaccagaagaccagcctcttacccctacaggactcgacccacaatcagggcttggtcgccacctaggcgtagtcaccggagtctccgtcgcttttgtcctgctcctcttcttgctactcttcctcctgctgcggcataggcaccaatcgaagcacagaactagtgcccacttttatcgaccagccggtgctgcagggccagaaccaaaggatcagggcctccagaagcgggcatcccccgttgcagacattcaggaggaaatcttaaatgccgcagtgaaggatactcagcccaaggatggagtcgaaatggacgcccgacagtccccacacgatgaggaccctcaggccgtaacatatgccgaggtgaaacattcaagacctcgcagagagatggcctccccccctagcccactgtcaggtgaattccttgacactaaagaccggcaggcagaggaggacagacagatggataccgagagagtcctcagctcacctggcccacaggcctcacctcccccacctagatctctgccgttgacgcttcctcggtgccggctcctgcatctgaagccgccacgcatgtag

SEQ ID NO: 115839 - DNA, 1869 bp, Artificial Sequence
  derived and/or modified sequence
atgaccctgaccctgagcgtgctgatctgcctgggcctgagcgtgggccccagaacctgcgtgcaggccggcaccctgcccaagcccaccctgtgggccgagcccgccagcgtgatcgccagaggcaagcccgtgaccctgtggtgccagggccccctggagaccgaggagtacagactggacaaggagggcctgccctgggccagaaagagacagaaccccctggagcccggcgccaaggccaagttccacatccccagcaccgtgtacgacagcgccggcagatacagatgctactacgagacccccgccggctggagcgagcccagcgaccccctggagctggtggccaccgccctgcccagccccgtggtggccagcggcggcaacgtgaccctgcagtgcgacaccctggacggcctgctgaccttcgtgctggtggaggaggagcagaagctgcccagaaccctgtacagccagaagctgcccaagggccccagccaggccctgttccccgtgggccccgtgacccccagctgcagatggagattcagatgctactactactacagaaagaacccccaggtgtggagcaaccccagcgacctgctggagatcctggtgcccggcgtgagcagaaagcccagcctgctgatcccccagggcagcgtggtggccagaggcggcagcctgaccctgcagtgcagaagcgacgtgggctacgacatcttcgtgctgtacaaggagggcgagcacgacctggtgcagggcagcggccagcagccccaggccggcctgagccaggccaacttcaccctgggccccgtgagcagaagccacggcggccagtacagatgctacggcgcccacaacctgagccccagatggagcgcccccagcgaccccctggacatcctgatcgccggcctgatccccgacatccccgccctgagcgtgcagcccggccccaaggtggccagcggcgagaacgtgaccctgctgtgccagagctggcaccagatcgacaccttcttcctgaccaaggagggcgccgcccacccccccctgtgcctgaagagcaagtaccagagctacagacaccaggccgagttcagcatgagccccgtgaccagcgcccagggcggcacctacagatgctacagcgccatcagaagctacccctacctgctgagcagccccagctacccccaggagctggtggtgagcggccccagcggcgaccccagcctgagccccaccggcagcacccccacccccgccggccccgaggaccagcccctgacccccaccggcctggacccccagagcggcctgggcagacacctgggcgtggtgaccggcgtgagcgtggccttcgtgctgctgctgttcctgctgctgttcctgctgctgagacacagacaccagagcaagcacagaaccagcgcccacttctacagacccgccggcgccgccggccccgagcccaaggaccagggcctgcagaagagagccagccccgtggccgacatccaggaggagatcctgaacgccgccgtgaaggacacccagcccaaggacggcgtggagatggacgccagacagagcccccacgacgaggacccccaggccgtgacctacgccgaggtgaagcacagcagacccagaagagagatggccagcccccccagccccctgagcggcgagttcctggacaccaaggacagacaggccgaggaggacagacagatggacaccgagagagtgctgagcagccccggcccccaggccagcccccccccccccagaagcctgcccctgaccctgcccagatgcagactgctgcacctgaagccccccagaatgtag

SEQ ID NO: 115840 - protein, 414 aa, Artificial Sequence
  derived and/or modified sequence
MNPTLGLAIFLAVLLTVKGLLKPSFSPRNYKALSEVQGWKQRMAAKELARQNMDLGFKLLKKLAFYNPGRNIFLSPLSISTAFSMLCLGAQDSTLDEIKQGFNFRKMPEKDLHEGFHYIIHELTQKTQDLKLSIGNTLFIDQRLQPQRKFLEDAKNFYSAETILTNFQNLEMAQKQINDFISQKTHGKINNLIENIDPGTVMLLANYIFFRARWKHEFDPNVTKEEDFFLEKNSSVKVPMMFRSGIYQVGYDDKLSCTILEIPYQKNITAIFILPDEGKLKHLEKGLQVDTFSRWKTLLSRRVVDVSVPRLHMTGTFDLKKTLSYIGVSKIFEEHGDLTKIAPHRSLKVGEAVHKAELKMDERGTEGAAGTGAQTLPMETPLVVKIDKPYLLLIYSEKIPSVLFLGKIVNPIGK

SEQ ID NO: 115841 - DNA, 1245 bp, Artificial Sequence
  derived and/or modified sequence
atgaaccccaccctgggcctggccatcttcctggccgtgctgctgaccgtgaagggcttgctcaaaccgtccttctctccgagaaattacaaagccttatcggaagtgcaaggatggaaacaaagaatggccgcgaaagagttggcccgacaaaatatggatctcgggtttaaacttttgaaaaaattggccttctacaacccaggccggaacatcttcttaagcccactcagcattagcactgcatttagtatgctatgtctgggcgcccaggatagcacactggacgagatcaagcagggatttaacttcagaaagatgcctgagaaagatctgcatgaaggatttcactatattattcacgagctgacccagaagacccaagacttaaagctgtccatcgggaacactctttttatcgatcagaggctccagccccaacggaaattcctcgaagacgcaaagaacttctattctgcggagaccatcctgaccaattttcagaacctggagatggctcagaaacagatcaatgacttcatctcccagaaaacccacgggaagattaacaacttgattgagaacatcgaccctgggaccgttatgctgctggccaattacatattcttccgggctcggtggaagcacgaatttgatccaaatgtcacaaaggaggaggactttttcctggagaaaaatagttccgtgaaggttcctatgatgttccggagtggtatttatcaggtgggctacgatgacaagttatcatgtacgattctcgagatcccctaccagaagaacatcaccgcgatcttcattctccctgacgaaggcaagctgaagcacttagagaaaggcctgcaggtggacacctttagtcggtggaagactctgctctctaggcgggtggtagacgtcagtgtgcctcgcctacacatgacagggactttcgatttgaaaaaaactctctcatacatcggcgtgtcaaaaatttttgaagagcacggcgatctgaccaaaatcgcaccccataggagccttaaagttggggaagcagttcacaaggcagaactcaagatggacgaacgagggaccgaaggcgccgctggcactggtgcccagactctgccaatggaaacccctctagttgtaaagatagacaagccgtacttactgctgatatacagtgagaaaattccatctgtgctgttcctggggaagatcgtaaatcccatcgggaaatag

SEQ ID NO: 115842 - DNA, 1245 bp, Artificial Sequence
  derived and/or modified sequence
atgaatccaaccctcggactggctatctttctggctgtgctgctgacagtgaagggtctgctcaagccatcattcagtccacggaattacaaagcgctgtccgaggtacagggctggaaacagcgaatggctgccaaggagttagccaggcagaacatggatttggggttcaagctgctgaaaaaactcgcgttctataatcctggacggaacatcttcttatctcctctgtctatctctacagctttttctatgctctgtctgggggctcaagatagcactctggacgagataaaacagggtttcaatttcaggaagatgcctgagaaagacctgcatgaagggttccactacattatccacgagctgacccagaagactcaggacctcaaactctccatcggtaacacattattcattgatcagcggctgcagccgcagcgtaaattcttagaagacgcgaaaaatttctattctgctgaaacaatccttaccaacttccaaaatttagaaatggcccagaaacaaattaacgatttcatcagccaaaagacccatggcaaaattaacaatctcattgaaaatatcgaccctggaaccgtgatgcttctggcaaactacatcttttttagagccagatggaaacacgagtttgacccaaacgtgacgaaggaggaggacttctttctggagaaaaactcgagtgtcaaagttccaatgatgttccgtagcggcatataccaggtggggtatgacgacaaattgtcatgtaccatcctcgaaatcccttatcaaaagaacattacagccatttttattttaccagatgagggcaaactcaagcacctcgaaaagggtctgcaggtggatacgttctcgagatggaaaacattgctctccaggcgggtggtcgatgtgtctgtccctcgactacacatgactggaactttcgatctgaagaaaactctcagttacatcggggtttcaaagatctttgaggaacacggcgacctgacaaagattgcccctcacagatcccttaaggtcggcgaggcagtgcataaggccgagctgaagatggacgagcgcggtaccgaaggagccgcaggaacaggtgctcagaccttaccaatggagaccccactggtggttaaaattgacaaaccctatcttctcttaatttacagcgaaaagataccgtcggtcctttttctgggcaagattgtgaacccaattgggaaatag

SEQ ID NO: 115843 - DNA, 1245 bp, Artificial Sequence
  derived and/or modified sequence
atgaatcccactctcggcttagccatcttcctcgccgtcttactgactgtcaaaggcctgctgaagccaagcttctcccccaggaactataaagccctgtctgaagtgcagggatggaaacagaggatggccgcaaaggaacttgcgagacagaatatggacctgggttttaagttgttgaaaaaattggcattctacaaccccggtcgaaatatttttctaagtcctctttcaataagcacagccttttccatgctgtgtctcggagcccaggactcaacactcgatgagatcaaacagggctttaattttcgtaaaatgcctgaaaaggatctgcacgaagggttccattatatcatccatgaattgactcagaaaacccaagacctgaaactgtccatcgggaacacgctgttcatagatcagaggcttcaacctcagcgcaagtttttggaggatgctaaaaacttctacagtgcagagacaatcctgactaactttcagaaccttgagatggctcagaagcagataaacgattttatttctcagaaaacacatggcaaaatcaacaatctaatcgagaatatagatcccggtaccgtgatgctgttggccaactacatattctttagggcaagatggaagcacgaattcgatcccaatgtgaccaaggaggaggatttcttcctagaaaaaaattcaagcgtaaaagtgcctatgatgttccggagtggaatctaccaggtggggtacgatgataagctctcttgcaccatcctcgaaatcccctatcagaagaatataacagccatattcatcttacctgatgaaggcaagctgaagcacctagaaaaggggcttcaggtcgatactttcagtcggtggaaaaccctcctttcaaggagggttgtggacgtgtcggtaccaagactgcatatgaccggcaccttcgatctcaaaaaaaccctaagttacataggagtgagtaagatattcgaggaacacggcgatttaaccaagattgcgccacatcggtcactgaaggtgggcgaggcagttcacaaggcagaactgaagatggacgagagagggactgagggtgcggcagggactggagcacaaacactgcctatggagacgcccctcgtggtgaaaattgacaagccatacctgctcctgatctattcagagaagattcccagcgtgttgttcttgggcaagatcgtgaatcctattggcaagtag

SEQ ID NO: 115844 - DNA, 1245 bp, Artificial Sequence
  derived and/or modified sequence
atgaaccctacactcggattggctatcttcttggcagtcctcctaaccgtaaaggggctcctaaaacctagcttctctccacgaaactacaaagccttaagcgaagtgcaggggtggaaacagcgcatggcagcgaaagaattagcgagacagaacatggatttaggcttcaagttgcttaaaaagctcgccttctacaaccctggccgcaatatcttcctttctccactgtctatttcaacagctttcagcatgctgtgcttgggtgcacaggattctacactagacgaaatcaagcagggctttaacttccgaaagatgccggagaaggacctacacgaaggatttcactacataattcatgaactcacacagaagactcaggatctgaagctatctatcggcaatacactctttattgaccagagactgcaaccacagaggaagtttctggaggacgctaagaacttctacagcgcagaaacgatcttaacaaattttcagaatctagaaatggctcagaaacagatcaacgacttcatcagccagaagactcatggcaaaatcaacaacctcatagagaacatcgacccaggaaccgtgatgctcctggctaattacattttcttcagagcccggtggaaacatgaatttgaccctaatgtgaccaaggaggaagacttttttctcgaaaaaaactcgtccgtgaaggtgcccatgatgttccgctcaggtatctaccaggtaggatacgatgataaactgagctgcacaatcctggaaattccttatcagaagaatattacagccatcttcattctgccagatgagggaaagctcaaacaccttgagaaaggcctgcaggtcgacaccttctccaggtggaaaacactgctttcaagacgagtcgtcgacgtctcagtgccgagactgcatatgacgggcacttttgacttgaagaagacactctcctatatcggagtttcaaagatttttgaggagcacggagacctcacaaagatagcaccccaccgttctctgaaggtgggagaagccgtgcacaaagccgaattgaaaatggacgagcggggaactgagggagcagctgggacaggagcacagaccctgcccatggaaacccccctagtggtgaaaattgacaagccttacctcctcctgatatacagcgaaaaaataccctcagtgttatttctcggcaaaattgtcaatccaattggcaagtag

SEQ ID NO: 115845 - DNA, 1245 bp, Artificial Sequence
  derived and/or modified sequence
atgaatccaaccctcggcctggccatttttctcgctgtcctacttaccgtgaagggactgctcaagccgtcattcagtccacggaattacaaagcactctcagaggtacagggatggaaacaacggatggcagccaaggaactggctagacaaaatatggaccttgggttcaagcttcttaagaaactggccttttacaatcccgggcggaacatctttctctctccactcagcatctcaacagcattctcaatgttgtgtcttggggcccaggactctaccttagatgagattaaacagggattcaatttccgcaagatgccagagaaagacttacatgagggattccactacatcattcatgagcttacacagaaaacacaggatctgaagcttagcatcggaaacactttattcattgaccagagattgcagccacaaaggaaatttctcgaagatgctaagaacttttactccgctgagactattctgacaaactttcagaatctggaaatggcacagaagcagatcaatgatttcattagccagaaaactcacggcaagataaacaatctcatcgagaacatagatccaggaactgtcatgctgctggcaaactacatatttttccgtgccaggtggaagcacgaattcgaccctaacgttactaaagaagaagatttcttcctggaaaaaaacagctccgtgaaggtccctatgatgtttagaagcggtatataccaggttggttatgacgacaagctatcctgtacaatcctcgagatcccctatcagaaaaatatcacagctattttcatcctaccagatgagggaaaactgaaacacctggagaagggcctgcaagtcgatacatttagccgatggaagaccctgctctcgagacgcgttgtagacgtttcagtaccgagattacacatgactggcacattcgatctgaagaaaaccctctcatatataggcgtatctaagatttttgaagaacacggtgatctgacaaagattgccccccataggtctctgaaggtcggtgaggcagttcacaaggcggagttgaaaatggatgaacgaggcactgagggtgctgccggaaccggagcccagacccttccaatggagacccccctggtcgtaaagattgataaaccatacctgttactgatttacagcgagaaaattccttccgtcctgtttctgggcaaaatcgttaatccaatcggcaagtag

SEQ ID NO: 115846 - DNA, 1245 bp, Artificial Sequence
  derived and/or modified sequence
atgaaccctacactcggattggctatcttcttggcagtcctcctaaccgtaaaggggctcctaaaacctagcttctctccacgaaactacaaagccttaagcgaagtgcaggggtggaaacagcgcatggcagcgaaagaattagcgagacagaacatggatttaggcttcaagttgcttaaaaagctcgccttctacaaccctggccgcaatatcttcctttctccactgtctatttcaacagctttcagcatgctgtgcttgggtgcacaggattctacactagacgaaatcaagcagggcttcaatttcagaaaaatgccagaaaaagatctgcacgaaggcttccattatattatccacgagctcacacaaaagacacaggatctgaaactgtctattggtaataccctattcattgaccagcgcttacaaccccagagaaaattcctagaagatgccaaaaacttttattccgctgagacaatcttgaccaatttccagaatctagaaatggcccaaaagcaaattaacgacttcatttcacagaaaactcacggaaaaatcaataaccttatcgaaaatattgatcctgggacagttatgctactggccaactacatatttttcagagcacgctggaagcacgagttcgatcccaatgtgaccaaagaagaagatttttttctcgaaaagaacagttctgtgaaagtacccatgatgtttcgatctggcatttaccaggtgggctatgacgacaagctgagctgcaccatccttgagataccataccagaaaaatattactgccattttcatcctgcccgatgagggtaagctgaaacacctggaaaaaggcttacaggtggatactttctctcgatggaaaaccctgctaagtagacgagtcgtcgacgtctcagtgccgagactgcatatgacgggcacttttgacttgaagaagacactctcctatatcggagtttcaaagatttttgaggagcacggagacctcacaaagatagcaccccaccgttctctgaaggtgggagaagccgtgcacaaagccgaattgaaaatggacgagcggggaactgagggagcagctgggacaggagcacagaccctgcccatggaaacccccctagtggtgaaaattgacaagccttacctcctcctgatatacagcgaaaaaataccctctgtgttattcctcggaaaaatcgtcaaccccatcggcaagtag

SEQ ID NO: 115847 - DNA, 1245 bp, Artificial Sequence
  derived and/or modified sequence
atgaatcccaccctaggtctggccatattcctggctgttttgctaactgttaaaggactgctgaagcccagcttttctcctaggaattataaagccttgtcagaagttcaaggatggaagcaaagaatggccgcaaaggagttagctcgtcagaatatggatttaggattcaaattgctgaaaaagctcgccttttataaccccggcaggaatatatttctatcccccttgtccatatccactgccttttccatgctctgtcttggagcccaggattctaccctcgatgaaatcaagcagggatttaactttcgtaaaatgccagaaaaagaccttcatgaagggttccactacatcatccacgagctgacacagaagacccaggacctcaagctgagcattggaaacacactattcattgaccagagactccagcctcaacggaaattcctggaagacgcgaaaaacttctactctgccgagaccatcttaacgaattttcagaatcttgaaatggcccagaagcagataaatgattttatatcccaaaaaacacatggcaaaatcaacaacctcatcgaaaatatcgatcccggcaccgtcatgctgctggcaaactacatatttttccgtgccaggtggaagcacgaattcgaccctaacgttactaaagaagaagatttcttcctggaaaaaaacagctccgtgaaggtccctatgatgtttagaagcggtatataccaggttggttatgacgacaagctatcctgtacaatcctcgagatcccctatcagaaaaatatcacagctattttcatcctaccagatgagggaaaactgaaacacctggagaagggcctgcaagtcgatacatttagccgatggaagaccctgctctcgagacgcgttgtagacgtttcagtaccgagattacacatgactggcacattcgatctgaagaaaaccctctcatatataggcgtatctaagatttttgaagaacacggtgatctgacaaagattgccccccataggtctctgaaggtcggtgaggcagttcacaaggcggagttgaaaatggatgaacgaggcactgagggtgctgccggaaccggagcccagacccttccaatggagacccccctggtcgtaaagattgataaaccatacctgttactgatttacagcgagaaaattccttctgtccttttcctcggtaagattgttaatcccattggtaagtag

SEQ ID NO: 115848 - DNA, 1497 bp, Artificial Sequence
  derived and/or modified sequence
ggccttactcttccaagaggccatggaagtataaataataaagcaagaaaggcagatgcatttggctggctcagtggacttctgaatgtactgtgagtatgagaccttcccttccaaaagatccggtgcttcttgtctattccacacgaagcttgcttcagatcgagggaggatgtagcactgtccacaggtctactactcaacaggatattcttcaaggaaaatgaaccccacactaggcctggccatttttctggctgttctcctcacggtgaaaggtcttctaaagccgagcttctcaccaaggaattataaagctttgagcgaggtccaaggatggaagcaaaggatggcagccaaggagcttgcaaggcagaacatggacttaggctttaagctgctcaagaagctggccttttacaaccctggcaggaacatcttcctatcccccttgagcatctctacagctttctccatgctgtgcctgggtgcccaggacagcaccctggacgagatcaagcaggggttcaacttcagaaagatgccagaaaaagatcttcatgagggcttccattacatcatccacgagctgacccagaagacccaggacctcaaactgagcattgggaacacgctgttcattgaccagaggctgcagccacagcgtaagtttttggaagatgccaagaacttttacagtgccgaaaccatccttaccaactttcagaatttggaaatggctcagaagcagatcaatgactttatcagtcaaaaaacccatgggaaaattaacaacctgatcgagaatatagaccccggcactgtgatgcttcttgcaaattatattttctttcgagccaggtggaaacatgagtttgatccaaatgtaactaaagaggaagatttctttctggagaaaaacagttcagtcaaggtgcccatgatgttccgtagtggcatataccaagttggctatgacgataagctctcttgcaccatcctggaaataccctaccagaaaaatatcacagccatcttcatccttcctgatgagggcaagctgaagcacttggagaagggattgcaggtggacactttctccagatggaaaacattactgtcacgcagggtcgtagacgtgtctgtacccagactccacatgacgggcaccttcgacctgaagaagactctctcctacataggtgtctccaaaatctttgaggaacatggtgatctcaccaagatcgcccctcatcgcagcctgaaagtgggcgaggctgtgcacaaggctgagctgaagatggatgagaggggtacggaaggggccgctggcaccggagcacagactctgcccatggagacaccactcgtcgtcaagatagacaaaccctatctgctgctgatttacagcgagaaaataccttccgtgctcttcctgggaaagattgttaaccctattggaaaataaaggagaattcctgcttgccacagaccccg

SEQ ID NO: 115849 - DNA, 1245 bp, Artificial Sequence
  derived and/or modified sequence
atgaaccccaccctgggcctggccatcttcctggccgtgctgctgaccgtgaagggcctgctgaagcccagcttcagccccagaaactacaaggccctgagcgaggtgcagggctggaagcagagaatggccgccaaggagctggccagacagaacatggacctgggcttcaagctgctgaagaagctggccttctacaaccccggcagaaacatcttcctgagccccctgagcatcagcaccgccttcagcatgctgtgcctgggcgcccaggacagcaccctggacgagatcaagcagggcttcaacttcagaaagatgcccgagaaggacctgcacgagggcttccactacatcatccacgagctgacccagaagacccaggacctgaagctgagcatcggcaacaccctgttcatcgaccagagactgcagccccagagaaagttcctggaggacgccaagaacttctacagcgccgagaccatcctgaccaacttccagaacctggagatggcccagaagcagatcaacgacttcatcagccagaagacccacggcaagatcaacaacctgatcgagaacatcgaccccggcaccgtgatgctgctggccaactacatcttcttcagagccagatggaagcacgagttcgaccccaacgtgaccaaggaggaggacttcttcctggagaagaacagcagcgtgaaggtgcccatgatgttcagaagcggcatctaccaggtgggctacgacgacaagctgagctgcaccatcctggagatcccctaccagaagaacatcaccgccatcttcatcctgcccgacgagggcaagctgaagcacctggagaagggcctgcaggtggacaccttcagcagatggaagaccctgctgagcagaagagtggtggacgtgagcgtgcccagactgcacatgaccggcaccttcgacctgaagaagaccctgagctacatcggcgtgagcaagatcttcgaggagcacggcgacctgaccaagatcgccccccacagaagcctgaaggtgggcgaggccgtgcacaaggccgagctgaagatggacgagagaggcaccgagggcgccgccggcaccggcgcccagaccctgcccatggagacccccctggtggtgaagatcgacaagccctacctgctgctgatctacagcgagaagatccccagcgtgctgttcctgggcaagatcgtgaaccccatcggcaagtag

SEQ ID NO: 115850 - DNA, 1245 bp, Artificial Sequence
  derived and/or modified sequence
atgaaccctaccctgggtctggccatctttctagctgtccttttgaccgtaaagggactgcttaagcctagcttcagcccaaggaactataaagcactgagcgaggtgcagggttggaagcagcggatggccgccaaggaactggctcggcagaacatggatctgggcttcaagctgctgaaaaagctggcattttataatcccggaagaaacattttcttgtccccgctgtccatctcaacagctttctccatgttatgtctgggcgcccaggactccaccctcgatgaaatcaaacagggatttaattttagaaaaatgccagaaaaggatcttcacgagggatttcactacataatacacgaactgacacagaagactcaggatctcaagctctccattggaaatacgctgtttatagatcagaggctgcagcctcaaaggaaattcctcgaagacgccaagaacttttattctgccgagactatcctgaccaacttccagaatctggaaatggcacagaagcaaatcaacgatttcatttcacaaaagacgcacgggaaaataaacaatctcattgaaaacattgatccgggcaccgtgatgctgcttgcaaactatattttttttagggcccgctggaagcacgaatttgacccaaacgtcaccaaggaagaagattttttcctggagaaaaacagctctgtcaaggtacctatgatgtttagatctggaatctatcaggttggctacgacgacaagctctcatgcacaatcctggagatcccctaccagaaaaatatcacagcgatttttatcctacccgacgaggggaaattaaaacacttggaaaaagggctgcaggtggacacattttcgcgttggaagacactcctatctagaagggttgtggatgtctccgtgcctcgcctccacatgaccggtacattcgatttgaaaaaaacgctgagttatatcggggtcagcaaaatatttgaggagcacggggatctcactaaaattgcacctcaccggtccctgaaggtaggcgaggctgtgcataaagccgaacttaaaatggacgaaagagggacggaaggggccgcaggtacaggagcccagactttgccaatggagacacccctggtagtgaagattgataagccctatctgctgcttatctacagtgaaaaaattccatcggtgttgtttttaggcaaaattgtaaatccaatcggtaaatag

SEQ ID NO: 115851 - DNA, 2061 bp, Artificial Sequence
  derived and/or modified sequence
ctcccaggtgcctggcagagagtcctcaccagccccctgccggatgtctggctggcatctgaggggactgaacatggcaagaagcaaaacagcagcacaagaaaccagtttcttcatctgaaaccgagcaggctctactccagaacagaacccacagtcccaggcgctgggccttcttcttaagttgggaaatcactcatccccaggagaaaaaaagagcaaaagcttccagtactggggatgtggggagaggttttttaaaaatatcagcccaacatatgggaaaatatgggatgcaggcatccccaggtgtcaagcgtccagatccgtagacacactgggacgatggtgatcagtatcactccctctgactcatcggccctacagggaagacaccatgctggtgcacagtcggtgccaaacccgcgtttgtaaatgaataagtgttgctgccctggtggaagcccagctcatgtggaggaagccagcttgcagagagagcaagaacagagccagcacacacattggagcaaaggcaagggcagatggaaagttctggcggcatcatgccaaggctcccatccgaggcctccctgaaccccactctctcggcgccaccttggatgctgcgggctggtacattccccacttgcaaaactctgtggggctgggttcctctcttttctttccaaatatcccaggaagtggatggttttatccaaattcagcagacgagtaaaaagagtcttcgggaggtgcaatagctttctaggaatgaggatattcttcaaggaaaatgaaccccacactaggcctggccatttttctggctgttctcctcacggtgaaaggtcttctaaagccgagcttctcaccaaggaattataaagctttgagcgaggtccaaggatggaagcaaaggatggcagccaaggagcttgcaaggcagaacatggacttaggctttaagctgctcaagaagctggccttttacaaccctggcaggaacatcttcctatcccccttgagcatctctacagctttctccatgctgtgcctgggtgcccaggacagcaccctggacgagatcaagcaggggttcaacttcagaaagatgccagaaaaagatcttcatgagggcttccattacatcatccacgagctgacccagaagacccaggacctcaaactgagcattgggaacacgctgttcattgaccagaggctgcagccacagcgtaagtttttggaagatgccaagaacttttacagtgccgaaaccatccttaccaactttcagaatttggaaatggctcagaagcagatcaatgactttatcagtcaaaaaacccatgggaaaattaacaacctgatcgagaatatagaccccggcactgtgatgcttcttgcaaattatattttctttcgagccaggtggaaacatgagtttgatccaaatgtaactaaagaggaagatttctttctggagaaaaacagttcagtcaaggtgcccatgatgttccgtagtggcatataccaagttggctatgacgataagctctcttgcaccatcctggaaataccctaccagaaaaatatcacagccatcttcatccttcctgatgagggcaagctgaagcacttggagaagggattgcaggtggacactttctccagatggaaaacattactgtcacgcagggtcgtagacgtgtctgtacccagactccacatgacgggcaccttcgacctgaagaagactctctcctacataggtgtctccaaaatctttgaggaacatggtgatctcaccaagatcgcccctcatcgcagcctgaaagtgggcgaggctgtgcacaaggctgagctgaagatggatgagaggggtacggaaggggccgctggcaccggagcacagactctgcccatggagacaccactcgtcgtcaagatagacaaaccctatctgctgctgatttacagcgagaaaataccttccgtgctcttcctgggaaagattgttaaccctattggaaaataaaggagaattcctgcttgcca

SEQ ID NO: 115852 - DNA, 1245 bp, Artificial Sequence
  derived and/or modified sequence
atgaacccaaccctaggcctcgcaatctttttggcggtcttactaactgtcaaggggctgcttaagccctcctttagcccgcgcaactacaaagctttgtccgaggtgcagggatggaaacagagaatggctgccaaggaactagcacggcaaaatatggacctggggttcaagctgttaaaaaaactggctttttataacccagggcgcaacatctttctgtcccctctgagtatcagcacagctttctccatgttgtgtctcggtgcccaggactctacgctcgatgaaattaagcagggcttcaactttcgtaagatgccagagaaggatttgcatgaggggttccactatatcattcacgaactaacccagaagacgcaggacctcaagctgtcaatagggaacaccctgtttatagatcagcgcttgcagccacagcgcaaatttctcgaagatgccaaaaacttttactctgccgagacaatcctcacaaactttcaaaatctggaaatggctcagaagcagatcaacgactttatttcgcaaaaaactcatggcaaaattaataacttaattgaaaatatagaccctggcacagtaatgctgcttgcgaattatatttttttcagagctcgatggaaacatgaatttgaccctaatgtgacaaaggaggaggattttttcctcgagaagaattcatctgtcaaggtgcccatgatgtttcgcagtggcatctaccaggtgggctatgacgataaactctcatgcacgatcctcgagatcccctaccagaagaacattacagcgatctttatcctcccggacgaaggcaaactgaaacacctggagaagggactgcaggtggacacatttagccgctggaagacactgctctcacggagagtggtggacgtctcagttcctcggttacatatgactggcacattcgacttgaaaaaaaccctctcttacataggagtttctaagatttttgaggagcatggagatctgaccaaaatcgccccacaccggtctctgaaggttggggaagccgtccacaaggctgagctcaagatggatgagagaggcacagagggagccgctggaaccggagcccagacgctccccatggaaacccccctcgtggtgaagattgataagccctacctccttctgatatatagcgaaaagatccctagtgtgctcttcctcgggaaaatcgtcaaccctatcggaaaatag

SEQ ID NO: 115853 - DNA, 1245 bp, Artificial Sequence
  derived and/or modified sequence
atgaaccccaccctgggcctggccatcttcctggccgtgctgctgactgtgaagggcctgctgaagcccagcttcagccccaggaactacaaggccctgtctgaggtgcagggctggaagcagaggatggccgccaaggagctggcccggcagaacatggacctgggcttcaagctgctgaagaagctggccttctacaaccctggcaggaacatcttcctgagccccctgagcatcagcacagccttctccatgctgtgcctgggcgcccaggacagcaccctggatgagatcaagcagggcttcaacttcaggaagatgcctgagaaggacctgcacgagggcttccactacatcatccacgagctgacccagaagacccaggacctgaagctgagcatcggcaacaccctcttcatcgaccagaggctgcagccccagaggaagttcctggaggatgccaagaacttctacagcgctgagaccatcctgaccaacttccagaacctggagatggcccagaagcagatcaatgacttcatcagccagaagacccacggcaagatcaacaacctgattgagaacatcgaccccggcaccgtgatgctgctggccaactacatcttcttccgggcccgctggaagcatgaatttgaccccaacgtgaccaaggaggaggacttcttcctggagaagaacagctctgtgaaggtgcccatgatgttccgcagcggcatctaccaggtgggctatgatgacaagctgagctgcaccatcctggagatcccctaccagaagaacatcacagccatcttcatcctgcctgatgagggcaagctgaagcacctggagaagggcctgcaggtggacaccttcagccgctggaagaccctgctgagcagaagagtggtggatgtgtctgtgccccggctgcacatgacaggcacctttgacctgaagaagaccctgagctacatcggcgtgtccaagatctttgaggagcacggggacctgaccaagatcgccccccacaggagcctgaaggtgggggaggccgtgcacaaggccgagctgaagatggatgagcggggcacagaaggagctgctggcactggagcccagaccctgcccatggagacccccctggtggtgaagattgacaagccctacctgctgctgatctacagcgagaagatccccagcgtgctcttcctgggcaagatcgtgaaccccatcggcaagtag

SEQ ID NO: 115854 - DNA, 1245 bp, Artificial Sequence
  derived and/or modified sequence
atgaaccccaccctgggcctggccatcttcctggccgtgctgctgacagttaagggactactcaagccttccttttccccgcgaaactacaaagcgctctccgaggtgcagggttggaaacagcgtatggccgctaaagagctcgctcgccagaatatggacttggggtttaagcttcttaagaaactcgcattttataaccccggtaggaacattttcctctcaccattatccatctccaccgccttttctatgctgtgtctgggcgcccaggactccactctggacgagattaagcaggggttcaattttcgcaagatgcctgagaaggatttacacgaagggtttcattatatcatccacgaactcacccagaagacacaggacttgaaactttccatcgggaatacattgttcattgatcagagactgcagccacagcgaaaatttctcgaggacgccaagaacttttactcagcagaaaccattctgacaaattttcagaatctggaaatggcccagaagcagatcaatgacttcattagccagaaaacccacggcaaaatcaataatttgattgaaaatatcgatccagggactgtgatgcttctggccaattacatttttttccgcgctagatggaagcacgaatttgatcccaacgtaaccaaggaagaggatttcttcttagagaaaaattcaagtgtcaaagtgccaatgatgtttaggagcgggatctaccaggtgggttatgatgacaaactgtcttgcaccattctggagatcccataccagaaaaacattaccgccattttcatcctgcctgacgagggcaagttgaagcacctcgaaaaaggcctgcaggtagatactttctctcggtggaagacattactctctcgacgcgtggtggatgttagcgtgccaaggctgcatatgacaggaacattcgacctcaagaaaaccctgtcctacataggagtgtcgaagattttcgaggagcacggggaccttaccaaaatcgctccgcaccggagcttgaaggtcggcgaagccgtccataaagcggagcttaaaatggacgaacggggtacagaaggtgcagcgggaacaggcgcccagacactcccgatggaaacacctttggttgtgaagatcgacaaaccttacctgcttctcatttactccgaaaagatcccatccgtgctgtttttgggaaaaatcgtcaacccaatcggcaagtag

SEQ ID NO: 115855 - RNA, 1245 nt, Artificial Sequence
  derived and/or modified sequence
augaacccuacacucggauuggcuaucuucuuggcaguccuccuaaccguaaaggggcuccuaaaaccuagcuucucuccacgaaacuacaaagccuuaagcgaagugcagggguggaaacagcgcauggcagcgaaagaauuagcgagacagaacauggauuuaggcuucaaguugcuuaaaaagcucgccuucuacaacccuggccgcaauaucuuccuuucuccacugucuauuucaacagcuuucagcaugcugugcuugggugcacaggauucuacacuagacgaaaucaagcagggcuuuaacuuccgaaagaugccggagaaggaccuacacgaaggauuucacuacauaauucaugaacucacacagaagacucaggaucugaagcuaucuaucggcaauacacucuuuauugaccagagacugcaaccacagaggaaguuucuggaggacgcuaagaacuucuacagcgcagaaacgaucuuaacaaauuuucagaaucuagaaauggcucagaaacagaucaacgacuucaucagccagaagacucauggcaaaaucaacaaccucauagagaacaucgacccaggaaccgugaugcuccuggcuaauuacauuuucuucagagcccgguggaaacaugaauuugacccuaaugugaccaaggaggaagacuuuuuucucgaaaaaaacucguccgugaaggugcccaugauguuccgcucagguaucuaccagguaggauacgaugauaaacugagcugcacaauccuggaaauuccuuaucagaagaauauuacagccaucuucauucugccagaugagggaaagcucaaacaccuugagaaaggccugcaggucgacaccuucuccagguggaaaacacugcuuucaagacgagucgucgacgucucagugccgagacugcauaugacgggcacuuuugacuugaagaagacacucuccuauaucggaguuucaaagauuuuugaggagcacggagaccucacaaagauagcaccccaccguucucugaaggugggagaagccgugcacaaagccgaauugaaaauggacgagcggggaacugagggagcagcugggacaggagcacagacccugcccauggaaaccccccuaguggugaaaauugacaagccuuaccuccuccugauauacagcgaaaaaauacccucaguguuauuucucggcaaaauugucaauccaauuggcaaguag

SEQ ID NO: 115856 - RNA, 1245 nt, Artificial Sequence
  derived and/or modified sequence
augaauccaacccucggccuggccauuuuucucgcuguccuacuuaccgugaagggacugcucaagccgucauucaguccacggaauuacaaagcacucucagagguacagggauggaaacaacggauggcagccaaggaacuggcuagacaaaauauggaccuuggguucaagcuucuuaagaaacuggccuuuuacaaucccgggcggaacaucuuucucucuccacucagcaucucaacagcauucucaauguugugucuuggggcccaggacucuaccuuagaugagauuaaacagggauucaauuuccgcaagaugccagagaaagacuuacaugagggauuccacuacaucauucaugagcuuacacagaaaacacaggaucugaagcuuagcaucggaaacacuuuauucauugaccagagauugcagccacaaaggaaauuucucgaagaugcuaagaacuuuuacuccgcugagacuauucugacaaacuuucagaaucuggaaauggcacagaagcagaucaaugauuucauuagccagaaaacucacggcaagauaaacaaucucaucgagaacauagauccaggaacugucaugcugcuggcaaacuacauauuuuuccgugccagguggaagcacgaauucgacccuaacguuacuaaagaagaagauuucuuccuggaaaaaaacagcuccgugaaggucccuaugauguuuagaagcgguauauaccagguugguuaugacgacaagcuauccuguacaauccucgagauccccuaucagaaaaauaucacagcuauuuucauccuaccagaugagggaaaacugaaacaccuggagaagggccugcaagucgauacauuuagccgauggaagacccugcucucgagacgcguuguagacguuucaguaccgagauuacacaugacuggcacauucgaucugaagaaaacccucucauauauaggcguaucuaagauuuuugaagaacacggugaucugacaaagauugccccccauaggucucugaaggucggugaggcaguucacaaggcggaguugaaaauggaugaacgaggcacugagggugcugccggaaccggagcccagacccuuccaauggagaccccccuggucguaaagauugauaaaccauaccuguuacugauuuacagcgagaaaauuccuuccguccuguuucugggcaaaaucguuaauccaaucggcaaguag

SEQ ID NO: 115857 - RNA, 1245 nt, Artificial Sequence
  derived and/or modified sequence
augaacccuacacucggauuggcuaucuucuuggcaguccuccuaaccguaaaggggcuccuaaaaccuagcuucucuccacgaaacuacaaagccuuaagcgaagugcagggguggaaacagcgcauggcagcgaaagaauuagcgagacagaacauggauuuaggcuucaaguugcuuaaaaagcucgccuucuacaacccuggccgcaauaucuuccuuucuccacugucuauuucaacagcuuucagcaugcugugcuugggugcacaggauucuacacuagacgaaaucaagcagggcuucaauuucagaaaaaugccagaaaaagaucugcacgaaggcuuccauuauauuauccacgagcucacacaaaagacacaggaucugaaacugucuauugguaauacccuauucauugaccagcgcuuacaaccccagagaaaauuccuagaagaugccaaaaacuuuuauuccgcugagacaaucuugaccaauuuccagaaucuagaaauggcccaaaagcaaauuaacgacuucauuucacagaaaacucacggaaaaaucaauaaccuuaucgaaaauauugauccugggacaguuaugcuacuggccaacuacauauuuuucagagcacgcuggaagcacgaguucgaucccaaugugaccaaagaagaagauuuuuuucucgaaaagaacaguucugugaaaguacccaugauguuucgaucuggcauuuaccaggugggcuaugacgacaagcugagcugcaccauccuugagauaccauaccagaaaaauauuacugccauuuucauccugcccgaugaggguaagcugaaacaccuggaaaaaggcuuacagguggauacuuucucucgauggaaaacccugcuaaguagacgagucgucgacgucucagugccgagacugcauaugacgggcacuuuugacuugaagaagacacucuccuauaucggaguuucaaagauuuuugaggagcacggagaccucacaaagauagcaccccaccguucucugaaggugggagaagccgugcacaaagccgaauugaaaauggacgagcggggaacugagggagcagcugggacaggagcacagacccugcccauggaaaccccccuaguggugaaaauugacaagccuuaccuccuccugauauacagcgaaaaaauacccucuguguuauuccucggaaaaaucgucaaccccaucggcaaguag

SEQ ID NO: 115858 - RNA, 1245 nt, Artificial Sequence
  derived and/or modified sequence
augaaucccacccuaggucuggccauauuccuggcuguuuugcuaacuguuaaaggacugcugaagcccagcuuuucuccuaggaauuauaaagccuugucagaaguucaaggauggaagcaaagaauggccgcaaaggaguuagcucgucagaauauggauuuaggauucaaauugcugaaaaagcucgccuuuuauaaccccggcaggaauauauuucuaucccccuuguccauauccacugccuuuuccaugcucugucuuggagcccaggauucuacccucgaugaaaucaagcagggauuuaacuuucguaaaaugccagaaaaagaccuucaugaaggguuccacuacaucauccacgagcugacacagaagacccaggaccucaagcugagcauuggaaacacacuauucauugaccagagacuccagccucaacggaaauuccuggaagacgcgaaaaacuucuacucugccgagaccaucuuaacgaauuuucagaaucuugaaauggcccagaagcagauaaaugauuuuauaucccaaaaaacacauggcaaaaucaacaaccucaucgaaaauaucgaucccggcaccgucaugcugcuggcaaacuacauauuuuuccgugccagguggaagcacgaauucgacccuaacguuacuaaagaagaagauuucuuccuggaaaaaaacagcuccgugaaggucccuaugauguuuagaagcgguauauaccagguugguuaugacgacaagcuauccuguacaauccucgagauccccuaucagaaaaauaucacagcuauuuucauccuaccagaugagggaaaacugaaacaccuggagaagggccugcaagucgauacauuuagccgauggaagacccugcucucgagacgcguuguagacguuucaguaccgagauuacacaugacuggcacauucgaucugaagaaaacccucucauauauaggcguaucuaagauuuuugaagaacacggugaucugacaaagauugccccccauaggucucugaaggucggugaggcaguucacaaggcggaguugaaaauggaugaacgaggcacugagggugcugccggaaccggagcccagacccuuccaauggagaccccccuggucguaaagauugauaaaccauaccuguuacugauuuacagcgagaaaauuccuucuguccuuuuccucgguaagauuguuaaucccauugguaaguag

SEQ ID NO: 115859 - protein, 535 aa, Artificial Sequence
  derived and/or modified sequence
MRRERTRGPQAWEFPSPTKSGCSLQSLSRDLRELREGEKPEDQAETEESWQGLARKTPGKACAPEGGSCQPGKTENTITMTTSHQPQDRYKAVWLIFFMLGLGTLLPWNFFMTATQYFTNRLDMSQNVSLVTAELSKDAQASAAPAAPLPERNSLSAIFNNVMTLCAMLPLLLFTYLNSFLHQRIPQSVRILGSLVAILLVFLITAILVKVQLDALPFFVITMIKIVLINSFGAILQGSLFGLAGLLPASYTAPIMSGQGLAGFFASVAMICAIASGSELSESAFGYFITACAVIILTIICYLGLPRLEFYRYYQQLKLEGPGEQETKLDLISKGEEPRAGKEESGVSVSNSQPTNESHSIKAILKNISVLAFSVCFIFTITIGMFPAVTVEVKSSIAGSSTWERYFIPVSCFLTFNIFDWLGRSLTAVFMWPGKDSRWLPSLVLARLVFVPLLLLCNIKPRRYLTVVFEHDAWFIFFMAAFAFSNGYLASLCMCFGPKKVKPAEAETAGAIMAFFLCLGLALGAVFSFLFRAIV

SEQ ID NO: 115860 - DNA, 1608 bp, Artificial Sequence
  derived and/or modified sequence
atgcgacgggaaagaacgcgcggcccacaggcctgggagttcccaagccccacaaagagcggctgttcactgcaatccctgagtcgcgatctgcgtgagttaagggaaggtgaaaagccagaggaccaggccgagacggaagagagttggcaaggcctcgctaggaaaacgccaggtaaggcgtgcgccccggagggaggatcatgccagccggggaagacggaaaatactataaccatgactacatcccatcaacctcaagatcgttataaagccgtgtggctgatcttcttcatgttaggtctcggaaccttactgccctggaacttttttatgactgccactcagtacttcactaaccgcctggatatgagccaaaatgttagcttggtaacagcagaattatcaaaggatgcccaagcctccgccgcccccgctgctcctctccccgagaggaacagtttgtcagcaatcttcaataacgtgatgaccttatgtgcaatgttacccctgctgctgtttacatacctaaatagctttctgcaccagagaatcccgcaatctgtacgcatcttgggctcccttgttgcgatactgctagtgttccttataacagctatcctagtcaaagtgcagttggacgccctgcccttcttcgttataactatgatcaagattgtgctcattaacagctttggggctatactgcaggggtcactgttcgggttagccggcctccttcctgcgagctataccgccccaataatgagtggacagggcttagccggattctttgcctctgttgcaatgatatgtgcaattgcctccggcagcgagctctccgaatccgccttcgggtactttataacagcctgtgcggtcattatcttaacaattatatgttacctggggctgccacggctggaattctaccgctactatcagcagttgaagcttgaaggcccaggggagcaagagaccaagctggatctcatttcgaagggagaggagcctcgggcaggaaaggaggaaagtggcgtctccgttagtaatagtcagccaaccaatgaatcgcactccattaaagccatactaaaaaatatcagtgtgcttgcattctcagtgtgtttcatttttaccatcacaattggcatgttccctgctgtgacagttgaggtgaagtcctctatcgccggttcgagcacctgggaaaggtatttcatcccggtgagttgctttctcactttcaacatctttgactggctgggaagatcccttacggccgtctttatgtggcctggaaaagattctcgttggctaccgagtttggtgctggctcgcctggtgtttgttccacttctcttgctgtgcaatattaagccgcggcgctatttgacagtcgtctttgagcatgacgcctggtttatcttttttatggccgctttcgcgttctccaacggctatttggcatccttgtgcatgtgttttggtcctaagaaggtaaaacccgccgaggccgaaacagcaggtgcaataatggctttctttctctgtctcggcttggctctgggcgcagttttctcttttctcttccgggctattgtgtag

SEQ ID NO: 115861 - DNA, 1608 bp, Artificial Sequence
  derived and/or modified sequence
atgaggcgggagaggacccggggcccccaggcctgggagttccccagccccaccaagagcggctgcagcctgcagagcctgagccgggacctgcgggagctgcgggagggggagaagccagaggaccaggccgagacagaggagagctggcagggcctggccaggaagacccctgggaaggcctgtgcccctgagggcggcagctgccagcccgggaagacagagaacaccatcaccatgaccaccagccaccagccccaggaccgctacaaggctgtgtggctgatcttcttcatgctgggcctgggcaccctgctgccctggaacttcttcatgacagccacccagtacttcaccaaccggctggacatgagccagaatgtgtccctggtgacagctgagctgagcaaggatgcccaggccagcgctgccccagctgcccccctgcctgagaggaacagcctgagcgccatcttcaacaacgtgatgaccctgtgtgccatgctgcccctgctgctcttcacctacctgaacagcttcctgcaccagaggatcccccagagcgtgcgcatcctgggcagcctggtggccatcctgctggtgttcctgatcacagccatcctggtgaaggtgcagctggatgccctgcccttctttgtgatcaccatgatcaagatcgtgctgatcaacagctttggagccatcctgcagggcagcctgtttggcctggccggcctgctgcctgccagctacacagcccccatcatgagcggccagggcctggccggcttctttgcctctgtggccatgatctgtgccatcgccagcggcagcgagctgtctgagagcgccttcggctacttcatcacagcctgtgctgtgatcatcctgaccatcatctgctacctgggcctgccccggctggagttctaccgctactaccagcagctgaagctggagggccctggagagcaggagaccaagctggacctgatcagcaagggggaggagccccgggccggcaaggaggagagcggcgtgtctgtgagcaacagccagcccaccaatgaaagccacagcatcaaggccatcctgaagaacatctctgtgctggccttctctgtgtgcttcatcttcaccatcaccatcggcatgtttcctgctgtgacagtggaggtgaagagcagcattgctggcagcagcacctgggagcgctacttcatccctgtgtcctgcttcctgaccttcaacatctttgactggctgggccgcagcctgacagctgtgttcatgtggccaggcaaggacagccgctggctgcccagcctggtgctggcccggctggtgtttgtgcccctgctgctgctgtgcaacatcaagccccggcgctacctgactgtggtgtttgaacatgatgcctggttcatcttcttcatggccgcctttgccttcagcaatggctacctggccagcctgtgcatgtgcttcggccccaagaaggtgaagccagctgaggccgagacagctggggccatcatggccttcttcctgtgcctgggcctggccctgggcgctgtgttctccttcctgttccgggccatcgtgtag

SEQ ID NO: 115862 - DNA, 1608 bp, Artificial Sequence
  derived and/or modified sequence
atgcggcgggagcggacccggggcccccaggcctgggagttccccagccccaccaagagcggttgctcactgcagtccttatcgagggatctgagagagctgcgggagggagagaaaccagaagatcaggcagagacggaggagagctggcaaggactcgctagaaagacgccgggaaaggcctgcgctccggagggcggctcctgccagcccgggaaaaccgaaaacaccataactatgacaaccagccaccagcctcaggatcgctacaaggctgtatggctaatcttttttatgctggggttggggactttacttccctggaattttttcatgaccgccacccagtatttcacgaatagattagatatgagccagaacgtgtcccttgtgactgcggagctaagtaaagacgcccaggcgtccgctgcccctgctgcccccctgcctgaacgaaattctctctctgcaatcttcaataacgttatgacattgtgcgctatgcttcctctcctgttattcacctacctgaattctttcctgcatcagagaatcccacagagtgtgaggatactgggaagcctcgtggcgatcctgctggtgtttctgattactgccatcttagttaaggtgcagctggatgccctacccttttttgtgattactatgattaaaatagtgctcattaacagtttcggtgcaatattgcagggttcactgttcggcttggcaggcctcctcccggcttcctacacagcacctatcatgagcggacagggtttggcaggtttctttgccagcgtggctatgatctgcgcaattgcttcgggctcagagctgtccgaaagtgctttcggctacttcattaccgcctgtgcggtgatcatccttactatcatttgttacctgggactgccccggctggaattttaccgctactaccagcagcttaagctggaagggccaggagaacaggagaccaaactggatttaatatcaaagggcgaggagcctcgtgctggaaaagaggaaagtggggtgagtgtgtcaaattctcaacctaccaacgaatcacactccatcaaggccatacttaagaatatctctgtcctggccttcagcgtgtgcttcatcttcacaatcacaattgggatgttccctgccgtgacggtggaagtgaagtcctctatcgcgggtagttccacatgggagaggtacttcatccccgtgtcatgctttcttacatttaacatctttgactggcttggccggagccttaccgccgtattcatgtggcccggtaaagatagtcggtggttacccagcttggttcttgcgaggctcgtattcgttcccctgctgctactgtgtaatatcaaacctcgtagatacctaacagtcgtgttcgagcatgacgcttggtttatatttttcatggctgctttcgcgttcagcaacggctatttggcctccctttgtatgtgtttcggtccgaaaaaggtcaaacctgccgaggctgaaactgctggcgccataatggccttcttcctttgcctgggactggcactcggtgcagtgttctcgttcctgtttagggccattgtatag

SEQ ID NO: 115863 - DNA, 1608 bp, Artificial Sequence
  derived and/or modified sequence
atgaggcgagaaagaacacggggtccacaggcatgggagttccctagtccaactaagtccgggtgtagcctacagagtctcagtagagatctgcgggaactgagggagggggaaaaacctgaggatcaggcggagactgaggagtcatggcaggggctcgcccgaaaaacaccaggaaaagcctgtgccccagaggggggaagctgccagccaggaaaaaccgagaacaccatcactatgactacgagtcaccagccccaggacaggtataaggcggtgtggctgattttttttatgctgggcctgggcaccctgctgccttggaacttttttatgacagctacgcaatatttcaccaataggctggatatgtcacagaacgtctctttggtgactgcagaactcagtaaagatgcacaggcctcagcggcaccagccgcacccctgccagaacggaacagtctgtcagccattttcaataacgtcatgacactatgtgcaatgctgcccctgttgctgttcacttatcttaattcatttctccatcagaggattcctcagtctgtccggattcttggcagcctggtggcgatcctattagtgtttctgatcacagctatccttgttaaggtgcagctcgatgcccttcccttttttgtgatcacgatgattaaaattgtcctcattaacagctttggtgcaatattacagggctccctctttggacttgccggacttttacctgcaagttacacagcgcctatcatgagcggtcaaggtctggcaggattcttcgcatcggtggccatgatttgcgccattgctagcggatctgaactcagcgagtccgcgttcggctactttataacggcttgcgccgttattatcctgactatcatatgttatctcggcttacccaggttggagttctatcgctattatcaacagctgaagctggaaggcccaggcgagcaggagactaaactcgacttgatcagcaaaggagaggaaccccgagcgggtaaggaggagtccggagtttccgtgagtaattctcagcctaccaatgagagccatagtatcaaagcgattttaaagaatattagcgtgttagcgttttctgtctgtttcatattcaccataaccattggaatgtttcctgcagtcacagtggaggtaaagtcttctattgctgggtcctctacctgggaacgctactttatccccgtgtcttgttttctgacattcaacattttcgactggctggggagatctcttaccgccgtattcatgtggccaggtaaagacagcagatggttaccaagcctggtcctcgctagactggtgttcgttcctttgcttttgctctgtaatatcaagcccaggcgctacctgaccgtggttttcgagcatgatgcctggtttatctttttcatggcagctttcgcattttccaacggctatctcgcgagtctatgcatgtgttttggccctaagaaagtcaagcccgcagaggctgaaacggcgggtgccatcatggccttcttcctatgcctcgggctagccttaggagcagtgttctcgtttcttttccgtgcaattgtgtag

SEQ ID NO: 115864 - DNA, 2283 bp, Artificial Sequence
  derived and/or modified sequence
acaccggtcaggcccggcgcgggctgcgctctccagctgtggctatggccccagccccgagatgaggagggagagaactaggggcccgcaggcctgggaatttccgtcccccaccaagtccggatgctcactccaaagtctcagcagggacctgagggagctcagggagggagagaagccagaagaccaggcagagactgaagagagctggcaaggcctggctagaaaaactccaggcaaggcctgtgcccctgagggagggagctgtcagccagggaaaaccgagaacaccatcaccatgacaaccagtcaccagcctcaggacagatacaaagctgtctggcttatcttcttcatgctgggtctgggaacgctgctcccgtggaattttttcatgacggccactcagtatttcacaaaccgcctggacatgtcccagaatgtgtccttggtcactgctgaactgagcaaggacgcccaggcgtcagccgcccctgcagcacccttgcctgagcggaactctctcagtgccatcttcaacaatgtcatgaccctatgtgccatgctgcccctgctgttattcacctacctcaactccttcctgcatcagaggatcccccagtccgtacggatcctgggcagcctggtggccatcctgctggtgtttctgatcactgccatcctggtgaaggtgcagctggatgctctgcccttctttgtcatcaccatgatcaagatcgtgctcattaattcatttggtgccatcctgcagggcagcctgtttggtctggctggccttctgcctgccagctacacggcccccatcatgagtggccagggcctagcaggcttctttgcctccgtggccatgatctgcgctattgccagtggctcggagctatcagaaagtgccttcggctactttatcacagcctgtgctgttatcattttgaccatcatctgttacctgggcctgccccgcctggaattctaccgctactaccagcagctcaagcttgaaggacccggggagcaggagaccaagttggacctcattagcaaaggagaggagccaagagcaggcaaagaggaatctggagtttcagtctccaactctcagcccaccaatgaaagccactctatcaaagccatcctgaaaaatatctcagtcctggctttctctgtctgcttcatcttcactatcaccattgggatgtttccagccgtgactgttgaggtcaagtccagcatcgcaggcagcagcacctgggaacgttacttcattcctgtgtcctgtttcttgactttcaatatctttgactggttgggccggagcctcacagctgtattcatgtggcctgggaaggacagccgctggctgccaagcctggtgctggcccggctggtgtttgtgccactgctgctgctgtgcaacattaagccccgccgctacctgactgtggtcttcgagcacgatgcctggttcatcttcttcatggctgcctttgccttctccaacggctacctcgccagcctctgcatgtgcttcgggcccaagaaagtgaagccagctgaggcagagaccgcaggagccatcatggccttcttcctgtgtctgggtctggcactgggggctgttttctccttcctgttccgggcaattgtgtgacaaaggatggacagaaggactgcctgcctccctccctgtctgcctcctgccccttccttctgccaggggtgatcctgagtggtctggcggttttttcttctaactgacttctgctttccacggcgtgtgctgggcccggatctccaggccctggggagggagcctctggacggacagtggggacattgtgggtttggggctcagagtcgagggacggggtgtagcctcggcatttgcttgagtttctccactcttggctctgactgatccctgcttgtgcaggccagtggaggctcttgggcttggagaacacgtgtgtctctgtgtatgtgtctgtgtgtctgcgtccgtgtctgtcagactgtctgcctgtcctggggtggctaggagctgggtctgaccgttgtatggtttgacctgatatactccattctcccctgcgcctcctcctctgtgttctctccatgtccccctcccaactccccatgcccagttcttacccatcatgcaccctgtacagttgccacgttactgccttttttaaaaatatatttgacagaaaccaggtgccttcagaggctctctgatttaaataaacctttcttgtttttttc

SEQ ID NO: 115865 - DNA, 1608 bp, Artificial Sequence
  derived and/or modified sequence
atgagaagagagagaaccagaggcccccaggcctgggagttccccagccccaccaagagcggctgcagcctgcagagcctgagcagagacctgagagagctgagagagggcgagaagcccgaggaccaggccgagaccgaggagagctggcagggcctggccagaaagacccccggcaaggcctgcgcccccgagggcggcagctgccagcccggcaagaccgagaacaccatcaccatgaccaccagccaccagccccaggacagatacaaggccgtgtggctgatcttcttcatgctgggcctgggcaccctgctgccctggaacttcttcatgaccgccacccagtacttcaccaacagactggacatgagccagaacgtgagcctggtgaccgccgagctgagcaaggacgcccaggccagcgccgcccccgccgcccccctgcccgagagaaacagcctgagcgccatcttcaacaacgtgatgaccctgtgcgccatgctgcccctgctgctgttcacctacctgaacagcttcctgcaccagagaatcccccagagcgtgagaatcctgggcagcctggtggccatcctgctggtgttcctgatcaccgccatcctggtgaaggtgcagctggacgccctgcccttcttcgtgatcaccatgatcaagatcgtgctgatcaacagcttcggcgccatcctgcagggcagcctgttcggcctggccggcctgctgcccgccagctacaccgcccccatcatgagcggccagggcctggccggcttcttcgccagcgtggccatgatctgcgccatcgccagcggcagcgagctgagcgagagcgccttcggctacttcatcaccgcctgcgccgtgatcatcctgaccatcatctgctacctgggcctgcccagactggagttctacagatactaccagcagctgaagctggagggccccggcgagcaggagaccaagctggacctgatcagcaagggcgaggagcccagagccggcaaggaggagagcggcgtgagcgtgagcaacagccagcccaccaacgagagccacagcatcaaggccatcctgaagaacatcagcgtgctggccttcagcgtgtgcttcatcttcaccatcaccatcggcatgttccccgccgtgaccgtggaggtgaagagcagcatcgccggcagcagcacctgggagagatacttcatccccgtgagctgcttcctgaccttcaacatcttcgactggctgggcagaagcctgaccgccgtgttcatgtggcccggcaaggacagcagatggctgcccagcctggtgctggccagactggtgttcgtgcccctgctgctgctgtgcaacatcaagcccagaagatacctgaccgtggtgttcgagcacgacgcctggttcatcttcttcatggccgccttcgccttcagcaacggctacctggccagcctgtgcatgtgcttcggccccaagaaggtgaagcccgccgaggccgagaccgccggcgccatcatggccttcttcctgtgcctgggcctggccctgggcgccgtgttcagcttcctgttcagagccatcgtgtag

SEQ ID NO: 115866 - protein, 169 aa, Artificial Sequence
  derived and/or modified sequence
MRRERTRGPQAWEFPSPTKSGCSLQSLSRYKAVWLIFFMLGLGTLLPWNFFMTATQYFTNRLDMSQNVSLVTAELSKDAQASAAPAAPLPERNSLSAIFNNVMTLCAMLPLLLFTYLNSFLHQRIPQSVRILGSLVAILLVFLITAILVKVQLDALPFFVITMIKIVLI

SEQ ID NO: 115867 - DNA, 2168 bp, Artificial Sequence
  derived and/or modified sequence
ggagcctgaggaccctgcggggaccgggacccaagctgggcggggcggcctggctcccgggcctaaaacaggctgcggtcacgttgacctccgcaaggggcaggcgagtggacgggtgatccccatcgatctggcccctgagggagggagctgtcagccagggaaaaccgagaacaccatcaccatgacaaccagtcaccagcctcaggacagatacaaagctgtctggcttatcttcttcatgctgggtctgggaacgctgctcccgtggaattttttcatgacggccactcagtatttcacaaaccgcctggacatgtcccagaatgtgtccttggtcactgctgaactgagcaaggacgcccaggcgtcagccgcccctgcagcacccttgcctgagcggaactctctcagtgccatcttcaacaatgtcatgaccctatgtgccatgctgcccctgctgttattcacctacctcaactccttcctgcatcagaggatcccccagtccgtacggatcctgggcagcctggtggccatcctgctggtgtttctgatcactgccatcctggtgaaggtgcagctggatgctctgcccttctttgtcatcaccatgatcaagatcgtgctcattaattcatttggtgccatcctgcagggcagcctgtttggtctggctggccttctgcctgccagctacacggcccccatcatgagtggccagggcctagcaggcttctttgcctccgtggccatgatctgcgctattgccagtggctcggagctatcagaaagtgccttcggctactttatcacagcctgtgctgttatcattttgaccatcatctgttacctgggcctgccccgcctggaattctaccgctactaccagcagctcaagcttgaaggacccggggagcaggagaccaagttggacctcattagcaaaggagaggagccaagagcaggcaaagaggaatctggagtttcagtctccaactctcagcccaccaatgaaagccactctatcaaagccatcctgaaaaatatctcagtcctggctttctctgtctgcttcatcttcactatcaccattgggatgtttccagccgtgactgttgaggtcaagtccagcatcgcaggcagcagcacctgggaacgttacttcattcctgtgtcctgtttcttgactttcaatatctttgactggttgggccggagcctcacagctgtattcatgtggcctgggaaggacagccgctggctgccaagcctggtgctggcccggctggtgtttgtgccactgctgctgctgtgcaacattaagccccgccgctacctgactgtggtcttcgagcacgatgcctggttcatcttcttcatggctgcctttgccttctccaacggctacctcgccagcctctgcatgtgcttcgggcccaagaaagtgaagccagctgaggcagagaccgcaggagccatcatggccttcttcctgtgtctgggtctggcactgggggctgttttctccttcctgttccgggcaattgtgtgacaaaggatggacagaaggactgcctgcctccctccctgtctgcctcctgccccttccttctgccaggggtgatcctgagtggtctggcggttttttcttctaactgacttctgctttccacggcgtgtgctgggcccggatctccaggccctggggagggagcctctggacggacagtggggacattgtgggtttggggctcagagtcgagggacggggtgtagcctcggcatttgcttgagtttctccactcttggctctgactgatccctgcttgtgcaggccagtggaggctcttgggcttggagaacacgtgtgtctctgtgtatgtgtctgtgtgtctgcgtccgtgtctgtcagactgtctgcctgtcctggggtggctaggagctgggtctgaccgttgtatggtttgacctgatatactccattctcccctgcgcctcctcctctgtgttctctccatgtccccctcccaactccccatgcccagttcttacccatcatgcaccctgtacagttgccacgttactgccttttttaaaaatatatttgacagaaaccaggtgccttcagaggctctctgatttaaataaacctttcttgttttttt

SEQ ID NO: 115868 - DNA, 2112 bp, Artificial Sequence
  derived and/or modified sequence
gaatgtgccccggcgggagagggaagctgcagcgagagcgcgcggatctcagcgcgggagcagtgcttctgcggcaggcccctgagggagggagctgtcagccagggaaaaccgagaacaccatcaccatgacaaccagtcaccagcctcaggacagatacaaagctgtctggcttatcttcttcatgctgggtctgggaacgctgctcccgtggaattttttcatgacggccactcagtatttcacaaaccgcctggacatgtcccagaatgtgtccttggtcactgctgaactgagcaaggacgcccaggcgtcagccgcccctgcagcacccttgcctgagcggaactctctcagtgccatcttcaacaatgtcatgaccctatgtgccatgctgcccctgctgttattcacctacctcaactccttcctgcatcagaggatcccccagtccgtacggatcctgggcagcctggtggccatcctgctggtgtttctgatcactgccatcctggtgaaggtgcagctggatgctctgcccttctttgtcatcaccatgatcaagatcgtgctcattaattcatttggtgccatcctgcagggcagcctgtttggtctggctggccttctgcctgccagctacacggcccccatcatgagtggccagggcctagcaggcttctttgcctccgtggccatgatctgcgctattgccagtggctcggagctatcagaaagtgccttcggctactttatcacagcctgtgctgttatcattttgaccatcatctgttacctgggcctgccccgcctggaattctaccgctactaccagcagctcaagcttgaaggacccggggagcaggagaccaagttggacctcattagcaaaggagaggagccaagagcaggcaaagaggaatctggagtttcagtctccaactctcagcccaccaatgaaagccactctatcaaagccatcctgaaaaatatctcagtcctggctttctctgtctgcttcatcttcactatcaccattgggatgtttccagccgtgactgttgaggtcaagtccagcatcgcaggcagcagcacctgggaacgttacttcattcctgtgtcctgtttcttgactttcaatatctttgactggttgggccggagcctcacagctgtattcatgtggcctgggaaggacagccgctggctgccaagcctggtgctggcccggctggtgtttgtgccactgctgctgctgtgcaacattaagccccgccgctacctgactgtggtcttcgagcacgatgcctggttcatcttcttcatggctgcctttgccttctccaacggctacctcgccagcctctgcatgtgcttcgggcccaagaaagtgaagccagctgaggcagagaccgcaggagccatcatggccttcttcctgtgtctgggtctggcactgggggctgttttctccttcctgttccgggcaattgtgtgacaaaggatggacagaaggactgcctgcctccctccctgtctgcctcctgccccttccttctgccaggggtgatcctgagtggtctggcggttttttcttctaactgacttctgctttccacggcgtgtgctgggcccggatctccaggccctggggagggagcctctggacggacagtggggacattgtgggtttggggctcagagtcgagggacggggtgtagcctcggcatttgcttgagtttctccactcttggctctgactgatccctgcttgtgcaggccagtggaggctcttgggcttggagaacacgtgtgtctctgtgtatgtgtctgtgtgtctgcgtccgtgtctgtcagactgtctgcctgtcctggggtggctaggagctgggtctgaccgttgtatggtttgacctgatatactccattctcccctgcgcctcctcctctgtgttctctccatgtccccctcccaactccccatgcccagttcttacccatcatgcaccctgtacagttgccacgttactgccttttttaaaaatatatttgacagaaaccaggtgccttcagaggctctctgatttaaataaacctttcttgttttttt

SEQ ID NO: 115869 - DNA, 2485 bp, Artificial Sequence
  derived and/or modified sequence
agtgcttctgcggcaggtgctgcccggggccggggactggggactggggactgccggggcggaagacgccgctgcccgcctgccacggagggcagggagggcgggcctgacggctccgcagcccggagaagggacgccgggtggggccccagtgcggagcgtgcggagccgcgcagcacgtggcgcgcacgggccagggagcctgaggaccctgcggggaccgggacccaagctgggcggggcggcctggctcccgggcctaaaacaggctgcggtcacgttgacctccgcaaggggcaggcgagtggacgggtgatccccatcgatctggagcccgtggacaaggcccactgcctgagcctgaactaggagcacctcctagggactgcccaggcttgctctgctctgacccttctgctggccagtctgggcacctgcaggcccctgagggagggagctgtcagccagggaaaaccgagaacaccatcaccatgacaaccagtcaccagcctcaggacagatacaaagctgtctggcttatcttcttcatgctgggtctgggaacgctgctcccgtggaattttttcatgacggccactcagtatttcacaaaccgcctggacatgtcccagaatgtgtccttggtcactgctgaactgagcaaggacgcccaggcgtcagccgcccctgcagcacccttgcctgagcggaactctctcagtgccatcttcaacaatgtcatgaccctatgtgccatgctgcccctgctgttattcacctacctcaactccttcctgcatcagaggatcccccagtccgtacggatcctgggcagcctggtggccatcctgctggtgtttctgatcactgccatcctggtgaaggtgcagctggatgctctgcccttctttgtcatcaccatgatcaagatcgtgctcattaattcatttggtgccatcctgcagggcagcctgtttggtctggctggccttctgcctgccagctacacggcccccatcatgagtggccagggcctagcaggcttctttgcctccgtggccatgatctgcgctattgccagtggctcggagctatcagaaagtgccttcggctactttatcacagcctgtgctgttatcattttgaccatcatctgttacctgggcctgccccgcctggaattctaccgctactaccagcagctcaagcttgaaggacccggggagcaggagaccaagttggacctcattagcaaaggagaggagccaagagcaggcaaagaggaatctggagtttcagtctccaactctcagcccaccaatgaaagccactctatcaaagccatcctgaaaaatatctcagtcctggctttctctgtctgcttcatcttcactatcaccattgggatgtttccagccgtgactgttgaggtcaagtccagcatcgcaggcagcagcacctgggaacgttacttcattcctgtgtcctgtttcttgactttcaatatctttgactggttgggccggagcctcacagctgtattcatgtggcctgggaaggacagccgctggctgccaagcctggtgctggcccggctggtgtttgtgccactgctgctgctgtgcaacattaagccccgccgctacctgactgtggtcttcgagcacgatgcctggttcatcttcttcatggctgcctttgccttctccaacggctacctcgccagcctctgcatgtgcttcgggcccaagaaagtgaagccagctgaggcagagaccgcaggagccatcatggccttcttcctgtgtctgggtctggcactgggggctgttttctccttcctgttccgggcaattgtgtgacaaaggatggacagaaggactgcctgcctccctccctgtctgcctcctgccccttccttctgccaggggtgatcctgagtggtctggcggttttttcttctaactgacttctgctttccacggcgtgtgctgggcccggatctccaggccctggggagggagcctctggacggacagtggggacattgtgggtttggggctcagagtcgagggacggggtgtagcctcggcatttgcttgagtttctccactcttggctctgactgatccctgcttgtgcaggccagtggaggctcttgggcttggagaacacgtgtgtctctgtgtatgtgtctgtgtgtctgcgtccgtgtctgtcagactgtctgcctgtcctggggtggctaggagctgggtctgaccgttgtatggtttgacctgatatactccattctcccctgcgcctcctcctctgtgttctctccatgtccccctcccaactccccatgcccagttcttacccatcatgcaccctgtacagttgccacgttactgccttttttaaaaatatatttgacagaaaccaggtgccttcagaggctctctgatttaaataaacctttcttgtttttttctccatggct

SEQ ID NO: 115870 - DNA, 159 bp, Artificial Sequence
  derived and/or modified sequence
atgcgtattgagggatgcataattggcttcgacgagtacatgaatctggtgctggacgacgctgaggaaattcattcgaaaactaaaagtcggaagcagctgggcaggattatgctcaagggggacaacattaccttacttcagtcagtttccaactag

SEQ ID NO: 115871 - DNA, 159 bp, Artificial Sequence
  derived and/or modified sequence
atgagaattgagggctgcatcatcggctttgatgagtacatgaacctggtgctggatgatgctgaggagatccacagcaagaccaagagcaggaagcagctgggccgcatcatgctgaagggggacaacatcaccctgctgcagagcgtgagcaactag

SEQ ID NO: 115872 - DNA, 159 bp, Artificial Sequence
  derived and/or modified sequence
atgcggatcgagggctgcatcatcggcttcgacgagtacatgaacctggtgctggatgatgccgaagagatacatagcaagaccaagtccaggaagcagctgggaagaattatgctgaagggtgacaacatcacattgttacagtccgtgtcaaattag

SEQ ID NO: 115873 - DNA, 159 bp, Artificial Sequence
  derived and/or modified sequence
atgcgcattgagggttgcattattgggtttgacgagtacatgaatctagttctcgatgatgccgaggagattcattcaaaaaccaagtccaggaagcaactcggcaggatcatgttgaagggagacaatattacactcttacagtccgtgtcaaactag

SEQ ID NO: 115874 - DNA, 355 bp, Artificial Sequence
  derived and/or modified sequence
ttctttttttaacgtttccacttttatgattatttcagagatcgcggattcaggtgtggctctatgagcaagtgaatatgcggatagaaggctgtatcattggttttgatgagtatatgaaccttgtattagatgatgcagaagagattcattctaaaacaaagtcaagaaaacaactgggtcggatcatgctaaaaggagataatattactctgctacaaagtgtctccaactagaaatgatcaatgaagtgagaaattgttgagaaggatacagtttgtttttagatgtcctttgtccaatgtgaacatttattcatattgttttgattaccctcgtgttactacaagatggc

SEQ ID NO: 115875 - DNA, 159 bp, Artificial Sequence
  derived and/or modified sequence
atgagaatcgagggctgcatcatcggcttcgacgagtacatgaacctggtgctggacgacgccgaggagatccacagcaagaccaagagcagaaagcagctgggcagaatcatgctgaagggcgacaacatcaccctgctgcagagcgtgagcaactag

SEQ ID NO: 115876 - protein, 456 aa, Artificial Sequence [sequence omitted]

SEQ ID NO: 115877 - DNA, 2275 bp, Artificial Sequence
  derived and/or modified sequence
ggagcctgaggaccctgcggggaccgggacccaagctgggcggggcggcctggctcccgggcctaaaacaggctgcggtcacgttgacctccgcaaggggcaggcgagtggacgggtgatccccatcgatctggagcccgtggacaaggcccactgcctgagcctgaactaggagcacctcctagggactgcccaggcttgctctgctctgacccttctgctggccagtctgggcacctggcccctgagggagggagctgtcagccagggaaaaccgagaacaccatcaccatgacaaccagtcaccagcctcaggacagatacaaagctgtctggcttatcttcttcatgctgggtctgggaacgctgctcccgtggaattttttcatgacggccactcagtatttcacaaaccgcctggacatgtcccagaatgtgtccttggtcactgctgaactgagcaaggacgcccaggcgtcagccgcccctgcagcacccttgcctgagcggaactctctcagtgccatcttcaacaatgtcatgaccctatgtgccatgctgcccctgctgttattcacctacctcaactccttcctgcatcagaggatcccccagtccgtacggatcctgggcagcctggtggccatcctgctggtgtttctgatcactgccatcctggtgaaggtgcagctggatgctctgcccttctttgtcatcaccatgatcaagatcgtgctcattaattcatttggtgccatcctgcagggcagcctgtttggtctggctggccttctgcctgccagctacacggcccccatcatgagtggccagggcctagcaggcttctttgcctccgtggccatgatctgcgctattgccagtggctcggagctatcagaaagtgccttcggctactttatcacagcctgtgctgttatcattttgaccatcatctgttacctgggcctgccccgcctggaattctaccgctactaccagcagctcaagcttgaaggacccggggagcaggagaccaagttggacctcattagcaaaggagaggagccaagagcaggcaaagaggaatctggagtttcagtctccaactctcagcccaccaatgaaagccactctatcaaagccatcctgaaaaatatctcagtcctggctttctctgtctgcttcatcttcactatcaccattgggatgtttccagccgtgactgttgaggtcaagtccagcatcgcaggcagcagcacctgggaacgttacttcattcctgtgtcctgtttcttgactttcaatatctttgactggttgggccggagcctcacagctgtattcatgtggcctgggaaggacagccgctggctgccaagcctggtgctggcccggctggtgtttgtgccactgctgctgctgtgcaacattaagccccgccgctacctgactgtggtcttcgagcacgatgcctggttcatcttcttcatggctgcctttgccttctccaacggctacctcgccagcctctgcatgtgcttcgggcccaagaaagtgaagccagctgaggcagagaccgcaggagccatcatggccttcttcctgtgtctgggtctggcactgggggctgttttctccttcctgttccgggcaattgtgtgacaaaggatggacagaaggactgcctgcctccctccctgtctgcctcctgccccttccttctgccaggggtgatcctgagtggtctggcggttttttcttctaactgacttctgctttccacggcgtgtgctgggcccggatctccaggccctggggagggagcctctggacggacagtggggacattgtgggtttggggctcagagtcgagggacggggtgtagcctcggcatttgcttgagtttctccactcttggctctgactgatccctgcttgtgcaggccagtggaggctcttgggcttggagaacacgtgtgtctctgtgtatgtgtctgtgtgtctgcgtccgtgtctgtcagactgtctgcctgtcctggggtggctaggagctgggtctgaccgttgtatggtttgacctgatatactccattctcccctgcgcctcctcctctgtgttctctccatgtccccctcccaactccccatgcccagttcttacccatcatgcaccctgtacagttgccacgttactgccttttttaaaaatatatttgacagaaaccaggtgccttcagaggctctctgatttaaataaacctttcttgttttttt

SEQ ID NO: 115878 - DNA, 2258 bp, Artificial Sequence
  derived and/or modified sequence
cagcgcgggagcagtgcttctgcggcaggcttctcagaatggggccccatgaagcctgagggactctctcctgataacaccctgtgccacctttttcattctggatccgcacccaggagcccgtggacaaggcccactgcctgagcctgaactaggagcacctcctagggactgcccaggcttgctctgctctgacccttctgctggccagtctgggcacctggcccctgagggagggagctgtcagccagggaaaaccgagaacaccatcaccatgacaaccagtcaccagcctcaggacagatacaaagctgtctggcttatcttcttcatgctgggtctgggaacgctgctcccgtggaattttttcatgacggccactcagtatttcacaaaccgcctggacatgtcccagaatgtgtccttggtcactgctgaactgagcaaggacgcccaggcgtcagccgcccctgcagcacccttgcctgagcggaactctctcagtgccatcttcaacaatgtcatgaccctatgtgccatgctgcccctgctgttattcacctacctcaactccttcctgcatcagaggatcccccagtccgtacggatcctgggcagcctggtggccatcctgctggtgtttctgatcactgccatcctggtgaaggtgcagctggatgctctgcccttctttgtcatcaccatgatcaagatcgtgctcattaattcatttggtgccatcctgcagggcagcctgtttggtctggctggccttctgcctgccagctacacggcccccatcatgagtggccagggcctagcaggcttctttgcctccgtggccatgatctgcgctattgccagtggctcggagctatcagaaagtgccttcggctactttatcacagcctgtgctgttatcattttgaccatcatctgttacctgggcctgccccgcctggaattctaccgctactaccagcagctcaagcttgaaggacccggggagcaggagaccaagttggacctcattagcaaaggagaggagccaagagcaggcaaagaggaatctggagtttcagtctccaactctcagcccaccaatgaaagccactctatcaaagccatcctgaaaaatatctcagtcctggctttctctgtctgcttcatcttcactatcaccattgggatgtttccagccgtgactgttgaggtcaagtccagcatcgcaggcagcagcacctgggaacgttacttcattcctgtgtcctgtttcttgactttcaatatctttgactggttgggccggagcctcacagctgtattcatgtggcctgggaaggacagccgctggctgccaagcctggtgctggcccggctggtgtttgtgccactgctgctgctgtgcaacattaagccccgccgctacctgactgtggtcttcgagcacgatgcctggttcatcttcttcatggctgcctttgccttctccaacggctacctcgccagcctctgcatgtgcttcgggcccaagaaagtgaagccagctgaggcagagaccgcaggagccatcatggccttcttcctgtgtctgggtctggcactgggggctgttttctccttcctgttccgggcaattgtgtgacaaaggatggacagaaggactgcctgcctccctccctgtctgcctcctgccccttccttctgccaggggtgatcctgagtggtctggcggttttttcttctaactgacttctgctttccacggcgtgtgctgggcccggatctccaggccctggggagggagcctctggacggacagtggggacattgtgggtttggggctcagagtcgagggacggggtgtagcctcggcatttgcttgagtttctccactcttggctctgactgatccctgcttgtgcaggccagtggaggctcttgggcttggagaacacgtgtgtctctgtgtatgtgtctgtgtgtctgcgtccgtgtctgtcagactgtctgcctgtcctggggtggctaggagctgggtctgaccgttgtatggtttgacctgatatactccattctcccctgcgcctcctcctctgtgttctctccatgtccccctcccaactccccatgcccagttcttacccatcatgcaccctgtacagttgccacgttactgccttttttaaaaatatatttgacagaaaccaggtgccttcagaggctctctgatttaaataaacctttcttgttttttt

SEQ ID NO: 115879 - DNA, 2219 bp, Artificial Sequence
  derived and/or modified sequence
gaatgtgccccggcgggagagggaagctgcagcgagagcgcgcggatctcagcgcgggagcagtgcttctgcggcaggagcccgtggacaaggcccactgcctgagcctgaactaggagcacctcctagggactgcccaggcttgctctgctctgacccttctgctggccagtctgggcacctggcccctgagggagggagctgtcagccagggaaaaccgagaacaccatcaccatgacaaccagtcaccagcctcaggacagatacaaagctgtctggcttatcttcttcatgctgggtctgggaacgctgctcccgtggaattttttcatgacggccactcagtatttcacaaaccgcctggacatgtcccagaatgtgtccttggtcactgctgaactgagcaaggacgcccaggcgtcagccgcccctgcagcacccttgcctgagcggaactctctcagtgccatcttcaacaatgtcatgaccctatgtgccatgctgcccctgctgttattcacctacctcaactccttcctgcatcagaggatcccccagtccgtacggatcctgggcagcctggtggccatcctgctggtgtttctgatcactgccatcctggtgaaggtgcagctggatgctctgcccttctttgtcatcaccatgatcaagatcgtgctcattaattcatttggtgccatcctgcagggcagcctgtttggtctggctggccttctgcctgccagctacacggcccccatcatgagtggccagggcctagcaggcttctttgcctccgtggccatgatctgcgctattgccagtggctcggagctatcagaaagtgccttcggctactttatcacagcctgtgctgttatcattttgaccatcatctgttacctgggcctgccccgcctggaattctaccgctactaccagcagctcaagcttgaaggacccggggagcaggagaccaagttggacctcattagcaaaggagaggagccaagagcaggcaaagaggaatctggagtttcagtctccaactctcagcccaccaatgaaagccactctatcaaagccatcctgaaaaatatctcagtcctggctttctctgtctgcttcatcttcactatcaccattgggatgtttccagccgtgactgttgaggtcaagtccagcatcgcaggcagcagcacctgggaacgttacttcattcctgtgtcctgtttcttgactttcaatatctttgactggttgggccggagcctcacagctgtattcatgtggcctgggaaggacagccgctggctgccaagcctggtgctggcccggctggtgtttgtgccactgctgctgctgtgcaacattaagccccgccgctacctgactgtggtcttcgagcacgatgcctggttcatcttcttcatggctgcctttgccttctccaacggctacctcgccagcctctgcatgtgcttcgggcccaagaaagtgaagccagctgaggcagagaccgcaggagccatcatggccttcttcctgtgtctgggtctggcactgggggctgttttctccttcctgttccgggcaattgtgtgacaaaggatggacagaaggactgcctgcctccctccctgtctgcctcctgccccttccttctgccaggggtgatcctgagtggtctggcggttttttcttctaactgacttctgctttccacggcgtgtgctgggcccggatctccaggccctggggagggagcctctggacggacagtggggacattgtgggtttggggctcagagtcgagggacggggtgtagcctcggcatttgcttgagtttctccactcttggctctgactgatccctgcttgtgcaggccagtggaggctcttgggcttggagaacacgtgtgtctctgtgtatgtgtctgtgtgtctgcgtccgtgtctgtcagactgtctgcctgtcctggggtggctaggagctgggtctgaccgttgtatggtttgacctgatatactccattctcccctgcgcctcctcctctgtgttctctccatgtccccctcccaactccccatgcccagttcttacccatcatgcaccctgtacagttgccacgttactgccttttttaaaaatatatttgacagaaaccaggtgccttcagaggctctctgatttaaataaacctttcttgttttttt

SEQ ID NO: 115880 - DNA, 2326 bp, Artificial Sequence
  derived and/or modified sequence
gaagggcccctcccactgagtcggctctggtctccccgcccctgagccgcgaggactggacgcagctggctgcggagctctgggcgggcgctggggtcgcctgttgcagcctctcttccgcccggcggcccacaccggtcaggcccggcgcgggctgcgctctccagctgtggctatggccccagccccgagatgaggagggagagaactaggggcccgcaggcctgggaatttccgtcccccaccaagtccggatgctcactccaaagtctcagcagcaggcccctgagggagggagctgtcagccagggaaaaccgagaacaccatcaccatgacaaccagtcaccagcctcaggacagatacaaagctgtctggcttatcttcttcatgctgggtctgggaacgctgctcccgtggaattttttcatgacggccactcagtatttcacaaaccgcctggacatgtcccagaatgtgtccttggtcactgctgaactgagcaaggacgcccaggcgtcagccgcccctgcagcacccttgcctgagcggaactctctcagtgccatcttcaacaatgtcatgaccctatgtgccatgctgcccctgctgttattcacctacctcaactccttcctgcatcagaggatcccccagtccgtacggatcctgggcagcctggtggccatcctgctggtgtttctgatcactgccatcctggtgaaggtgcagctggatgctctgcccttctttgtcatcaccatgatcaagatcgtgctcattaattcatttggtgccatcctgcagggcagcctgtttggtctggctggccttctgcctgccagctacacggcccccatcatgagtggccagggcctagcaggcttctttgcctccgtggccatgatctgcgctattgccagtggctcggagctatcagaaagtgccttcggctactttatcacagcctgtgctgttatcattttgaccatcatctgttacctgggcctgccccgcctggaattctaccgctactaccagcagctcaagcttgaaggacccggggagcaggagaccaagttggacctcattagcaaaggagaggagccaagagcaggcaaagaggaatctggagtttcagtctccaactctcagcccaccaatgaaagccactctatcaaagccatcctgaaaaatatctcagtcctggctttctctgtctgcttcatcttcactatcaccattgggatgtttccagccgtgactgttgaggtcaagtccagcatcgcaggcagcagcacctgggaacgttacttcattcctgtgtcctgtttcttgactttcaatatctttgactggttgggccggagcctcacagctgtattcatgtggcctgggaaggacagccgctggctgccaagcctggtgctggcccggctggtgtttgtgccactgctgctgctgtgcaacattaagccccgccgctacctgactgtggtcttcgagcacgatgcctggttcatcttcttcatggctgcctttgccttctccaacggctacctcgccagcctctgcatgtgcttcgggcccaagaaagtgaagccagctgaggcagagaccgcaggagccatcatggccttcttcctgtgtctgggtctggcactgggggctgttttctccttcctgttccgggcaattgtgtgacaaaggatggacagaaggactgcctgcctccctccctgtctgcctcctgccccttccttctgccaggggtgatcctgagtggtctggcggttttttcttctaactgacttctgctttccacggcgtgtgctgggcccggatctccaggccctggggagggagcctctggacggacagtggggacattgtgggtttggggctcagagtcgagggacggggtgtagcctcggcatttgcttgagtttctccactcttggctctgactgatccctgcttgtgcaggccagtggaggctcttgggcttggagaacacgtgtgtctctgtgtatgtgtctgtgtgtctgcgtccgtgtctgtcagactgtctgcctgtcctggggtggctaggagctgggtctgaccgttgtatggtttgacctgatatactccattctcccctgcgcctcctcctctgtgttctctccatgtccccctcccaactccccatgcccagttcttacccatcatgcaccctgtacagttgccacgttactgccttttttaaaaatatatttgacagaaaccaggtgccttcagaggctctctgatttaaataaacctttcttgtttttttctccatggct

SEQ ID NO: 115881 - DNA, 2159 bp, Artificial Sequence
  derived and/or modified sequence
agggggtcttactggactcctccactggcctgttctgtcagccctgccccctctccccctaagagcctgaggaggcctatggcagggccaagacagggcctcacactgttcctgcccccagcaggcccctgagggagggagctgtcagccagggaaaaccgagaacaccatcaccatgacaaccagtcaccagcctcaggacagatacaaagctgtctggcttatcttcttcatgctgggtctgggaacgctgctcccgtggaattttttcatgacggccactcagtatttcacaaaccgcctggacatgtcccagaatgtgtccttggtcactgctgaactgagcaaggacgcccaggcgtcagccgcccctgcagcacccttgcctgagcggaactctctcagtgccatcttcaacaatgtcatgaccctatgtgccatgctgcccctgctgttattcacctacctcaactccttcctgcatcagaggatcccccagtccgtacggatcctgggcagcctggtggccatcctgctggtgtttctgatcactgccatcctggtgaaggtgcagctggatgctctgcccttctttgtcatcaccatgatcaagatcgtgctcattaattcatttggtgccatcctgcagggcagcctgtttggtctggctggccttctgcctgccagctacacggcccccatcatgagtggccagggcctagcaggcttctttgcctccgtggccatgatctgcgctattgccagtggctcggagctatcagaaagtgccttcggctactttatcacagcctgtgctgttatcattttgaccatcatctgttacctgggcctgccccgcctggaattctaccgctactaccagcagctcaagcttgaaggacccggggagcaggagaccaagttggacctcattagcaaaggagaggagccaagagcaggcaaagaggaatctggagtttcagtctccaactctcagcccaccaatgaaagccactctatcaaagccatcctgaaaaatatctcagtcctggctttctctgtctgcttcatcttcactatcaccattgggatgtttccagccgtgactgttgaggtcaagtccagcatcgcaggcagcagcacctgggaacgttacttcattcctgtgtcctgtttcttgactttcaatatctttgactggttgggccggagcctcacagctgtattcatgtggcctgggaaggacagccgctggctgccaagcctggtgctggcccggctggtgtttgtgccactgctgctgctgtgcaacattaagccccgccgctacctgactgtggtcttcgagcacgatgcctggttcatcttcttcatggctgcctttgccttctccaacggctacctcgccagcctctgcatgtgcttcgggcccaagaaagtgaagccagctgaggcagagaccgcaggagccatcatggccttcttcctgtgtctgggtctggcactgggggctgttttctccttcctgttccgggcaattgtgtgacaaaggatggacagaaggactgcctgcctccctccctgtctgcctcctgccccttccttctgccaggggtgatcctgagtggtctggcggttttttcttctaactgacttctgctttccacggcgtgtgctgggcccggatctccaggccctggggagggagcctctggacggacagtggggacattgtgggtttggggctcagagtcgagggacggggtgtagcctcggcatttgcttgagtttctccactcttggctctgactgatccctgcttgtgcaggccagtggaggctcttgggcttggagaacacgtgtgtctctgtgtatgtgtctgtgtgtctgcgtccgtgtctgtcagactgtctgcctgtcctggggtggctaggagctgggtctgaccgttgtatggtttgacctgatatactccattctcccctgcgcctcctcctctgtgttctctccatgtccccctcccaactccccatgcccagttcttacccatcatgcaccctgtacagttgccacgttactgccttttttaaaaatatatttgacagaaaccaggtgccttcagaggctctctgatttaaataaacctttcttgttttttt

SEQ ID NO: 115882 - DNA, 2162 bp, Artificial Sequence
  derived and/or modified sequence
gggctgcgctctccagctgtggctatggccccagccccgagatgaggagggagagaactaggggcccgcaggcctgggaatttccgtcccccaccaagtccggatgctcactccaaagtctcagcaggcccctgagggagggagctgtcagccagggaaaaccgagaacaccatcaccatgacaaccagtcaccagcctcaggacagatacaaagctgtctggcttatcttcttcatgctgggtctgggaacgctgctcccgtggaattttttcatgacggccactcagtatttcacaaaccgcctggacatgtcccagaatgtgtccttggtcactgctgaactgagcaaggacgcccaggcgtcagccgcccctgcagcacccttgcctgagcggaactctctcagtgccatcttcaacaatgtcatgaccctatgtgccatgctgcccctgctgttattcacctacctcaactccttcctgcatcagaggatcccccagtccgtacggatcctgggcagcctggtggccatcctgctggtgtttctgatcactgccatcctggtgaaggtgcagctggatgctctgcccttctttgtcatcaccatgatcaagatcgtgctcattaattcatttggtgccatcctgcagggcagcctgtttggtctggctggccttctgcctgccagctacacggcccccatcatgagtggccagggcctagcaggcttctttgcctccgtggccatgatctgcgctattgccagtggctcggagctatcagaaagtgccttcggctactttatcacagcctgtgctgttatcattttgaccatcatctgttacctgggcctgccccgcctggaattctaccgctactaccagcagctcaagcttgaaggacccggggagcaggagaccaagttggacctcattagcaaaggagaggagccaagagcaggcaaagaggaatctggagtttcagtctccaactctcagcccaccaatgaaagccactctatcaaagccatcctgaaaaatatctcagtcctggctttctctgtctgcttcatcttcactatcaccattgggatgtttccagccgtgactgttgaggtcaagtccagcatcgcaggcagcagcacctgggaacgttacttcattcctgtgtcctgtttcttgactttcaatatctttgactggttgggccggagcctcacagctgtattcatgtggcctgggaaggacagccgctggctgccaagcctggtgctggcccggctggtgtttgtgccactgctgctgctgtgcaacattaagccccgccgctacctgactgtggtcttcgagcacgatgcctggttcatcttcttcatggctgcctttgccttctccaacggctacctcgccagcctctgcatgtgcttcgggcccaagaaagtgaagccagctgaggcagagaccgcaggagccatcatggccttcttcctgtgtctgggtctggcactgggggctgttttctccttcctgttccgggcaattgtgtgacaaaggatggacagaaggactgcctgcctccctccctgtctgcctcctgccccttccttctgccaggggtgatcctgagtggtctggcggttttttcttctaactgacttctgctttccacggcgtgtgctgggcccggatctccaggccctggggagggagcctctggacggacagtggggacattgtgggtttggggctcagagtcgagggacggggtgtagcctcggcatttgcttgagtttctccactcttggctctgactgatccctgcttgtgcaggccagtggaggctcttgggcttggagaacacgtgtgtctctgtgtatgtgtctgtgtgtctgcgtccgtgtctgtcagactgtctgcctgtcctggggtggctaggagctgggtctgaccgttgtatggtttgacctgatatactccattctcccctgcgcctcctcctctgtgttctctccatgtccccctcccaactccccatgcccagttcttacccatcatgcaccctgtacagttgccacgttactgccttttttaaaaatatatttgacagaaaccaggtgccttcagaggctctctgatttaaataaacctttcttgttttttt

SEQ ID NO: 115883 - protein, 503 aa, Artificial Sequence
  derived and/or modified sequence
GEHLSQKGPHVRPCRTNPGSLEAPDSTPGAATARTSGQCLSPGEWGSGSRCHLSWPLAIAHHTLLCPQEPGFAEVLPNLTVQEMDWLVLGELQMALEWAGRPGLRISGHIAARKSCDVLQSVLCGADALIPVQTGAAGSASLTLLGNGSLIYQVQVVGTSSEVVAMTLETKPQRRDQRTVLCHMAGLQPGGHTAVGICPGLGARGAHMLLQNELFLNVGTKDFPDGELRGHVAALPYCGHSARHDTLPVPLAGALVLPPVKSQAAGHAWLSLDTHCHLHYEVLLAGLGGSEQGTVTAHLLGPPGTPGPRRLLKGFYGSEAQGVVKDLEPELLRHLAKGMASLMITTKGSPRGELRGQVHIANQCEVGGLRLEAAGAEGVRALGAPDTASAAPPVVPGLPALAPAKPGGPGRPRDPNTCFFEGQQRPHGARWAPNYDPLCSLCTCQRRTVICDPVVCPPPSCPHPVQAPDQCCPVCPEKQDVRDLPGLPRSRDPGEGGHWRGAL

SEQ ID NO: 115884 - DNA, 1512 bp, Artificial Sequence
  derived and/or modified sequence
ggtgagcacctgtcccagaaaggacctcatgtgagaccatgtcggacaaaccccgggagcttggaagctcccgactcaacacctggggcggccactgccaggacatccgggcagtgcctgtcgcccggcgagtggggctctgggagtaggtgtcacttgagctggcccttggccattgcccaccataccctgctgtgcccccaggaaccagggttcgcggaagtgctccctaatctgacagtccaggaaatggattggcttgttcttggcgagctgcagatggccttagagtgggcaggtagacccgggttgaggataagtggacacatagctgcacgcaagtcttgtgacgttctccagagtgtcctgtgcggggcagatgccctgatccccgtgcagactggagccgcaggttccgctagtttgaccttactcggaaatggaagcttgatttaccaagttcaggtggtggggacatcgagcgaggttgttgccatgacactggagaccaaaccacagcggcgggaccagaggactgtgctgtgccatatggcagggctacagcccggaggccatacagccgtcggcatctgcccaggtctcggcgccaggggcgcccacatgctgctgcagaatgagctgtttttaaacgttggcacaaaggatttcccagacggagagctaagaggacacgtcgcagcactcccgtattgcgggcactctgcgcggcatgacacccttccagttcccttggctggtgccttagtgcttccacccgtgaagtctcaagctgccggtcacgcttggctctccctggatacccattgtcaccttcactacgaagttctgttggcagggctaggcgggtctgagcagggtaccgtaaccgcgcacctgctcggccctcccggtacacctggccccagacgcctcctcaaagggttctacgggtcagaagctcagggggtggtcaaggatctagagcctgaactgctgcgccatcttgccaaggggatggcatctctgatgattaccacaaaagggtccccacggggagaactgaggggtcaggtgcacatcgcaaatcagtgcgaggtcggaggactccgtctcgaagcggctggagcggaaggcgtacgggccctgggtgcacctgatacagcaagcgctgcgccccctgtcgtgcccggcctgcccgcgctggctcctgctaagcccggaggacccggcagaccgcgggatccaaacacctgtttctttgagggccagcagagaccgcacggcgcgaggtgggccccaaactacgaccctctctgttccctttgtacatgtcagcggcggaccgtgatatgcgaccccgtcgtttgcccaccgccgtcatgcccccacccagtgcaggcccccgaccagtgctgtcccgtgtgtcccgaaaagcaagatgttcgcgacctgcctggacttccccgctcacgtgacccaggagagggaggacactggagaggagctctgtag

SEQ ID NO: 115885 - DNA, 1512 bp, Artificial Sequence
  derived and/or modified sequence
ggggagcacctgagccagaagggcccccacgtgcggccctgcaggaccaaccctggcagcctggaggccccagacagcacccctggggccgccacagcccggaccagcggccagtgcctgagccctggagagtggggcagcggcagccgctgccacctgtcctggcccctggccatcgcccaccacaccctgctgtgcccccaggagcccggctttgctgaggtgctgcccaacctgactgtgcaggagatggactggctggtgctgggggagctgcagatggccctggagtgggccggccggcccggcctgcgcatcagcggccacatcgccgccaggaagagctgtgatgtgctgcagagcgtgctgtgtggggctgatgccctgatccctgtgcagacaggagctgctggcagcgccagcctgaccctgctgggcaatggcagcctcatctaccaggtgcaggtggtgggcaccagcagcgaggtggtggccatgaccctggagaccaagccccagaggcgggaccagaggacagtgctgtgccacatggccggcctgcagcccggcggccacacagctgtgggcatctgccccggcctgggcgcccggggggcccacatgctgctgcagaatgagctgttcctgaatgtgggcaccaaggacttcccagatggagagctgcggggccacgtggccgccctgccctactgcggccacagcgcccggcatgacaccctgcctgtgcccctggccggggccctggtgctgccccctgtgaagagccaggccgccggccacgcctggctgagcctggacacccactgccacctgcactatgaggtgctgctggccggcctgggcggcagcgagcagggcaccgtgacagcccacctgctgggccccccaggcaccccaggcccccggcggctgctgaagggcttctacggcagcgaggcccagggcgtggtgaaggacctggagcctgagctgctgcggcacctggccaagggcatggccagcctgatgatcaccaccaagggcagccccagaggagagctgcggggccaggtgcacatcgccaaccagtgtgaggtgggcggcctgcggctggaggccgccggggctgagggcgtgcgggccctgggcgccccagacacagccagcgctgcccctcctgtggtgcccggcctgcctgccctggccccagccaagccaggcggccctggccggccccgggaccccaacacctgcttctttgagggccagcagaggcctcatggagcccgctgggcccccaactatgaccccctgtgcagcctgtgcacctgccagaggagaactgtcatctgtgaccctgtggtgtgccccccacccagctgcccccaccctgtgcaggccccagaccagtgctgccctgtgtgcccagagaagcaggatgtgcgggacctgcccggcctgcccaggagccgggaccctggagagggcggccactggaggggggccctgtag

SEQ ID NO: 115886 - DNA, 1512 bp, Artificial Sequence
  derived and/or modified sequence
ggcgagcacctgagccagaagggcccccacgtgcggccctgccggacaaaccctgggagcctggaggcccccgattccacgcctggcgcagccacagcacgcactagcgggcagtgcctaagccccggcgaatgggggagtggctcgagatgccatctgtcttggcctctggctatcgcccatcacacgctgttgtgtccacaggagccaggtttcgctgaggtgcttccaaacctcaccgtccaggaaatggattggctggtccttggggagttgcagatggctctggaatgggccgggcggcccggactgaggatctctgggcacattgcagcccgtaagtcttgtgacgtccttcagagcgttttgtgtggcgctgacgccctaatccccgtgcaaaccggtgcagccggctcggcttcacttacgctgctaggtaacggtagccttatctaccaggttcaagtggtgggaacttcttctgaggtggtggcaatgactttagaaacaaagccccagaggagggatcagcgtacagtgctgtgccatatggccggccttcagcccggaggacacacggccgtaggcatttgtcctggattaggagcaagaggagctcacatgcttctgcagaatgaactgttcctcaacgtgggaactaaagatttcccggacggcgaactacgtggtcacgtggccgccctgccatattgtggtcacagcgctcgccacgatacattgcccgtcccactggcaggagctttagtgctccccccagtgaagtcccaggccgccggtcacgcctggctttccctggacacccactgtcatttacattatgaggtgctcctcgctggattggggggctcagagcagggcacagtaacagcccatcttttaggcccacccggaactcccggtccacgaaggctgctcaaagggttttacggatcggaagcccaaggggtggtgaaggatctggagcctgaactgctcagacacctggctaagggcatggcttctttgatgattacgaccaaaggctctcccagaggcgagctgagagggcaggtgcacatcgcgaatcagtgtgaagttggggggctgcgactcgaagcagcaggcgcagagggtgtgcgcgcattgggtgccccggatacagccagcgcagcgccgcctgtcgtgcccggccttccagccctggcgcccgcaaagccgggtggacccggccgtcccagagatccaaatacctgcttcttcgaaggtcagcagcggccacacggcgcccgctgggctccgaattatgacccactgtgctctctgtgtacatgtcaaagaagaacagttatctgcgaccctgtggtgtgccccccaccaagctgcccacaccctgtgcaggcccctgatcaatgctgccctgtgtgccctgaaaaacaggacgtgcgggacctaccagggttaccaaggtcgcgtgaccctggtgaaggtggccattggcggggcgcactctag

SEQ ID NO: 115887 - DNA, 1512 bp, Artificial Sequence
  derived and/or modified sequence
ggggaacacttgtctcagaagggccctcatgtacgcccatgccgaaccaatcccggatctctggaagctcccgatagtactccaggcgcagcgacagctcggacaagcggacagtgcctctcacccggtgagtggggtagcggctctcggtgccacctatcatggccactggctatcgctcaccacactttattgtgtccccaggagcccggatttgctgaagttttgcctaacctgaccgtgcaagaaatggactggctcgtgttgggggagttacagatggccctggaatgggcgggtagaccgggactgcgcatctcagggcacattgccgctcggaaaagctgtgacgtgctgcagtctgttttgtgcggagccgacgccctgatacctgtgcaaaccggtgcagccggatcagcttccttgactcttttgggaaatggttcattgatttaccaggtgcaagtggtcggcacttcgtcggaggttgttgctatgactctggagaccaagccccagcgacgcgaccagaggaccgtgctgtgccatatggctggtttacagccgggtgggcacactgcggttggcatctgcccgggactgggcgcaagaggtgcccatatgttgttgcagaatgaactgttcctaaatgtgggcaccaaggactttcctgacggggagctcaggggccatgtcgctgccctgccttactgcggccactccgctcgccacgacacattacccgtgccactggccggtgctctggtgcttccaccggtgaaatcacaggccgctgggcacgcctggttgtctttggacacccattgccatctacactatgaagtgctgctagccggattagggggatctgaacagggcacagtcaccgcacatttactaggaccgcctggcactcccggtcctaggcgcctgctcaaagggttttatggttctgaagcacagggggtggtaaaggatcttgaaccagagctactgcgacatctcgccaaaggcatggccagcctgatgatcactaccaaaggcagcccgaggggcgaattgcgaggccaggtccacatcgctaaccaatgcgaagtcgggggactgcggctcgaggcggcaggtgctgagggggttcgcgcactgggcgcaccagatacagcaagtgctgctcccccagttgtgccgggtcttccagccttggcgcctgcaaagccgggaggacctggacggccacgcgaccccaacacatgcttttttgaaggacagcagaggccccatggggcacggtgggcaccgaattacgaccccctctgctccctttgtacatgtcagagaaggaccgtcatatgtgacccagtcgtgtgcccaccaccgagctgtcctcatccagtgcaggccccagaccagtgctgcccagtctgtcctgagaagcaggatgtgcgagacctgcccggtctaccaaggtcccgggacccaggagaaggtggccattggcgcggagcgctgtag

SEQ ID NO: 115888 - DNA, 2310 bp, Artificial Sequence
  derived and/or modified sequence
ggagagcacctgtctcagaaaggcccacatgtgcggccttgcaggactaacccaggttcccttgaggctccagattctacaccaggggcagctactgcgagaacttcaggccaatgtctcagcccaggtgagtggggatctggctctcgctgccacctgtcttggcctcttgctattgcccatcacaccctgctctgtccccaggaaccaggctttgctgaggtgctgcccaacctgacagtccaggagatggactggctggtgctgggggagctgcagatggccctggagtgggcaggcaggccagggctgcgcatcagtggacacattgctgccaggaagagctgcgacgtcctgcaaagtgtcctttgtggggctgatgccctgatcccagtccagacgggtgctgccggctcagccagcctcacgctgctaggaaatggctccctgatctatcaggtgcaagtggtagggacaagcagtgaggtggtggccatgacactggagaccaagcctcagcggagggatcagcgcactgtcctgtgccacatggctggactccagccaggaggacacacggccgtgggtatctgccctgggctgggtgcccgaggggctcatatgctgctgcagaatgagctcttcctgaacgtgggcaccaaggacttcccagacggagagcttcgggggcacgtggctgccctgccctactgtgggcatagcgcccgccatgacacgctgcccgtgcccctagcaggagccctggtgctaccccctgtgaagagccaagcagcagggcacgcctggctttccttggatacccactgtcacctgcactatgaagtgctgctggctgggcttggtggctcagaacaaggcactgtcactgcccacctccttgggcctcctggaacgccagggcctcggcggctgctgaagggattctatggctcagaggcccagggtgtggtgaaggacctggagccggaactgctgcggcacctggcaaaaggcatggcctccctgatgatcaccaccaagggtagccccagaggggagctccgagggcaggtgcacatagccaaccaatgtgaggttggcggactgcgcctggaggcggccggggccgagggggtgcgggcgctgggggctccggatacagcctctgctgcgccgcctgtggtgcctggtctcccggccctagcgcccgccaaacctggtggtcctgggcggccccgagaccccaacacatgcttcttcgaggggcagcagcgcccccacggggctcgctgggcgcccaactacgacccgctctgctcactctgcacctgccagagacgaacggtgatctgtgacccggtggtgtgcccaccgcccagctgcccacacccggtgcaggctcccgaccagtgctgccctgtttgccctgagaaacaagatgtcagagacttgccagggctgccaaggagccgggacccaggagagggggggcactggagaggtgcactgtgagaaggtgcagtgtccccggctggcctgtgcccagcctgtgcgtgtcaaccccaccgactgctgcaaacagtgtccagtggggtcgggggcccacccccagctgggggaccccatgcaggctgatgggccccggggctgccgttttgctgggcagtggttcccagagagtcagagctggcacccctcagtgcccccttttggagagatgagctgtatcacctgcagatgtggggcaggggtgcctcactgtgagcgggatgactgttcactgccactgtcctgtggctcggggaaggagagtcgatgctgttcccgctgcacggcccaccggcggccagccccagagaccagaactgatccagagctggagaaagaagccgaaggctcttagggagcagccagagggccaagtgaccaagaggatggggcctgagctggggaaggggtggcatcgaggaccttcttgcattctcctgtgggaagcccagtgcctttgctcctctgtcctgcctctactcccacccccactacctctgggaaccacagctccacaagggggagaggcagctgggccagaccgaggtcacagccactccaagtcctgccctgccaccctcggcctctgtcctggaagccccacccctttcctcctgtacataatgtcactggcttgttgggatttttaatttatcttcactcagcaccaagggcccccgacactccactcctgctgcccctgagctgagcagagtcattattggagagttttgtatttattaaaacatttctttttcagtc

SEQ ID NO: 115889 - DNA, 1512 bp, Artificial Sequence
  derived and/or modified sequence
ggcgagcacctgagccagaagggcccccacgtgagaccctgcagaaccaaccccggcagcctggaggcccccgacagcacccccggcgccgccaccgccagaaccagcggccagtgcctgagccccggcgagtggggcagcggcagcagatgccacctgagctggcccctggccatcgcccaccacaccctgctgtgcccccaggagcccggcttcgccgaggtgctgcccaacctgaccgtgcaggagatggactggctggtgctgggcgagctgcagatggccctggagtgggccggcagacccggcctgagaatcagcggccacatcgccgccagaaagagctgcgacgtgctgcagagcgtgctgtgcggcgccgacgccctgatccccgtgcagaccggcgccgccggcagcgccagcctgaccctgctgggcaacggcagcctgatctaccaggtgcaggtggtgggcaccagcagcgaggtggtggccatgaccctggagaccaagccccagagaagagaccagagaaccgtgctgtgccacatggccggcctgcagcccggcggccacaccgccgtgggcatctgccccggcctgggcgccagaggcgcccacatgctgctgcagaacgagctgttcctgaacgtgggcaccaaggacttccccgacggcgagctgagaggccacgtggccgccctgccctactgcggccacagcgccagacacgacaccctgcccgtgcccctggccggcgccctggtgctgccccccgtgaagagccaggccgccggccacgcctggctgagcctggacacccactgccacctgcactacgaggtgctgctggccggcctgggcggcagcgagcagggcaccgtgaccgcccacctgctgggcccccccggcacccccggccccagaagactgctgaagggcttctacggcagcgaggcccagggcgtggtgaaggacctggagcccgagctgctgagacacctggccaagggcatggccagcctgatgatcaccaccaagggcagccccagaggcgagctgagaggccaggtgcacatcgccaaccagtgcgaggtgggcggcctgagactggaggccgccggcgccgagggcgtgagagccctgggcgcccccgacaccgccagcgccgccccccccgtggtgcccggcctgcccgccctggcccccgccaagcccggcggccccggcagacccagagaccccaacacctgcttcttcgagggccagcagagaccccacggcgccagatgggcccccaactacgaccccctgtgcagcctgtgcacctgccagagaagaaccgtgatctgcgaccccgtggtgtgccccccccccagctgcccccaccccgtgcaggcccccgaccagtgctgccccgtgtgccccgagaagcaggacgtgagagacctgcccggcctgcccagaagcagagaccccggcgagggcggccactggagaggcgccctgtag

SEQ ID NO: 115890 - protein, 210 aa, Artificial Sequence
  derived and/or modified sequence
MSAKSAISKEIFAPLDERMLGAVQVKRRTKKKIPFLATGGQGEYLTYICLSVTNKKPTQASITKVKQFEGSTSFVRRSQWMLEQLRQVNGIDPNGDSAEFDLLFENAFDQWVASTASEKCTFFQILHHTCQRYLTDRKPEFINCQSKIMGGNSILHSAADSVTSAVQKASQALNERGERLGRAEEKTEDLKNSAQQFAETAHKLAMKHKC

SEQ ID NO: 115891 - protein, 210 aa, Artificial Sequence
  derived and/or modified sequence
MSAKSAISKEIFAPLDERMLGAVQVKRRTKKKIPFLATGGQGEYLTYICLSVTNKKPTQASITKVKQFEGSTSFVRRSQWMLEQLRQVNGIDPNGDSAEFDLLFENAFDQWVASTASEKCTFFQILHHTCQRYLTDRKPEFINCQSKIMGGNSILHSAADSVTSAVQKASQALNERGERLGRAEEKTEDLKNSAQQFAETAHKVTFRGRK

SEQ ID NO: 115892 - protein, 108 aa, Artificial Sequence
  derived and/or modified sequence
MSACFLDTRRAAFLQCDLPSSYRILTLPESGHCGSAEPVSDAPALLLSGNSILHSAADSVTSAVQKASQALNERGERLGRAEEKTEDLKNSAQQFAETAHKLAMKHKC

SEQ ID NO: 115893 - DNA, 633 bp, Artificial Sequence
  derived and/or modified sequence
atgagcgccaagagcgccatcagcaaggagatcttcgcccccctggacgagagaatgctgggcgccgtgcaggtgaagagaagaaccaagaagaagatccccttcctggccaccggcggccagggcgagtacctgacctacatctgcctgagcgtgaccaacaagaagcccacccaggccagcatcaccaaggtgaagcagttcgagggcagcaccagcttcgtgagaagaagccagtggatgctggagcagctgagacaggtgaacggcatcgaccccaacggcgacagcgccgagttcgacctgctgttcgagaacgccttcgaccagtgggtggccagcaccgccagcgagaagtgcaccttcttccagatcctgcaccacacctgccagagatacctgaccgacagaaagcccgagttcatcaactgccagagcaagatcatgggcggcaacagcatcctgcacagcgccgccgacagcgtgaccagcgccgtgcagaaggccagccaggccctgaacgagagaggcgagagactgggcagagccgaggagaagaccgaggacctgaagaacagcgcccagcagttcgccgagaccgcccacaagctggccatgaagcacaagtgctag

SEQ ID NO: 115894 - DNA, 633 bp, Artificial Sequence
  derived and/or modified sequence
atgagcgccaagagcgccatcagcaaggagatcttcgcccccctggacgagagaatgctgggcgccgtgcaggtgaagagaagaaccaagaagaagatccccttcctggccaccggcggccagggcgagtacctgacctacatctgcctgagcgtgaccaacaagaagcccacccaggccagcatcaccaaggtgaagcagttcgagggcagcaccagcttcgtgagaagaagccagtggatgctggagcagctgagacaggtgaacggcatcgaccccaacggcgacagcgccgagttcgacctgctgttcgagaacgccttcgaccagtgggtggccagcaccgccagcgagaagtgcaccttcttccagatcctgcaccacacctgccagagatacctgaccgacagaaagcccgagttcatcaactgccagagcaagatcatgggcggcaacagcatcctgcacagcgccgccgacagcgtgaccagcgccgtgcagaaggccagccaggccctgaacgagagaggcgagagactgggcagagccgaggagaagaccgaggacctgaagaacagcgcccagcagttcgccgagaccgcccacaaggtgaccttcagaggcagaaagtag

SEQ ID NO: 115895 - DNA, 633 bp, Artificial Sequence
  derived and/or modified sequence
atgtctgctaagagtgccatctccaaagagatttttgcaccccttgacgagagaatgctgggagcagttcaagtcaagaggcggacaaagaagaagatcccgttccttgcaaccgggggccagggagaatacctcacctatatctgcctgagcgtgacgaataagaaacccacgcaggccagcattacaaaagtcaagcagttcgagggctcaacgagctttgtacggcggtcccagtggatgctagaacaacttaggcaggtgaatggaatcgacccaaatggcgattccgcagaattcgacctattgttcgagaatgcatttgaccagtgggtcgcctcgacagcctcagaaaagtgtacattctttcagatcctgcaccacacatgccagagatatctgactgacagaaagcctgagtttatcaattgccagagtaaaatcatgggcggcaactctatattacatagcgcagcagacagcgtgacatccgccgttcaaaaggcctcacaggccctcaacgaaagaggggagcgcctcggaagagccgaagaaaaaactgaggatctgaaaaattctgcgcaacagttcgccgagaccgcccacaagcttgcaatgaagcacaagtgttag

SEQ ID NO: 115896 - DNA, 633 bp, Artificial Sequence
  derived and/or modified sequence
atgtcggccaaaagcgctatcagcaaagagatatttgctccactggacgagcgtatgcttggggccgtccaggtgaagcgacgaactaagaaaaagattccatttctggccacagggggacaaggggaatacctgacctatatatgcctgtccgtcacgaacaagaaaccaacccaggctagcatcactaaagtgaagcagtttgagggctccacatcttttgtcaggagaagtcagtggatgctcgaacaactacgacaagtgaacggtatagatcctaatggggattctgctgaattcgatctgctattcgaaaatgcattcgatcaatgggtcgcctccaccgcatcagaaaagtgtacctttttccaaattctgcaccatacctgccaacggtacctgaccgatcgcaaaccagaatttatcaattgtcaatctaagatcatgggcggcaactcaattttacatagcgctgccgactcggtgacctctgccgtgcagaaggcaagccaggctttgaacgagcgcggggagaggctgggaagagccgaagagaaaaccgaagacctcaagaattccgcacagcagtttgcggaaaccgcgcacaaagtcacattccgggggagaaaatag

SEQ ID NO: 115897 - DNA, 633 bp, Artificial Sequence
  derived and/or modified sequence
atgagcgcaaagtcagcaatctccaaggaaatttttgcccctctggacgagcggatgctgggagcagttcaggtgaagagacggacgaaaaagaagatcccgttcctggccactggaggtcaaggagaatatttgacatacatttgtctgtccgtgacaaataaaaaacctactcaagcaagcatcacaaaagtgaagcagttcgaaggcagcacgtcctttgttcggaggtcacagtggatgttggaacagctgagacaagttaatggtattgaccccaacggagactccgcggaattcgacctgctgttcgaaaacgcatttgatcagtgggtggcctcaaccgccagtgagaaatgtacgttttttcagatactgcaccacacgtgtcagcggtaccttactgatcgcaaaccggaatttatcaattgtcaatccaagatcatgggtggaaattcgatattgcattcagcagccgactctgtgacctctgcggtgcagaaagcctcccaggcactgaatgagcgcggagagcgactcggcagggccgaggagaagaccgaggacttaaagaacagtgcccagcaatttgcggaaacggctcataagctggctatgaagcacaagtgttag

SEQ ID NO: 115898 - DNA, 633 bp, Artificial Sequence
  derived and/or modified sequence
atgagtgcaaagtccgcaattagtaaggagatcttcgccccactcgacgagcgtatgctgggcgcggttcaggttaagaggcgaactaagaaaaagataccctttttggcaaccggaggccaaggagaatacctcacctacatctgtttatcggtcaccaataagaagccgacacaagctagcataacaaaagttaagcagtttgaggggagtacaagtttcgtgcggcgcagccaatggatgcttgagcaacttagacaagtaaatggcatcgacccaaacggggatagtgctgagttcgacctgctctttgaaaacgccttcgatcaatgggttgcatccacagccagtgagaaatgcacattctttcagattttgcaccacacatgccagcggtatctgacagatagaaagcctgagttcatcaactgccaatctaaaatcatgggggggaactccatcctgcactctgccgctgactcagtgacctccgccgtccagaaggcctcacaggcgctgaacgagcgcggcgaaaggctgggtcgggcagaggagaaaactgaggaccttaagaactccgcccagcagttcgcagagaccgctcacaagctagcgatgaagcataaatgttag

SEQ ID NO: 115899 - DNA, 633 bp, Artificial Sequence
  derived and/or modified sequence
atgtctgccaagtccgccatatcaaaggaaattttcgcccccctcgatgagcgaatgctcggcgctgtccaggtgaagcggcgcactaagaagaagatccctttcctagccaccggcggacagggggaatatttaacctatatctgcctttctgtaaccaataagaagcctacacaagccagcatcactaaggtgaagcagttcgagggaagcacctcctttgtccggcgcagccagtggatgctggagcaactgagacaagtgaatggcatcgaccccaacggggatagtgccgaattcgacctgctctttgagaatgctttcgatcagtgggtagccagcaccgctagtgagaaatgcactttcttccaaatcctgcaccatacatgccagaggtacttaacagacaggaagccagaattcatcaactgtcaatccaaaataatgggtggtaacagcatacttcattcagccgcagattctgtgacctcagcagtgcaaaaagcgtcccaagccctgaacgaaaggggtgagagactgggacgggccgaagagaagactgaagacttaaaaaattcagcgcagcagttcgcagagaccgcccacaagctggctatgaagcacaaatgttag

SEQ ID NO: 115900 - DNA, 633 bp, Artificial Sequence
  derived and/or modified sequence
atgtctgctaagtccgccatatccaaagaaatcttcgcacctctggatgagaggatgctcggtgctgttcaggtcaaaagacgaacaaagaagaagattccattcctggccacgggcgggcagggagagtaccttacatacatatgcctttcagtgactaacaagaagcctacacaggcaagcatcaccaaagtgaaacagtttgagggaagtacctccttcgttcgtcgctcgcagtggatgcttgaacagctgcgccaggtcaacggcatcgatcccaacggagactcggcggagttcgatctgctcttcgagaacgcgtttgatcagtgggtcgcttctacagccagcgagaagtgtactttctttcagattcttcatcatacatgtcagcgctatctgaccgaccggaaacccgagtttattaactgccagtcaaagatcatgggcggtaattcgatcttgcattccgctgccgactctgtgacatctgcagttcagaaggcctctcaggcacttaacgagcgcggtgaaagacttggacgggctgaagagaaaacggaagatcttaaaaattcggcccagcagttcgccgaaaccgcgcataagcttgctatgaaacacaaatgctag

SEQ ID NO: 115901 - DNA, 633 bp, Artificial Sequence
  derived and/or modified sequence
atgtcagcaaagtccgcaatttctaaagagatttttgcacccctggatgagagaatgctgggcgctgtccaagtgaagcgacgcaccaagaaaaaaatcccgttcctcgcaacgggcggccagggcgagtacctgacctacatttgtttgtctgtgactaataagaagccgacacaagcctctatcacaaaagtgaaacagtttgaaggcagtacttcttttgtgcgtcgctcccagtggatgttagagcagttgagacaggtgaatggtatagaccctaacggagactcagccgaattcgacctgctctttgaaaatgcatttgaccaatgggttgcatcaacagctagtgagaaatgtacctttttccaaatcctgcaccatacatgtcaaaggtacttaaccgaccgaaaacccgaatttatcaactgccagagcaaaataatgggcgggaactccatcttacactcggccgccgatagtgtgactagcgcggtccagaaagccagtcaggcactgaacgaaaggggcgaaaggcttgggcgggccgaggaaaagacagaggacctgaagaattccgcccaacaattcgccgaaactgcacacaaactggccatgaaacataagtgctag

SEQ ID NO: 115902 - DNA, 633 bp, Artificial Sequence
  derived and/or modified sequence
atgtctgccaagagcgccatcagcaaggagatctttgcccccctggatgagaggatgctgggcgctgtgcaggtgaagaggaggaccaagaagaagatccccttcctggccaccggcggccagggcgagtacctgacctacatctgcctgtctgtgaccaacaagaagcccacccaggccagcatcaccaaggtgaagcagtttgagggcagcaccagctttgtgcggcgcagccagtggatgctggagcagctgcggcaggtgaatggaattgaccccaacggggacagcgctgagtttgacctgctgtttgaaaatgcctttgaccagtgggtggccagcacagccagcgagaagtgcaccttcttccagatcctgcaccacacctgccagcgctacctgacagacaggaagccagagttcatcaactgccagagcaagatcatgggcggcaacagcatcctgcacagcgctgctgacagcgtgaccagcgctgtgcagaaggccagccaggccctgaatgaaagaggagagcggctgggccgggcagaggagaagacagaggacctgaagaacagcgcccagcagtttgctgagacagcccacaagctggccatgaagcacaagtgctag

SEQ ID NO: 115903 - DNA, 633 bp, Artificial Sequence
  derived and/or modified sequence
atgtctgccaagagcgccatcagcaaggagatctttgcccccctggatgagaggatgctgggcgctgtgcaggtgaagaggaggaccaagaagaagatccccttcctggccaccggcggccagggcgagtacctgacctacatctgcctgtctgtgaccaacaagaagcccacccaggccagcatcaccaaggtgaagcagtttgagggcagcaccagctttgtgcggcgcagccagtggatgctggagcagctgcggcaggtgaatggaattgaccccaacggggacagcgctgagtttgacctgctgtttgaaaatgcctttgaccagtgggtggccagcacagccagcgagaagtgcaccttcttccagatcctgcaccacacctgccagcgctacctgacagacaggaagccagagttcatcaactgccagagcaagatcatgggcggcaacagcatcctgcacagcgctgctgacagcgtgaccagcgctgtgcagaaggccagccaggccctgaatgaaagaggagagcggctgggccgggcagaggagaagacagaggacctgaagaacagcgcccagcagtttgctgagacagcccacaaggtgaccttccggggcaggaagtag

SEQ ID NO: 115904 - DNA, 633 bp, Artificial Sequence
  derived and/or modified sequence
atgagcgccaagagcgccatcagcaaggagatcttcgcccccctggacgagagaatgctgggagcagtgcaggtgaagcgacgaactaagaagaaaattccctttctcgcaactggtggacagggcgagtatctaacgtacatttgtctctctgtgaccaacaaaaagcctacccaagctagcattaccaaggtcaagcagttcgaaggatctacctcattcgtccgacggtcacaatggatgttggaacagctgagacaggtaaatggcattgatccaaacggagactccgccgagttcgatttgctcttcgaaaacgccttcgatcagtgggtggcctcgaccgctagcgagaagtgtacatttttccaaatactgcatcatacatgccagagatatctgaccgatagaaagcctgaatttataaactgtcaatccaaaataatgggcggaaattccatcctgcacagtgctgcagattccgtaacctcggctgttcagaaggcatcccaggcattgaatgaacggggagagcggctcggcagagccgaagagaaaacggaagaccttaagaatagcgcccagcagtttgccgagaccgcacacaagttggccatgaagcataagtgctag

SEQ ID NO: 115905 - DNA, 633 bp, Artificial Sequence
  derived and/or modified sequence
atgagcgccaagagcgccatcagcaaggagatcttcgcccccctggacgagcgcatgcttggtgctgtgcaggtcaaacgccgaacaaagaagaagatccccttcttagcgacaggcggtcagggcgagtaccttacctacatttgtctgagtgtgaccaacaagaaaccaactcaggcatccatcacaaaagtcaaacaatttgaaggcagcactagtttcgtgcgaagatcacagtggatgctggagcaacttcgccaggttaacgggatcgacccaaacggcgactctgccgagtttgacttactgttcgaaaatgccttcgaccaatgggttgccagtactgcctctgagaaatgcaccttttttcaaattcttcaccacacgtgccagagatatctgaccgaccgcaagccagaattcattaactgccagtccaagatcatgggcggaaactcaatcctgcatagcgcagcagattcggtgacatcggctgtccaaaaggccagccaggccctgaatgaaaggggggaacggctaggcagagccgaagagaaaacagaagatttgaagaattccgctcagcagttcgcagagaccgctcataaagtcactttccggggccgcaaatag

SEQ ID NO: 115906 - DNA, 633 bp, Artificial Sequence
  derived and/or modified sequence
atgagcgccaagagcgccatcagcaaggagatcttcgcccccctggatgaacggatgctgggggcggtacaggtgaagcgccgcacaaagaagaaaatcccctttctcgccactggtggacagggtgagtatcttacttacatttgtctatccgtgaccaataaaaagccgacgcaagcttccattacaaaggtcaagcagttcgaaggctccacttcctttgtgcgtcgaagtcagtggatgctagagcaattgcgtcaggtcaacggaattgatcccaatggcgacagcgccgagtttgacttgctgttcgagaatgcctttgatcagtgggttgcaagtaccgcctccgaaaagtgcaccttttttcagatcttgcaccacacgtgtcagcgatacctgacagaccgcaaacccgaattcattaattgccagtctaagatcatggggggcaactctatcctacatagcgctgccgactccgtgacctctgccgtacaaaaggcatcacaagccctgaatgaaagaggtgagcggcttggtagggcagaggaaaagacagaagatctgaaaaactcagctcagcagttcgcggagaccgcccacaaactggccatgaaacacaagtgttag

SEQ ID NO: 115907 - DNA, 633 bp, Artificial Sequence
  derived and/or modified sequence
atgagcgccaagagcgccatcagcaaggagatcttcgcccccctggatgagcgaatgctgggagccgttcaggtcaaaagacgtactaagaaaaaaatcccattcctggccacagggggacagggggaatatttgacttacatatgtctgtccgtgaccaacaaaaagcctactcaggccagcataacgaaagtgaaacagtttgagggctcaacatcatttgtgcggcgctctcaatggatgttggaacaactccggcaagtcaatggcatcgaccccaatggcgatagcgcagaattcgacctgctcttcgagaacgcattcgaccagtgggtcgcttctacagctagcgaaaagtgtaccttctttcaaatcctgcatcacacctgtcagcgctacttaacggacagaaaacctgagtttattaactgccaaagtaagatcatggggggcaactccatactccattctgccgccgactcagtaacgagtgctgtgcagaaagcttcacaagcacttaacgagaggggtgagaggcttggtcgagccgaagaaaagacggaagacttgaaaaattctgcccagcaatttgctgagaccgcacacaagcttgcaatgaagcacaaatgctag

SEQ ID NO: 115908 - DNA, 633 bp, Artificial Sequence
  derived and/or modified sequence
atgagcgccaagagcgccatcagcaaggagatcttcgcccccctggatgagcgcatgctgggcgccgtgcaagtgaagaggaggaccaagaagaagatccctttcctagccacagggggacagggagagtacttaacatatatctgcttgagtgtcacaaataaaaagcccacccaagccagcattaccaaagtgaaacaatttgaagggtccacaagtttcgtgcgcaggtcccaatggatgctggaacagctgaggcaggtcaacggcatagacccaaatggtgattccgccgagtttgacctactattcgagaatgcatttgatcagtgggttgccagcactgcttcggagaagtgcactttcttccagatcctgcaccacacttgccagcgttaccttacggaccgtaaacccgaattcatcaactgtcagtccaaaataatgggcggcaactccatcctgcactccgcagccgacagtgttacgagcgccgtccagaaagccagtcaggccttgaacgaacggggtgaaaggctcggacgagctgaagagaaaacagaagacttgaaaaactcagcccagcagttcgctgagaccgctcataaattggctatgaagcataaatgctag

SEQ ID NO: 115909 - DNA, 633 bp, Artificial Sequence
  derived and/or modified sequence
atgagcgccaagagcgccatcagcaaggagatcttcgcccccctggatgagaggatgctgggcgccgttcaggtgaaaaggaggacaaaaaaaaaaatccccttcctcgccacaggaggtcagggggaatacctgacttacatctgtctgagcgtgaccaataaaaagcccacccaggcttctatcactaaagttaagcagtttgaagggtctactagtttcgtcaggcggtcccaatggatgctggaacaactgcgccaagtgaatggtattgatcccaatggggactccgccgagttcgatctgctgttcgagaacgctttcgatcaatgggtggctagcacagcatcagagaagtgcacattctttcagattctacaccatacctgccagagataccttaccgaccgcaagcccgagttcatcaactgccagtctaagatcatgggcgggaactccatactgcatagcgccgctgatagcgtgacttctgcagtacagaaggctagtcaggccctcaatgaacggggagagcggctgggacgagctgaggagaaaacagaagatctgaagaatagcgcccagcagtttgccgagacagctcacaagttggccatgaaacacaagtgctag

SEQ ID NO: 115910 - DNA, 633 bp, Artificial Sequence
  derived and/or modified sequence
atgagcgccaagagcgccatcagcaaggagatcttcgcccccctggacgaacgaatgcttggagcagttcaggtgaagcgaagaaccaagaagaaaatcccctttctggccaccggaggccagggagagtatcttacttacatttgtctgtctgtgacaaacaagaaacctacacaagccagcattacgaaggttaagcagtttgaaggttccacatcattcgtgcggcggtcccagtggatgcttgagcagctaagacaggtgaacggtatagacccaaatggcgacagtgccgagtttgatctgctgtttgaaaacgcctttgatcagtgggttgcttctacagcctctgaaaaatgcacattttttcagatcctacaccacacctgccagagatacctaactgaccgcaaacctgaattcattaactgccagtccaaaattatgggaggtaatagtatcctgcattcagctgcggactcagtcacgagtgccgtacagaaggccagccaggctctgaacgaacgaggtgaaagactgggaagggccgaggagaaaaccgaggaccttaagaacagtgcccaacagttcgctgaaaccgcacacaaattggccatgaagcacaaatgctag

SEQ ID NO: 115911 - DNA, 633 bp, Artificial Sequence
  derived and/or modified sequence
atgtcagctaagagcgcgatcagcaaagagatattcgccccactagatgagcggatgctgggcgcagtacaggtcaagcgtcgtaccaagaaaaaaattccgtttctggctactggcggacaaggtgagtaccttacctatatttgtctctccgtgaccaataaaaagccaacacaggcctccatcacaaaagtgaagcagtttgagggttctacctcttttgtcagacgatcccagtggatgctcgagcagctgcggcaggtgaatggcatagatcccaacggcgatagtgccgagtttgatcttctgttcgagaatgcctttgaccagtgggtggcaagtaccgcttcagagaagtgcacattttttcaaatcctccatcacacttgtcagcgatacctgactgacagaaaacctgagttcataaattgtcaaagcaagatcatgggcggtaacagcattctacattcagctgccgacagtgtgaccagtgcagtccagaaggcatcacaggctttgaatgaacgtggagagcgcttgggtcgcgcagaggaaaagacagaggacttaaagaactccgctcagcagtttgccgagacagcccacaagctggccatgaagcacaagtgttag

SEQ ID NO: 115912 - DNA, 633 bp, Artificial Sequence
  derived and/or modified sequence
atgtccgccaagagtgcaataagtaaggaaattttcgcccctctggacgagcgcatgcttggcgctgtgcaggtgaagcgacgcacaaaaaagaaaattccctttctcgccaccggaggtcaaggcgaatacttgacctatatctgcctgtccgtgaccaacaagaagcccacccaggcctctataacaaaagtgaagcaattcgagggaagtacaagctttgtgcggagatcacaatggatgctggaacagctgcggcaggtaaatggcatagacccgaacggggatagcgccgagtttgacctcctgttcgagaacgcattcgaccagtgggtcgcgagtacagcttctgagaagtgcacttttttccagatcctccatcacacatgtcagcggtacctgaccgataggaaaccagagtttatcaattgtcaaagcaagattatgggcggaaatagtatattacattctgccgcagatagcgtgaccagcgctgtgcagaaagcctcccaggctctcaacgaaagaggcgagcgcctgggcagagctgaggaaaaaactgaggacctcaagaacagtgcgcagcaattcgccgagacagcacataaggtgacgttccgagggaggaagtag

SEQ ID NO: 115913 - DNA, 633 bp, Artificial Sequence
  derived and/or modified sequence
atgagcgccaagagtgctattagtaaagagatattcgccccacttgacgaacgaatgctgggggcagtacaagtgaaacgtcggacgaagaaaaagatccccttcttagccacaggcggtcaaggcgagtatctgacttatatttgcctcagcgtgactaacaaaaaacccacacaggcttcaataaccaaagtgaagcagtttgagggctcaacctccttcgtgagacgctctcaatggatgctggagcaactgcgacaggtgaacggtatcgatccaaacggagactccgccgagtttgatctgctctttgaaaacgcctttgaccagtgggtcgcgagcaccgccagcgagaaatgcacgttctttcagatattgcaccatacgtgccagagatacctcacagatcggaagcccgagttcattaactgccagagcaaaataatgggcggaaattccattctgcattccgctgctgattcagtcacttccgcggtgcagaaagcttcacaggccctcaacgaaaggggcgagcgccttggacgagcagaagaaaagaccgaggacctgaagaactctgctcaacagttcgctgagactgctcacaagctcgcaatgaagcacaagtgctag

SEQ ID NO: 115914 - DNA, 633 bp, Artificial Sequence
  derived and/or modified sequence
atgagtgccaagagcgcgatttcaaaggagatattcgcgccactggatgaacgcatgctgggcgcagtgcaggttaagcggaggactaaaaagaagattccattcttggcaaccggcggacagggggaatatctcacatacatctgcctgtccgtcaccaacaaaaaaccaacacaagctagtattaccaaggtcaagcaattcgaaggcagcactagttttgtcagacggtcccaatggatgttagagcagctccggcaagtcaacggaattgatccgaacggggatagtgcagagttcgaccttctgttcgaaaacgcttttgatcaatgggtggctagcactgcgtccgaaaagtgtacgtttttccagattctgcatcatacttgccagcggtacctcactgatcggaagcccgagtttattaactgccaaagtaagatcatgggcggaaattcaattctacactcagccgctgactctgtgacttccgccgtccaaaaggcatcacaagccctaaacgagcgcggagagcgtctgggacgggcagaggagaaaaccgaggatcttaagaactctgcacagcagtttgcggagacagcccataagcttgcaatgaagcataaatgctag

SEQ ID NO: 115915 - DNA, 633 bp, Artificial Sequence
  derived and/or modified sequence
atgtctgcaaaatccgccatctcaaaggagatcttcgcccctctcgacgagcggatgctaggggcagtacaagtgaaacggagaaccaagaagaagattccattccttgcaacgggaggacagggagaatacttgacatatatttgcctctcagtgaccaataagaaacctacacaggcgtcaattaccaaggtgaaacagttcgaggggtcaacaagctttgtccggcgttcacaatggatgctagagcagctaagacaggtcaacggaatagaccctaatggagattcagctgaatttgacctgttatttgaaaatgcttttgaccagtgggttgcatcgaccgcgagtgagaaatgtaccttctttcagatattgcatcacacatgtcagcgctatttaacagatagaaagccggagttcatcaactgtcagtctaagatcatgggtggcaattccatccttcactccgcagctgattctgttacctccgccgttcagaaggcttcccaggctctgaatgagcggggtgagagactgggccgagctgaggaaaaaactgaggacctgaaaaattctgctcaacaatttgcagagacagctcataagctggctatgaaacataagtgttag

SEQ ID NO: 115916 - DNA, 633 bp, Artificial Sequence
  derived and/or modified sequence
atgtctgcaaagtccgccatctctaaggaaatttttgcaccactcgatgagagaatgctgggtgctgtacaggtaaaacggaggactaaaaaaaaaatcccgtttcttgctacagggggtcagggagagtaccttacctatatttgtctcagcgtcactaataagaagcctacccaagcaagcatcaccaaggtgaaacagtttgagggcagtacgtcctttgtgcggagatctcaatggatgctggagcagctccgacaggtgaacgggattgaccccaatggggatagtgcagagttcgacctgttatttgagaatgcctttgaccaatgggtcgcatcaacagccagcgagaaatgcacattcttccagatactgcaccacacttgccaaagatacctaacagacaggaaaccagaatttatcaattgccagagtaagataatgggcggaaactcaatcctgcacagtgccgctgatagtgtaacctccgctgtccagaaggcctcgcaagctctcaatgagcgaggggaacgcctgggcagggcggaggagaagactgaggacctgaaaaacagcgcccaacagtttgcagagaccgcgcataaactggcaatgaagcacaaatgttag

SEQ ID NO: 115917 - DNA, 633 bp, Artificial Sequence
  derived and/or modified sequence
atgagcgccaaatctgccatctctaaggagattttcgctccactagatgagagaatgctcggcgctgtgcaggtgaagcgacggaccaagaaaaagattccattcctcgccaccggaggacaaggtgagtatctaacctatatttgtctctccgtgactaacaagaagccaacacaggcttcaattactaaggtcaagcagtttgaggggtccacgtctttcgttagaaggagccaatggatgctggaacagctgcgccaagtgaacgggatcgacccgaatggtgactccgctgagtttgacctgttattcgagaatgcgttcgaccagtgggtggctagcactgcctccgagaaatgtacattcttccaaatcctccaccacacgtgccagcgctaccttactgatcggaagccggagttcatcaactgtcaaagcaagatcatgggcggaaactccatcctgcattcagctgcagacagcgtgaccagtgccgtgcagaaggcatcccaagccctgaacgagcggggagagagactcggcagagccgaggagaagacggaagacctgaagaattccgcccagcaattcgcagaaaccgctcataaactggcaatgaagcataaatgttag

SEQ ID NO: 115918 - DNA, 4132 bp, Artificial Sequence
  derived and/or modified sequence
gaggcctggggcgggtcgcgggtcccggcccccagcccccagcccctagccgctgctctttgccccgggccagggcgctcgggctcgcccacggcggcactgagcatgctcagaggcggccgcgcgggcaggtttgcttcgcaggcgctcgcactcggcggcgggcgggcgcgcggctgcagctggagctccagcgcccggagttggagttgccgggagtttccccccaacccctcccttttcgcgcgcggcagcaggagccggcgcgggagccgcgagcggcggcgagccagcacccgggccggctaagccttgtccggagcccggagccccgcgcggggcagccccccggggaggagcctcgtgctctgggacgcgtgccgcgcactggcacggcaggggcgcgagccaggctgcacgattcactgcgtgctgtcctcacttgttctacaatgagtgccaaatctgctatcagcaaggaaatttttgcacctcttgatgaaaggatgctgggagctgtccaagtcaagaggaggacaaagaaaaagattcctttcttggcaactggaggtcaaggcgaatatttaacttatatctgcctgtcagtgacaaacaagaaacccacacaggcgtccatcacaaaggtcaaacagtttgaaggctccacatcatttgttcggagatcacagtggatgctcgagcagcttcgccaggttaatggtatcgatcctaatggggattcggcagagtttgatttgttgtttgaaaatgcttttgaccagtgggtagccagcacagcgtcagaaaaatgcaccttcttccagatcctccaccatacctgccagaggtacctcacggacaggaagccagagtttattaactgccaatccaaaattatgggaggaaacagcatcctccattcagctgctgacagcgtgaccagcgcagtgcagaaggcaagccaggccttgaatgagcgtggagagcgattaggccgagcagaggagaagacagaagacctgaagaacagcgcccagcagtttgcagaaactgcgcacaagcttgccatgaagcacaaatgttgagaaactgcctatcctggtgactcttcttaagagaaactgaagagtttgttcagcagtttttacaagaattcgggacctccgcttgcttctttttttccaatatttggacacttagagtggtttttgttttttcttttcagatgttaatgtgaaagaaagggtgttgcatttttacatttccctaatgatcttgctaataaatgctacaatagcatcagcttcattttgggtttttgcctcctcccactgtgtgtatgtgtgtatatgtatgttttgaatatgttttctttattaaaaaatattttttgtagtttgaatatgaaatttggaccaaatgataaactgcgctgagtctaaactggcaacatgtatttttttctctgatattaagcaggaaggcattttaatgtggtgacatcagatgttatttttcctagatgaaaataaaagtcaagcagtgattagtttcactcactgtcctagctacacttaatttgaagattaaaattctacattgtggaaaacaattgaatttattgggaaaaacagcagtcttagattttgctccttgcatagtaatcttttgcatgaaccatcaccagcgttcaaaaaaaaaaaaaaatcagaatcgcagatagaaatctctttcctgagttacagtttaaatactcttgctacttgtatccagggtgtttacttggaattatcatatgaagggtaaaaatttgagagtaaagccctaaagaaaagcctacctaaaaccctctgtgtactcacagatgtttctcttgtcactgtcatagtgatggtcgctggtatggaaaagtgcttatatttttatcaaaaaattgatttgtccaggtaaaggtctgtgtcaatgataatgtgaacaagtagtacatttaaaatgtttgtcttgtctttttacagtcatgcctattttagagacaccttcataatgtccttgggagagggcctttagtttcttggtatctggattttggaggttttgatgttgtttttgctatctatttatttaatgtaatttaatatgtgagtttcttgacaaattgcatttcatggcaattgcaccttgcctggtctgatataaaacaccacaatcacaaacctttacattgcagtcagtttcaatacagttggtcacacacctcgtgattttctattactcaagataataaggggcttagggtctagaagttctgtttcctagagggttaaaatgctaaacataaaaaaagctgtgctttttttgtgaaactaggagacaagctgcacatctcagacacattgtaagcctaccactgcagcgcattgatttttaagctgcctgaatcttcaggacccctatctattccatcctatccattttgctgattgagtcgatatgtattgcagcctcttacataggagcataagatgacttttggattgttaatactgatttaaatagctgaagttctcctaataaagcattcccaaggagagagaaagtttgtctactgggggtaaaaatatcagatggtgcacattaaaagggagatgagatttgtcggagacagatttcagaatccttttagatgatccaattcaagaaaaccctctataaaatttaataaactgtataagttaactataatattttatactttctttttggtgtcttaaaaatttaaagaagcgaggaacatgccatttggtgagtaccgttggaagctattttaatttctaggaaaagccccaaatatcactccaaatagattttgtttgcagatctcagttcagaatgcacacacacacacacacacacacacacacacacacagagatgtatttatctttccaaattggattctggtttcagagatagagagttggtataaataattgaaaggataaatctaaaaccccctgacagtccgccaaattcaagaacagaagtggttgccaactctctaacaacaatgtttgggaagctgattccaaagtagctgaggatgaggtcataagcatactgtgaaacccaagattcttcttccctggtagaattacaatagttactcttgataaatataagtattccatgtcttgccctctttcctcactctctgcttatccttttagacctaagtttcattggaaatagcctgaattagaagaaagcccatccgaatctttattagccccctctaatgattagtttccaggctgcgttcatacctttgacctctcagtgtcaaagtcctacctaggcctccccacaacagagagggccgtaacagcaatccctgcccctcctttacctcccagcctcttgcagaggagcccagtgataacacatgtgaagttctttgctgtcctcttgtagaaggtgctgcagtgcaaagtattaatacggtcttagacaaaataactgtcatgatttgggaccagtttggttgagcttgtcagaagacatttcatttgtttcatttctgcacttctctatgaattttgggatactatatttctgtgaaggacttattgtatagacaactcaaaaaggaaagaaactttccagtattaccacttcttcctggaatatagctgtagtatttctcactagtattattagatacctgtgtacagaaagtatgcagttattcaggttaatgtttcatattaaagaatgtatttgtaaaatgtaacatgatcagtagttaccttttttcaagctctgaagaagttcagattacgtgttagacttaagttacagtgaaaactgttttaatactacttttgtggctagcaaaggttgtgcatctatttaaaattatttacaggatgctctaaataaggggcattaaagataggtttagctcttaattttagaaattgtgacactactgatgtctgtcatacagttattcttcagaagttctctgagatgtcaaatataatttttgtttaattcagagataagtaacacctgctctattgattcactattacaacaaaccctaattttgtcattaaatattttaactctg

SEQ ID NO: 115919 - DNA, 686 bp, Artificial Sequence
  derived and/or modified sequence
gggcgcgagccaggctgcacgattcactgcgtgctgtcctcacttgttctacaatgagtgccaaatctgctatcagcaaggaaatttttgcacctcttgatgaaaggatgctgggagctgtccaagtcaagaggaggacaaagaaaaagattcctttcttggcaactggaggtcaaggcgaatatttaacttatatctgcctgtcagtgacaaacaagaaacccacacaggcgtccatcacaaaggtcaaacagtttgaaggctccacatcatttgttcggagatcacagtggatgctcgagcagcttcgccaggttaatggtatcgatcctaatggggattcggcagagtttgatttgttgtttgaaaatgcttttgaccagtgggtagccagcacagcgtcagaaaaatgcaccttcttccagatcctccaccatacctgccagaggtacctcacggacaggaagccagagtttattaactgccaatccaaaattatgggaggaaacagcatcctccattcagctgctgacagcgtgaccagcgcagtgcagaaggcaagccaggccttgaatgagcgtggagagcgattaggccgagcagaggagaagacagaagacctgaagaacagcgcccagcagtttgcagaaactgcgcacaaggtgacctttcggggaagaaaataa

SEQ ID NO: 115920 - DNA, 4021 bp, Artificial Sequence
  derived and/or modified sequence
ctcccttttcgcgcgcggcagcaggagccggcgcgggagccgcgagcggcggcgagccagcacccgggccggctaagccttgtccggagcccggagccccgcgcggggcagccccccggggaggagcctcgtgctctgggacgcgtgccgcgcactggcacggcaggggcgcgagccaggctgcacgtttcctgtttagaaagttctgctccttcataaggaccttgaagtactaggaggaaaggtgctttgtgtgtggagttttccatgaagtgcagtcccaactaaaaggctgcgttaaagattcactgcgtgctgtcctcacttgttctacaatgagtgccaaatctgctatcagcaaggaaatttttgcacctcttgatgaaaggatgctgggagctgtccaagtcaagaggaggacaaagaaaaagattcctttcttggcaactggaggtcaaggcgaatatttaacttatatctgcctgtcagtgacaaacaagaaacccacacaggcgtccatcacaaaggtcaaacagtttgaaggctccacatcatttgttcggagatcacagtggatgctcgagcagcttcgccaggttaatggtatcgatcctaatggggattcggcagagtttgatttgttgtttgaaaatgcttttgaccagtgggtagccagcacagcgtcagaaaaatgcaccttcttccagatcctccaccatacctgccagaggtacctcacggacaggaagccagagtttattaactgccaatccaaaattatgggaggaaacagcatcctccattcagctgctgacagcgtgaccagcgcagtgcagaaggcaagccaggccttgaatgagcgtggagagcgattaggccgagcagaggagaagacagaagacctgaagaacagcgcccagcagtttgcagaaactgcgcacaagcttgccatgaagcacaaatgttgagaaactgcctatcctggtgactcttcttaagagaaactgaagagtttgttcagcagtttttacaagaattcgggacctccgcttgcttctttttttccaatatttggacacttagagtggtttttgttttttcttttcagatgttaatgtgaaagaaagggtgttgcatttttacatttccctaatgatcttgctaataaatgctacaatagcatcagcttcattttgggtttttgcctcctcccactgtgtgtatgtgtgtatatgtatgttttgaatatgttttctttattaaaaaatattttttgtagtttgaatatgaaatttggaccaaatgataaactgcgctgagtctaaactggcaacatgtatttttttctctgatattaagcaggaaggcattttaatgtggtgacatcagatgttatttttcctagatgaaaataaaagtcaagcagtgattagtttcactcactgtcctagctacacttaatttgaagattaaaattctacattgtggaaaacaattgaatttattgggaaaaacagcagtcttagattttgctccttgcatagtaatcttttgcatgaaccatcaccagcgttcaaaaaaaaaaaaaaatcagaatcgcagatagaaatctctttcctgagttacagtttaaatactcttgctacttgtatccagggtgtttacttggaattatcatatgaagggtaaaaatttgagagtaaagccctaaagaaaagcctacctaaaaccctctgtgtactcacagatgtttctcttgtcactgtcatagtgatggtcgctggtatggaaaagtgcttatatttttatcaaaaaattgatttgtccaggtaaaggtctgtgtcaatgataatgtgaacaagtagtacatttaaaatgtttgtcttgtctttttacagtcatgcctattttagagacaccttcataatgtccttgggagagggcctttagtttcttggtatctggattttggaggttttgatgttgtttttgctatctatttatttaatgtaatttaatatgtgagtttcttgacaaattgcatttcatggcaattgcaccttgcctggtctgatataaaacaccacaatcacaaacctttacattgcagtcagtttcaatacagttggtcacacacctcgtgattttctattactcaagataataaggggcttagggtctagaagttctgtttcctagagggttaaaatgctaaacataaaaaaagctgtgctttttttgtgaaactaggagacaagctgcacatctcagacacattgtaagcctaccactgcagcgcattgatttttaagctgcctgaatcttcaggacccctatctattccatcctatccattttgctgattgagtcgatatgtattgcagcctcttacataggagcataagatgacttttggattgttaatactgatttaaatagctgaagttctcctaataaagcattcccaaggagagagaaagtttgtctactgggggtaaaaatatcagatggtgcacattaaaagggagatgagatttgtcggagacagatttcagaatccttttagatgatccaattcaagaaaaccctctataaaatttaataaactgtataagttaactataatattttatactttctttttggtgtcttaaaaatttaaagaagcgaggaacatgccatttggtgagtaccgttggaagctattttaatttctaggaaaagccccaaatatcactccaaatagattttgtttgcagatctcagttcagaatgcacacacacacacacacacacacacacacacacacagagatgtatttatctttccaaattggattctggtttcagagatagagagttggtataaataattgaaaggataaatctaaaaccccctgacagtccgccaaattcaagaacagaagtggttgccaactctctaacaacaatgtttgggaagctgattccaaagtagctgaggatgaggtcataagcatactgtgaaacccaagattcttcttccctggtagaattacaatagttactcttgataaatataagtattccatgtcttgccctctttcctcactctctgcttatccttttagacctaagtttcattggaaatagcctgaattagaagaaagcccatccgaatctttattagccccctctaatgattagtttccaggctgcgttcatacctttgacctctcagtgtcaaagtcctacctaggcctccccacaacagagagggccgtaacagcaatccctgcccctcctttacctcccagcctcttgcagaggagcccagtgataacacatgtgaagttctttgctgtcctcttgtagaaggtgctgcagtgcaaagtattaatacggtcttagacaaaataactgtcatgatttgggaccagtttggttgagcttgtcagaagacatttcatttgtttcatttctgcacttctctatgaattttgggatactatatttctgtgaaggacttattgtatagacaactcaaaaaggaaagaaactttccagtattaccacttcttcctggaatatagctgtagtatttctcactagtattattagatacctgtgtacagaaagtatgcagttattcaggttaatgtttcatattaaagaatgtatttgtaaaatgtaacatgatcagtagttaccttttttcaagctctgaagaagttcagattacgtgttagacttaagttacagtgaaaactgttttaatactacttttgtggctagcaaaggttgtgcatctatttaaaattatttacaggatgctctaaataaggggcattaaagataggtttagctcttaattttagaaattgtgacactactgatgtctgtcatacagttattcttcagaagttctctgagatgtcaaatataatttttgtttaattcagagataagtaacacctgctctattgattcactattacaacaaaccctaattttgtcattaaatattttaactctgtgatga

SEQ ID NO: 115921 - DNA, 1970 bp, Artificial Sequence
  derived and/or modified sequence
ccaggctgcacggtaggaccggggcgaggggagccaggcggtcagggcggaggccaagcccgggagatgcggttgcagccgccacggctgttggggcgcctggcgctccgtccgaggcgggtggctgtgaggccaggggagtaggcaggctcccagagagattcttccaagttggcgggtggcgggagagggggccgcgcgccccggcgcagctgctttgtgcgcgcagagagggactcgtgtccctggttctctccaaccctgggacccgttgtgcgggcagtattgggcaagccgcagaacggagcgatttcctccgagaaagttgaggatggagcctttttttccgcaccgtccccgcgatggcatgggccccgagaatgctgccccgaggctcccagtgtgggggagctcggggtcgctgcgcctctagcttgagcgcagaaatccgcgaatcactccgatcttcgcgaactctggcatcttctaggaaaatcattactgccaaaactgaggcgagcttttctggcgggcacggcaccctgcccccagggcgctggccctgggcgatgccccctttccgatctcaggcttggtcaagggcgccaggttccgaattcgcgcttgccgtgcacgccggcatcgagcctcaccaacaccgccgggcaacgtggctggagtagattcactgcgtgctgtcctcacttgttctacaatgagtgccaaatctgctatcagcaaggaaatttttgcacctcttgatgaaaggatgctgggagctgtccaagtcaagaggaggacaaagaaaaagattcctttcttggcaactggaggtcaaggcgaatatttaacttatatctgcctgtcagtgacaaacaagaaacccacacaggcgtccatcacaaaggtcaaacagtttgaaggctccacatcatttgttcggagatcacagtggatgctcgagcagcttcgccaggttaatggtatcgatcctaatggggattcggcagagtttgatttgttgtttgaaaatgcttttgaccagtgggtagccagcacagcgtcagaaaaatgcaccttcttccagatcctccaccatacctgccagaggtacctcacggacaggaagccagagtttattaactgccaatccaaaattatgggaggaaacagcatcctccattcagctgctgacagcgtgaccagcgcagtgcagaaggcaagccaggccttgaatgagcgtggagagcgattaggccgagcagaggagaagacagaagacctgaagaacagcgcccagcagtttgcagaaactgcgcacaagcttgccatgaagcacaaatgttgagaaactgcctatcctggtgactcttcttaagagaaactgaagagtttgttcagcagtttttacaagaattcgggacctccgcttgcttctttttttccaatatttggacacttagagtggtttttgttttttcttttcagatgttaatgtgaaagaaagggtgttgcatttttacatttccctaatgatcttgctaataaatgctacaatagcatcagcttcattttgggtttttgcctcctcccactgtgtgtatgtgtgtatatgtatgttttgaatatgttttctttattaaaaaatattttttgtagtttgaatatgaaatttggaccaaatgataaactgcgctgagtctaaactggcaacatgtatttttttctctgatattaagcaggaaggcattttaatgtggtgacatcagatgttatttttcctagatgaaaataaaagtcaagcagtgattagtttcactcactgtcctagctacacttaatttgaagattaaaattctacattgtggaaaacaattgaatttattgggaaaaacagcagtcttagattttgctccttgcatagtaatcttttgcatgaaccatcaccagcgttcaaaaaaaaaaaaaaa

SEQ ID NO: 115922 - DNA, 1223 bp, Artificial Sequence
  derived and/or modified sequence
attacgcttccctagggactgggtgggagagaataggatcgattcactgcgtgctgtcctcacttgttctacaatgagtgccaaatctgctatcagcaaggaaatttttgcacctcttgatgaaaggatgctgggagctgtccaagtcaagaggaggacaaagaaaaagattcctttcttggcaactggaggtcaaggcgaatatttaacttatatctgcctgtcagtgacaaacaagaaacccacacaggcgtccatcacaaaggtcaaacagtttgaaggctccacatcatttgttcggagatcacagtggatgctcgagcagcttcgccaggttaatggtatcgatcctaatggggattcggcagagtttgatttgttgtttgaaaatgcttttgaccagtgggtagccagcacagcgtcagaaaaatgcaccttcttccagatcctccaccatacctgccagaggtacctcacggacaggaagccagagtttattaactgccaatccaaaattatgggaggaaacagcatcctccattcagctgctgacagcgtgaccagcgcagtgcagaaggcaagccaggccttgaatgagcgtggagagcgattaggccgagcagaggagaagacagaagacctgaagaacagcgcccagcagtttgcagaaactgcgcacaagcttgccatgaagcacaaatgttgagaaactgcctatcctggtgactcttcttaagagaaactgaagagtttgttcagcagtttttacaagaattcgggacctccgcttgcttctttttttccaatatttggacacttagagtggtttttgttttttcttttcagatgttaatgtgaaagaaagggtgttgcatttttacatttccctaatgatcttgctaataaatgctacaatagcatcagcttcattttgggtttttgcctcctcccactgtgtgtatgtgtgtatatgtatgttttgaatatgttttctttattaaaaaatattttttgtagtttgaatatgaaatttggaccaaatgataaactgcgctgagtctaaactggcaacatgtatttttttctctgatattaagcaggaaggcattttaatgtggtgacatcagatgttatttttcctagatgaaaataaaagtcaagcagtgattagtttcactcactgtcctagctacacttaatttgaagattaaaattctacattg

SEQ ID NO: 115923 - DNA, 1311 bp, Artificial Sequence
  derived and/or modified sequence
tttcctgtttagaaagttctgctccttcataaggaccttgaagtactaggaggaaaggtgctttgtgtgtggagttttccatgaagtgcagtcccaactaaaaggctgcgttaaaggctagagtagtgcagtggcgtgatctcagctcactccagcctctgcctcccgggctcaagtgacccacctgcctcagcctcccaagtagctgggacaacagatgtgagccaccacacccagattcactgcgtgctgtcctcacttgttctacaatgagtgccaaatctgctatcagcaaggaaatttttgcacctcttgatgaaaggatgctgggagctgtccaagtcaagaggaggacaaagaaaaagattcctttcttggcaactggaggtcaaggcgaatatttaacttatatctgcctgtcagtgacaaacaagaaacccacacaggcgtccatcacaaaggtcaaacagtttgaaggctccacatcatttgttcggagatcacagtggatgctcgagcagcttcgccaggttaatggtatcgatcctaatggggattcggcagagtttgatttgttgtttgaaaatgcttttgaccagtgggtagccagcacagcgtcagaaaaatgcaccttcttccagatcctccaccatacctgccagaggtacctcacggacaggaagccagagtttattaactgccaatccaaaattatgggaggaaacagcatcctccattcagctgctgacagcgtgaccagcgcagtgcagaaggcaagccaggccttgaatgagcgtggagagcgattaggccgagcagaggagaagacagaagacctgaagaacagcgcccagcagtttgcagaaactgcgcacaagcttgccatgaagcacaaatgttgagaaactgcctatcctggtgactcttcttaagagaaactgaagagtttgttcagcagtttttacaagaattcgggacctccgcttgcttctttttttccaatatttggacacttagagtggtttttgttttttcttttcagatgttaatgtgaaagaaagggtgttgcatttttacatttccctaatgatcttgctaataaatgctacaatagcatcagcttcattttgggtttttgcctcctcccactgtgtgtatgtgtgtatatgtatgttttgaatatgttttctttattaaaaaatattttttgtagtttgaatatgaaatttggaccaaatgataaactgcgctgagtctaaactggcaacatgtatttttttctctgatattaagcaggaaggcattttaatg

SEQ ID NO: 115924 - protein, 205 aa, Artificial Sequence
  derived and/or modified sequence
MGAARLLPNLTLCLQLLILCCQTQYVRDQGAMTDQLSRRQIREYQLYSRTSGKHVQVTGRRISATAEDGNKFAKLIVETDTFGSRVRIKGAESEKYICMNKRGKLIGKPSGKSKDCVFTEIVLENNYTAFQNARHEGWFMAFTRQGRPRQASRSRQNQREAHFIKRLYQGQLPFPNHAEKQKQFEFVGSAPTRRTKRTRRPQPLT

SEQ ID NO: 115925 - DNA, 618 bp, Artificial Sequence
  derived and/or modified sequence
atgggcgccgccagactgctgcccaacctgaccctgtgcctgcagctgctgatcctgtgctgccagacccagtacgtgagagaccagggcgccatgaccgaccagctgagcagaagacagatcagagagtaccagctgtacagcagaaccagcggcaagcacgtgcaggtgaccggcagaagaatcagcgccaccgccgaggacggcaacaagttcgccaagctgatcgtggagaccgacaccttcggcagcagagtgagaatcaagggcgccgagagcgagaagtacatctgcatgaacaagagaggcaagctgatcggcaagcccagcggcaagagcaaggactgcgtgttcaccgagatcgtgctggagaacaactacaccgccttccagaacgccagacacgagggctggttcatggccttcaccagacagggcagacccagacaggccagcagaagcagacagaaccagagagaggcccacttcatcaagagactgtaccagggccagctgcccttccccaaccacgccgagaagcagaagcagttcgagttcgtgggcagcgcccccaccagaagaaccaagagaaccagaagaccccagcccctgacctag

SEQ ID NO: 115926 - DNA, 618 bp, Artificial Sequence
  derived and/or modified sequence
atgggtgccgctcgcctgctgcccaatctcacactctgcctgcagctactaatattatgctgtcagacccagtacgtgagggatcagggcgccatgaccgaccagctgagccgccgtcaaatacgggagtatcagttgtactctaggacctcaggcaaacacgtacaggtcactggacgtagaatttccgctacagcggaagatggaaacaagttcgccaaattgatcgtggaaactgacacattcggcagccgagtgcggataaagggtgccgagtccgagaagtacatctgtatgaataagcggggtaagctaattggaaagcccagcggtaagtcaaaagattgtgtgtttaccgagatcgttctggagaacaactacaccgccttccagaacgctcgacatgagggctggttcatggcattcaccaggcagggcaggcccagacaagcttctagatcccggcagaaccagcgtgaagcccacttcatcaagagactgtaccagggccagctcccgtttccgaatcatgccgaaaaacagaaacagtttgagtttgtggggtctgctcccactcgacgcacaaagagaactagacgtccacagcctttaacttag

SEQ ID NO: 115927 - DNA, 618 bp, Artificial Sequence
  derived and/or modified sequence
atgggcgccgcccggctgctgcccaacctgaccctgtgcctgcagctgctgatcctgtgctgccagacccagtatgtgcgggaccagggcgccatgacagaccagctgagccggcggcagatccgggagtaccagctgtacagcaggaccagcggcaagcacgtgcaggtgacaggccgccgcatcagcgccacagcagaagatggcaacaagtttgccaagctgattgtggagacagacaccttcggcagccgggtgcgcatcaagggagctgagagcgagaagtacatctgcatgaacaagaggggcaagctgattggcaagcccagcggcaagagcaaggactgtgtgttcacagaaattgtgctggagaacaactacacagccttccagaatgcccggcatgagggctggttcatggccttcacccggcagggccggccccggcaggccagccgcagccggcagaaccagcgggaggcccacttcatcaagaggctgtaccagggccagctgcccttccccaaccacgccgagaagcagaagcagtttgaatttgtgggcagcgcccccaccaggaggaccaagaggacccggcggccccagcccctgacctag

SEQ ID NO: 115928 - DNA, 618 bp, Artificial Sequence
  derived and/or modified sequence
atgggcgccgcccggctgctgcccaacctgaccctgtgcctgcagctgctgatcctgtgttgtcagacacagtatgtccgggatcagggggccatgacagaccagctttcacggagacaaatacgggagtatcagctgtacagcagaacttctgggaagcatgtgcaggtaaccgggaggaggatcagcgccactgccgaagacggcaataaattcgccaaactgatcgtggagactgatactttcggcagtcgcgtgcgtattaaaggcgccgagtctgaaaagtacatctgcatgaacaagcggggaaagctcatcggaaaacctagtgggaaatctaaggactgtgtttttacggagatcgttctcgaaaacaactacacggcctttcagaatgcccgccacgaaggctggttcatggcctttacccgccagggccgaccaagacaggcctcccgttcccggcagaatcagcgagaggcccatttcattaaacgcctgtaccaaggccagcttccattccctaaccatgcagagaagcaaaagcagtttgagttcgttgggagtgctcccacgcgccgaactaaaagaacgcgccgacctcagccgctcacctag

SEQ ID NO: 115929 - DNA, 618 bp, Artificial Sequence
  derived and/or modified sequence
atgggagcagccagactgctgccaaacctgacattatgcctccagctcctgatcctctgttgccagacccagtatgtgcgcgatcagggcgcaatgaccgatcagctgagccgaaggcagatccgagagtaccaactctacagccgcacgtcaggaaagcatgttcaggtcaccggcagacgcatatcggcaacagctgaggacggcaataagttcgcgaagctgatcgtggaaactgatactttcggctccagagttcgcattaaaggcgctgagagcgagaagtacatttgtatgaacaagcgtggcaagctaattggtaagcctagtggaaagtccaaagattgtgtattcacagaaatcgtgttggagaacaactataccgccttccaaaatgctaggcatgaaggctggtttatggcttttacacggcagggacgaccacgccaggcctcccggtcaaggcagaatcaaagggaggcccatttcatcaagcgcctgtaccaggggcagcttcccttcccgaaccatgctgaaaagcagaaacagttcgaatttgtgggtagcgcccctactcggcgaacaaagcgtaccaggaggccccagcccctgacgtag

SEQ ID NO: 115930 - DNA, 618 bp, Artificial Sequence
  derived and/or modified sequence
atgggtgcggcacggctcttacctaatttaaccttatgtctgcagctcctgatcttatgttgccagactcagtacgttagggaccaaggggctatgacagatcagctctctaggcgtcaaatcagagagtaccagctctacagtcgcacatcaggaaaacacgttcaagtgacaggccgaaggatcagcgctacagcggaagatgggaacaaattcgctaaactcatcgttgagacagacactttcggctcacgtgtcagaatcaaaggggccgagagcgagaaatacatctgtatgaataagagagggaaactgatcggtaaaccatcaggtaagagtaaagactgcgttttcacagaaatcgtattggaaaataactatactgctttccagaatgctcgccatgaggggtggttcatggccttcacccggcaagggcgacccaggcaggcgtctagaagcaggcagaaccagcgtgaagcccattttatcaaaagactgtaccagggccaacttccattccccaatcatgccgaaaagcagaaacagttcgaattcgtcggttcagcccccacccgtcggactaagcgcaccagacgtccacagccacttacatag

SEQ ID NO: 115931 - DNA, 618 bp, Artificial Sequence
  derived and/or modified sequence
atgggcgcagcgagattactacccaacctgactttatgcctgcaactgctcattctttgctgtcagacccagtacgttagggaccagggggctatgaccgaccagttatcgcgccgtcagattcgcgaataccagttgtactccagaacttccggaaaacacgtccaggtcacgggccgtcggatcagtgccactgcagaggatgggaacaaatttgctaaactcatagtggaaacagataccttcggttcacgcgtccgcatcaagggagccgaatccgaaaaatacatttgtatgaataagagaggaaaattgatcggcaagccttctggaaagagcaaggactgtgtctttacggaaatagtactggagaataactacaccgcctttcagaatgcacgtcacgagggttggttcatggcgttcacacgccagggcagaccacgccaagcatccaggagtcgtcaaaatcaaagggaggcccatttcattaagagactttatcagggacagctcccctttccgaatcacgcagagaaacagaagcagttcgaattcgtgggcagcgccccaacacgaagaacaaaaaggacccggaggccccaacctctcacgtag

SEQ ID NO: 115932 - DNA, 1706 bp, Artificial Sequence
  derived and/or modified sequence
accagagaccccagccccacttgacacctgcggctcacccttggggaggtggggcgccagacctgagtgcaggagacgcagacctggaagggctccccctccctgacctgccacacatcgagtttgtctgcgtcgagtttggccagtctgtgagggtcaggaatagagcaggagacagcagggccacctccttcagaaggcccccaccgctccatccctgcactgggtggcccaggagagactggcagcccagagggcacagcgcgcacgcccccacccgcatctgctttgcagcctcactggccaggaaggtggacacctcatacctcagtctcccaattacgccctcctcctccccctcctcctccctcttttctctcctcctcctcccctttctctcctcctcgcccccctgaaaacctgtggctcggagagaccttggcttctctgggactctacccctggggacttcccacatctgctcctgagcttgggggcaggggggcaaccgcctgaggaacctctccagcgatgggagccgcccgcctgctgcccaacctcactctgtgcttacagctgctgattctctgctgtcaaactcagtacgtgagggaccagggcgccatgaccgaccagctgagcaggcggcagatccgcgagtaccaactctacagcaggaccagtggcaagcacgtgcaggtcaccgggcgtcgcatctccgccaccgccgaggacggcaacaagtttgccaagctcatagtggagacggacacgtttggcagccgggttcgcatcaaaggggctgagagtgagaagtacatctgtatgaacaagaggggcaagctcatcgggaagcccagcgggaagagcaaagactgcgtgttcacggagatcgtgctggagaacaactatacggccttccagaacgcccggcacgagggctggttcatggccttcacgcggcaggggcggccccgccaggcttcccgcagccgccagaaccagcgcgaggcccacttcatcaagcgcctctaccaaggccagctgcccttccccaaccacgccgagaagcagaagcagttcgagtttgtgggctccgcccccacccgccggaccaagcgcacacggcggccccagcccctcacgtagtctgggaggcagggggcagcagcccctgggccgcctccccacccctttcccttcttaatccaaggactgggctggggtggcgggaggggagccagatccccgagggaggaccctgagggccgcgaagcatccgagcccccagctgggaaggggcaggccggtgccccaggggcggctggcacagtgcccccttcccggacgggtggcaggccctggagaggaactgagtgtcaccctgatctcaggccaccagcctctgccggcctcccagccgggctcctgaagcccgctgaaaggtcagcgactgaaggccttgcagacaaccgtctggaggtggctgtcctcaaaatctgcttctcggatctccctcagtctgcccccagcccccaaactcctcctggctagactgtaggaagggacttttgtttgtttgtttgtttcaggaaaaaagaaagggagagagaggaaaatagagggttgtccactcctcacattccacgacccaggcctgcaccccacccccaactcccagccccggaataaaaccattttcctgc

SEQ ID NO: 115933 - RNA, 618 nt, Artificial Sequence
  derived and/or modified sequence
augggugcggcacggcucuuaccuaauuuaaccuuaugucugcagcuccugaucuuauguugccagacucaguacguuagggaccaaggggcuaugacagaucagcucucuaggcgucaaaucagagaguaccagcucuacagucgcacaucaggaaaacacguucaagugacaggccgaaggaucagcgcuacagcggaagaugggaacaaauucgcuaaacucaucguugagacagacacuuucggcucacgugucagaaucaaaggggccgagagcgagaaauacaucuguaugaauaagagagggaaacugaucgguaaaccaucagguaagaguaaagacugcguuuucacagaaaucguauuggaaaauaacuauacugcuuuccagaaugcucgccaugaggggugguucauggccuucacccggcaagggcgacccaggcaggcgucuagaagcaggcagaaccagcgugaagcccauuuuaucaaaagacuguaccagggccaacuuccauuccccaaucaugccgaaaagcagaaacaguucgaauucgucgguucagcccccacccgucggacuaagcgcaccagacguccacagccacuuacauag

SEQ ID NO: 115934 - RNA, 618 nt, Artificial Sequence
  derived and/or modified sequence
augggcgcagcgagauuacuacccaaccugacuuuaugccugcaacugcucauucuuugcugucagacccaguacguuagggaccagggggcuaugaccgaccaguuaucgcgccgucagauucgcgaauaccaguuguacuccagaacuuccggaaaacacguccaggucacgggccgucggaucagugccacugcagaggaugggaacaaauuugcuaaacucauaguggaaacagauaccuucgguucacgcguccgcaucaagggagccgaauccgaaaaauacauuuguaugaauaagagaggaaaauugaucggcaagccuucuggaaagagcaaggacugugucuuuacggaaauaguacuggagaauaacuacaccgccuuucagaaugcacgucacgaggguugguucauggcguucacacgccagggcagaccacgccaagcauccaggagucgucaaaaucaaagggaggcccauuucauuaagagacuuuaucagggacagcuccccuuuccgaaucacgcagagaaacagaagcaguucgaauucgugggcagcgccccaacacgaagaacaaaaaggacccggaggccccaaccucucacguag

SEQ ID NO: 115935 - protein, 894 aa, Artificial Sequence
  derived and/or modified sequence
MIFWSFVAGVVTFYCSLGPDSLLPNIFFTIKYKPKQLGLQELFPQGHSCAVCGKVKCKRHRPSLLLENYQPWLDLKISSKVDASLSEVLELVLENFVYPWYRDVTDDESFVDELRITLRFFASVLIRRIHKVDIPSIITKKLLKAAMKHIEVIVKARQKVKNTEFLQQAALEEYGPELHVALRSRRDELHYLRKLTELLFPYILPPKATDCRSLTLLIREILSGSVFLPSLDFLADPDTVNHLLIIFIDDSPPEKATEPASPLVPFLQKFAEPRNKKPSVLKLELKQIREQQDLLFRFMNFLKQEGAVHVLQFCLTVEEFNDRILRPELSNDEMLSLHEELQKIYKTYCLDESIDKIRFDPFIVEEIQRIAEGPYIDVVKLQTMRCLFEAYEHVLSLLENVFTPMFCHSDEYFRQLLRGAESPTRNSKLNRGSLSLDDFRNTQKRGESFGISRIGSKIKGVFKSTTMEGAMLPNYGVAEGEDDFIEEGIVVMEDDSPVEAVSTPNTPRNLAAWKISIPYVDFFEDPSSERKEKKERIPVFCIDVERNDRRAVGHEPEHWSVYRRYLEFYVLESKLTEFHGAFPDAQLPSKRIIGPKNYEFLKSKREEFQEYLQKLLQHPELSNSQLLADFLSPNGGETQFLDKILPDVNLGKIIKSVPGKLMKEKGQHLEPFIMNFINSCESPKPKPSRPELTILSPTSENNKKLFNDLFKNNANRAENTERKQNQNYFMEVMTVEGVYDYLMYVGRVVFQVPDWLHHLLMGTRILFKNTLEMYTDYYLQCKLEQLFQEHRLVSLITLLRDAIFCENTEPRSLQDKQKGAKQTFEEMMNYIPDLLVKCIGEETKYESIRLLFDGLQQPVLNKQLTYVLLDIVIQELFPELNKVQKEVTSVTSWM

SEQ ID NO: 115936 - protein, 766 aa, Artificial Sequence
  derived and/or modified sequence
MEEIKPASASCVSKEKPSKVSDLISRFEGGSSLSNYSDLKKESAVNLNAPRTPGRHGLTTTPQQKLLSQHLPQRQGNDTDKTQGAQTCVANGVMAAQNQMECEEEKAATLSSDTSIQASEPLLDTHIVNGERDETATAPASPTTDSCDGNASDSSYRTPGIGPVLPLEERGAETETKVQERENGESPLELEQLDQHHEMKETNEQKLHKIANELLLTERAYVNRLDLLDQVFYCKLLEEANRGSFPAEMVNKIFSNISSINAFHSKFLLPELEKRMQEWETTPRIGDILQKLAPFLKMYGEYVKGFDNAMELVKNMTERIPQFKSVVEEIQKQKICGSLTLQHHMLEPVQRIPRYEMLLKDYLRKLPPDSLDWNDAKKSLEIISTAASHSNSAIRKMENLKKLLEIYEMLGEEEDIVNPSNELIKEGQILKLAARNTSAQERYLFLFNNMLLYCVPKFSLVGSKFTVRTRVGIDGMKIVETQNEEYPHTFQVSGKERTLELQASSAQDKEEWIKALQETIDAFHQRHETFRNAIAKDNDIHSEVSTAELGKRAPRWIRDNEVTMCMKCKEPFNALTRRRHHCRACGYVVCWKCSDYKAQLEYDGGKLSKVCKDCYQIISGFTDSEEKKRKGILEIESAEVSGNSVVCSFLQYMEKSKPWQKAWCVIPKQDPLVLYMYGAPQDVRAQATIPLLGYVVDEMPRSADLPHSFKLTQSKSVHSFAADSEELKQKWLKVILLAVTGETPGGPNEHPATLDDHPEPKKKSEC

SEQ ID NO: 115937 - protein, 878 aa, Artificial Sequence
  derived and/or modified sequence
MNFKRVKPNIFLLNQSRLIISICEIMSTDQGSSTCPKIALVPPCSTSSTTTLVGENVSEEEAQGINGNRPAKHSAASPKPQVPPKPLHLQNSPSSNIHQTPRHKALPSAKPRMEEIKPASASCVSKEKPSKVSDLISRFEGGSSLSNYSDLKKESAVNLNAPRTPGRHGLTTTPQQKLLSQHLPQRQGNDTDKTQGAQTCVANGVMAAQNQMECEEEKAATLSSDTSIQASEPLLDTHIVNGERDETATAPASPTTDSCDGNASDSSYRTPGIGPVLPLEERGAETETKVQERENGESPLELEQLDQHHEMKETNEQKLHKIANELLLTERAYVNRLDLLDQVFYCKLLEEANRGSFPAEMVNKIFSNISSINAFHSKFLLPELEKRMQEWETTPRIGDILQKLAPFLKMYGEYVKGFDNAMELVKNMTERIPQFKSVVEEIQKQKICGSLTLQHHMLEPVQRIPRYEMLLKDYLRKLPPDSLDWNDAKKSLEIISTAASHSNSAIRKMENLKKLLEIYEMLGEEEDIVNPSNELIKEGQILKLAARNTSAQERYLFLFNNMLLYCVPKFSLVGSKFTVRTRVGIDGMKIVETQNEEYPHTFQVSGKERTLELQASSAQDKEEWIKALQETIDAFHQRHETFRNAIAKDNDIHSEVSTAELGKRAPRWIRDNEVTMCMKCKEPFNALTRRRHHCRACGYVVCWKCSDYKAQLEYDGGKLSKVCKDCYQIISGFTDSEEKKRKGILEIESAEVSGNSVVCSFLQYMEKSKPWQKAWCVIPKQDPLVLYMYGAPQDVRAQATIPLLGYVVDEMPRSADLPHSFKLTQSKSVHSFAADSEELKQKWLKVILLAVTGETPGGPNEHPATLDDHPEPKKKSEC

SEQ ID NO: 115938 - DNA, 8242 bp, Artificial Sequence
  derived and/or modified sequence
attatccttgctgggctgggaagtggggaaagcaggggagcctgtgctgggtgagattatctgcaatggaccgggttaatgggaggcttgctttggctcgctggaagaacaaatgaagggagttttacttcaaccatttgtgacttctggccaagaggaataaattcagcttttataaggcagcagtacctgtccaaagatcgctttagttccaccttgctccacaagcagcacaaccacactggttggtgagaatgtatctgaagaagaggctcagggaataaatgggaacaggccagcaaaacactcagctgcaagtccaaagccacaagtgcctccaaagccattacacctgcagaattcaccttcgtccaatatacaccaaacccccaggcataaagctttacctagtgcaaaaccaaggatggaggaaattaaacctgcctctgcttcttgtgtctcaaaagaaaaacccagtaaggtatcagatctcatcagtcgctttgaaggaggcagctcattatcaaattatagtgatttgaagaaagagtctgctgtgaacctaaatgctcctagaaccccaggaaggcatggattgacaaccacacctcaacaaaaactcctctcccagcacttgccacagaggcagggaaatgatacagataagactcagggtgcacagacttgtgtggccaacggtgtaatggcagcacaaaaccagatggaatgtgaggaggagaaagctgccactcttagctcagatacttctattcaagcttctgaacccttgcttgatacgcacatagtgaatggagaaagagatgaaactgccacagctcctgcatcacccacaacagacagctgtgatggaaatgcttctgacagtagctacaggactccaggcataggcccagtgctccccctagaagaaagaggggcagaaacagaaaccaaggtacaagagagggaaaatggggaaagccctctggaactggagcagctggaccagcaccatgagatgaaggagactaatgagcaaaaacttcacaaaatagccaatgaacttttgcttactgaaagagcttatgtcaaccgacttgacctcttagatcaggtattttattgcaaactgttggaagaagcaaaccgaggctcgtttccagcagagatggtgaataaaatcttttctaatatttcatcaataaatgccttccatagtaaattcctcttgccagagctggagaaacgaatgcaagaatgggaaactactcctagaattggagacatccttcagaaattggcaccattccttaagatgtatggagaatatgtgaaaggatttgataatgcaatggaattggttaaaaacatgacagaacgtattccccagttcaaatcagtggttgaagaaattcagaaacagaaaatctgtgggagcttaactttgcagcatcacatgctagaacctgttcagcggattccccggtatgagatgctccttaaggactatctaaggaaattgcctcctgattccctggactggaatgatgctaaaaaatcacttgaaattatatctacagcagcaagccattctaatagtgcaataaggaaaatggagaacctaaagaaactcttagagatttatgaaatgttgggagaagaagaagacattgtaaacccttcaaatgaactaataaaagaaggacagatcctcaaactagctgctcggaacacttcagcacaagaacgctaccttttcttattcaacaacatgttgctgtactgtgtgcccaaattcagcttggtaggctctaaattcacagttcgaaccagggttggcattgatggaatgaaaattgtagagactcaaaatgaagaatatccacatactttccaggtgtctgggaaagagagaacactggaactgcaggccagttctgcgcaagacaaagaagaatggatcaaggcccttcaagaaaccatcgatgcttttcatcaaaggcatgaaaccttcagaaatgcaattgcaaaggataatgacattcactcagaggtttctactgctgagctagggaaaagagccccaagatggatccgagataatgaagtgacaatgtgtatgaaatgtaaagaacctttcaatgcactgacacgaaggaggcatcattgtcgagcatgtggatatgtggtttgttggaaatgctccgactacaaagctcaacttgaatatgatggtggtaaattgagcaaagtttgtaaagactgttatcaaatcataagtggattcacagacagtgaagaaaagaaaagaaaaggaattttagagattgaatcagcagaagtatctggaaacagtgtggtgtgcagctttcttcagtatatggagaagtcaaaaccttggcagaaagcttggtgtgtgatccccaagcaagaccctcttgtgctgtacatgtatggtgccccccaggacgtcagagcccaggccaccattccacttctgggctatgtggtggatgaaatgccaaggagcgcagacctgccacacagtttcaaactgacccagtctaagtccgtgcacagctttgctgcagacagtgaggaactgaagcagaagtggctgaaagtcatccttttagctgtcacaggtgagacaccaggtggtccaaatgagcatccagccaccttggatgatcatcctgaacctaagaaaaaatcagaatgctgaactcctccaggaccagccatggtgtggaggtctcaggacttacagctcaagacattcccagctcttcttacacatctgctagcactttatgttgaaaaatataggcccataaatgcatcttttgaggactattttcctatgtttatgtactcttagtgaaattagtgtgcagagtcattctaccgataaagttttgaaataatgtgaaaactggagcattttttgagctattccttgaatatgtgcttttttgtcttgaagaaatggtgtatcaattgattctgtcaccgtcaggttagaatgagcacttccatttaagaaatcctttcatgtcttcttctctttcacatgtaggacctggaacagtttgaaagatatacctccatgttgccaaaatagatccatggtgaaaaatacagggacagttgaggctattgtattaacttatttaatttagtttataaatctctagctgcataaatgatgtctgttcttttaaaacaaaagaaaaaggacaaattgttggtgttcagatttccgatttataaagaaaagataacttgtttttgtagaaatactcctaagaatgtcttaagtatatagcaattatgtatatatagtattaaatatatatattatacatgcttttaggttcacattcatctctaatttattttttaaatataaagcatggtttatcgtggaattgagcaatgttctaaactgaagaaatgttttggtgatttatgttttgctgattggcatttgagggtattgatatttttataataagcggtaatttatgtggcatgggatatatttgtgaattccaacagtacttttaaagtaccattttttgtttctgtgcctatttaaaacagtgcctctcttagaaggtgctattaatataagatgagggttcagttaatgcttcagtcttgattattctaagattaaagtgcattttggtcactgggacagtcaaagtcatacaggttattttaccgtttacaatcctataattattgcagtagttaacatcagcatgtacaaacattttcaccaaaacccaaactttatgagacacctgaccttttacagaactaggatatgtggaaaccacatttatcgtaatgtttttcttttccgtaagataatcgagcatggttaaataaggtctctatataatgaacacttaagataactgtatgggccttttcctttgtcggaatgaaacaaaatccacatgtgataacctatgtttggggtgggggctggtcacatgattccttgtcatgaaggctgctcttcactcttttgtacttgtgattaaaatctcacactaagtttactatttaacttaatcctttttctcaaattaaacctttttttatactgtcataccccaaacattgtcactttttaatgtaccagtctgctagaaatctacaagaatgatcccactatctttagtatgtaaggattacaccttagatatagaatagaatttgagactgccacacatttattcaggccttgttactttaagaaatatcttattttttccaccccaaaggagcaagtgaaccaattattgctgacataataggttcccttcctccataaaaggattatcagccatgatcattaacattaaaccaaatagatggagccaaaaagagataaaagtagcttcttaggccctattaaatcagggaaagactagaagaaaatttacattgcttctcttttttaatggccagcggggtatgtgtgtgatgtatactcagagtggttttttggaaaattaaactgtagctatagatgatgctttggttttcttaatctcaagaaaagagaagcaatggaaatacagaatgattaactggggaagaggacttttgtaagtgtgactagaacaatggtaatgtatgggccaatgggaagatttataagtcagattatttttgaaaactatttttaaaagcaagaagactacactttccctaccaaaacagaagtaacatggacacacttaagttttggctcaataaatatcaatgttatttaacttagatcattgaaagaatactcatgtaaagataatgtttattatcatgctcttaacagtcattatctttaattttttaaatgagaagcattaatactagaagagaatttctggttatccggtcaccatattcactttccaccccacattcttcagctaaacgcaaagagaagcagtgaaacagccttacccgcttctctcttattaaagaatcactgatgtttttactcaatgaaaggtaaagtaatacccttagccatttattaaacaattcaaccaagagacctcaaagtgtgattgatgataagaataatcaatgccttttcccttccaacatacttgagcagtcatgacaacctaaaaatatcattggttgctttcccattaaaaccaacgttccctgtgggtcttaattctttattttcactcatttggtgctttccaagtcatcttttctttaaagtgcccttcctccaaactttaaaaagtacttccttgacaaaatttctattcattataaaacatttcaatattttaagcttaaattttgcttttgctgaaagcctaccatttggcgtgttaagtatgaaatatagtgcagacttttatcttggttttaagtggggctcaataaaaaacaccagccacttttgtaataatggcatcacagtgtcatcatgtatgcaagcaataaaactctttagggtatggttttatactgaaaatttaatatgaaggccccttcccacaagaatatagataattattaactttctagatgtgatacggtaattcgaattgcagagtataaggaagggaaatgggaaggggcatcattccttggattttaaataactatcaagaacatttttactttaacaaagaaaatggatagaaaaagcacattttgttttccctgaagtttaatttgacatcaggtttgtgtacttatcttcactaggtgacttaacttaccccaatttttttaaaaattattaaactttttacagaaactaaccttttaaatgtaccctttccccatatatatatacgcacacgtttggattttttttttttaagaacacttgttctagttataaatatataaagaaaacgataaagtttgtggtactgcagggttgttaaagattctttgatgccttctaaaaacttttgtcaaaaatacttttgagttcacaattctgttttacttttccttgtccttactttttggaaacagggtggttgcttttatttgttttctggttatattcaaagccttaagttcttaatctgagcatattgtctgtgataaatttctgatgatctttctggactagatacaacctgagtagcaagcaccaaccggagcaagtaaacttctagggaacaagcgtcttgggttttataggtatctttgctataatgcagaatagattaatgaagatttcctatatcatatgatatttgtgttagtgggtctaagattaagcacatgatatttataagctaaaattaactcaaaagtcaagaatgtcttaatgttttcattcttaaattttgtattctccaagaatgtattagtatatgaactgtggccaaccagttcctattcttcagactgtattgacatctgtagtggatcatgttgcttcttcattcttaccaattttattagaatcaaacttcttgttatttgcatactattatctactatagattctcagctttagaaaatgactatgatacataaagaccactaggtcaacttaaaaaaccctttctgtgaatttatacatgtatgtatatatgtaaaaacactgttgatttgcaattctgtctttccatagaaatgaactttttctatcgaaattgtttaacttaaatattttaacataaattatttacatggatctttatgtataattcatccttatatataccccttaatcacgtagtcatgagaagataactttgctttctttacagaaagggcagagaggaataagataagaaactgaaacaagcaagaatgaagagagatgtgggggagagactgctggtctccagaccacagcaatgtgttttaagataagatgaaatattttaactgcagaagggatataaaatctatgtaattacatgctgatgggatccattgcacccaggtttttgaccttggcctgtaaatgctagactatgatatcttgttattctttttctcctttgggcttttaaaaaataatttcattctcagatcattttctgtactgtttactgaggcaaaaaaaaaaaaaatctgaagtcaatcatggtcttctactttctggactgagcatttggcagaatgcagtatcttttcctgtattttgacatgaaatagcacatggcttctacaagatagttttaacttgttggggtcaccgggagttatatgatggtcaaccccttttcccaaaattcattgtggtagttttagtggaaaacgtaaatcaagaaatctcatatcatactttaataaataaataccaaatacatagtgacatataggtttgggaagaaactagtctgtggggaccattataagagaatcacattatatattacacagtatatggatattggaatgtatcacttgtggggggttctcttcattagcaaaacagtcatgtctgtctgtatataagacttttttttttttaaccaaactagcatttcattttgtgagtgacaattgacattttaaaataagcataggccgggcatagtggctcatgcctgtaatcccagcccttgggaggccgaggtgggcagatcacttcaggtcaggagtttgagaccagcctggccaacatggtgaaaccctgtctctactaaataaaaataaaacaaaataagtgtatctgggccaggcacggtagcccatgcctgtaatcccagcactttgggaggccgaggagttcgagaccagcctggccaacatggcaaaaccctgtctctacaaaaattagccaggtgtggtggcacatgcctgtaatcccagctactcgggaggttgaggcaggagaattgcttgaacccgggagacagaggttgcagtgagccgagattgcaccactgcactccggcctgggtgacagagcaagacttcgactcaaaaaataaaataagcgtatctggatttttcttttgaattcttgactgataagtttgagaatgtatgtttttggaattttacagttgactcaagtgtgaaagtatacacaagtaatttttcttttctagctatgtgaatgtaaaatacttgcagataatgtatatattgtgtaatatatgtatatttggtcataaaagcagataattggaaacattgtaaaattaagcactttaattcctattaaatattaaacatttgtatcttgtaaataaacacatccttaaattaa

SEQ ID NO: 115939 - DNA, 1629 bp, Artificial Sequence
  derived and/or modified sequence
ggagcacaaagacagcgattgttacccaataagcagtagtcacacacttctaccaatcgccttaggagggctggttaccatggaatccaccatctgttcactccccaccggaatgtgattatccttgctgggctgggaagtggggaaagcaggggagcctgtgctgggtgagattatctgcaatggaccgggttaatgggaggcttgctttggctcgctggaagaacaaatgaagggagttttacttcaaccatttgtgacttctggccaagaggaataaattcagcttttataaggcagcagtacctgtccaaagatcgctttagttccaccttgctccacaagcagcacaaccacactggttggtgagaatgtatctgaagaagaggctcagggaataaatgggaacaggccagcaaaacactcagctgcaagtccaaagccacaagtgcctccaaagccattacacctgcagaattcaccttcgtccaatatacaccaaacccccaggcataaagctttacctagtgcaaaaccaaggatggaggaaattaaacctgcctctgcttcttgtgtctcaaaagaaaaacccagtaaggtatcagatctcatcagtcgctttgaaggaggcagctcattatcaaattatagtgatttgaagaaagagtctgctgtgaacctaaatgctcctagaaccccaggaaggcatggattgacaaccacacctcaacaaaaactcctctcccagcacttgccacagaggcagggaaatgatacagataagactcagggtgcacagacttgtgtggccaacggtgtaatggcagcacaaaaccagatggaatgtgaggaggagaaagctgccactcttagctcagatacttctattcaagcttctgaacccttgcttgatacgcacatagtgaatggagaaagagatgaaactgccacagctcctgcatcacccacaacagacagctgtgatggaaatgcttctgacagtagctacaggactccaggcataggcccagtgctccccctagaagaaagaggggcagaaacagaaaccaaggtacaagagagggaaaatggggaaagccctctggaactggagcagctggaccagcaccatgagatgaaggtagagcatgagactagctcatgagcagggaaaaccctgcctattcgattgttgtcttaaaactctttatttattgcacccctgaaatgtatgaatcagatcacccacactggcagttaaacgattttcaagctctggctgctgattagcatttcccctatgctctaagcagatatttcactttttcttttcatgtagtttctgttaatatctctgttgtaatttcaggagtcagaacagtgtggaaactttaatataggaaatccacaaatgtattgtttttacatagaaagaaaatgttccttgttgctctagatgttggtgctgtatccctaatacttacgggccaagcaagaagaaattgtataatctttgttgttcagaagtttctaatagaataaataggcctgtaagatgaacttgccactagtaaatgttacttttaaggacatgaatatggaagtattaaattattcaacagattataa

SEQ ID NO: 115940 - DNA, 2925 bp, Artificial Sequence
  derived and/or modified sequence
agtgcattggtctgagctcctggcagatcctgtgtaatcttcagcctccctgaagctttacagccaggagtgagattttatcacatgaactttaaaagagtaaagccaaatatctttttattaaaccagagtagattaattatcagtatatgtgaaatcatgtccactgatcaaggcagcagtacctgtccaaagatcgctttagttccaccttgctccacaagcagcacaaccacactggttggtgagaatgtatctgaagaagaggctcagggaataaatgggaacaggccagcaaaacactcagctgcaagtccaaagccacaagtgcctccaaagccattacacctgcagaattcaccttcgtccaatatacaccaaacccccaggcataaagctttacctagtgcaaaaccaaggatggaggaaattaaacctgcctctgcttcttgtgtctcaaaagaaaaacccagtaaggtatcagatctcatcagtcgctttgaaggaggcagctcattatcaaattatagtgatttgaagaaagagtctgctgtgaacctaaatgctcctagaaccccaggaaggcatggattgacaaccacacctcaacaaaaactcctctcccagcacttgccacagaggcagggaaatgatacagataagactcagggtgcacagacttgtgtggccaacggtgtaatggcagcacaaaaccagatggaatgtgaggaggagaaagctgccactcttagctcagatacttctattcaagcttctgaacccttgcttgatacgcacatagtgaatggagaaagagatgaaactgccacagctcctgcatcacccacaacagacagctgtgatggaaatgcttctgacagtagctacaggactccaggcataggcccagtgctccccctagaagaaagaggggcagaaacagaaaccaaggtacaagagagggaaaatggggaaagccctctggaactggagcagctggaccagcaccatgagatgaaggagactaatgagcaaaaacttcacaaaatagccaatgaacttttgcttactgaaagagcttatgtcaaccgacttgacctcttagatcaggtattttattgcaaactgttggaagaagcaaaccgaggctcgtttccagcagagatggtgaataaaatcttttctaatatttcatcaataaatgccttccatagtaaattcctcttgccagagctggagaaacgaatgcaagaatgggaaactactcctagaattggagacatccttcagaaattggcaccattccttaagatgtatggagaatatgtgaaaggatttgataatgcaatggaattggttaaaaacatgacagaacgtattccccagttcaaatcagtggttgaagaaattcagaaacagaaaatctgtgggagcttaactttgcagcatcacatgctagaacctgttcagcggattccccggtatgagatgctccttaaggactatctaaggaaattgcctcctgattccctggactggaatgatgctaaaaaatcacttgaaattatatctacagcagcaagccattctaatagtgcaataaggaaaatggagaacctaaagaaactcttagagatttatgaaatgttgggagaagaagaagacattgtaaacccttcaaatgaactaataaaagaaggacagatcctcaaactagctgctcggaacacttcagcacaagaacgctaccttttcttattcaacaacatgttgctgtactgtgtgcccaaattcagcttggtaggctctaaattcacagttcgaaccagggttggcattgatggaatgaaaattgtagagactcaaaatgaagaatatccacatactttccaggtgtctgggaaagagagaacactggaactgcaggccagttctgcgcaagacaaagaagaatggatcaaggcccttcaagaaaccatcgatgcttttcatcaaaggcatgaaaccttcagaaatgcaattgcaaaggataatgacattcactcagaggtttctactgctgagctagggaaaagagccccaagatggatccgagataatgaagtgacaatgtgtatgaaatgtaaagaacctttcaatgcactgacacgaaggaggcatcattgtcgagcatgtggatatgtggtttgttggaaatgctccgactacaaagctcaacttgaatatgatggtggtaaattgagcaaagtttgtaaagactgttatcaaatcataagtggattcacagacagtgaagaaaagaaaagaaaaggaattttagagattgaatcagcagaagtatctggaaacagtgtggtgtgcagctttcttcagtatatggagaagtcaaaaccttggcagaaagcttggtgtgtgatccccaagcaagaccctcttgtgctgtacatgtatggtgccccccaggacgtcagagcccaggccaccattccacttctgggctatgtggtggatgaaatgccaaggagcgcagacctgccacacagtttcaaactgacccagtctaagtccgtgcacagctttgctgcagacagtgaggaactgaagcagaagtggctgaaagtcatccttttagctgtcacaggtgagacaccaggtggtccaaatgagcatccagccaccttggatgatcatcctgaacctaagaaaaaatcagaatgctgaactcctccaggaccagccatggtgtggaggtctcaggacttacagctcaagacattcccagctcttcttacacatctgctagcactttatgttgaaaaatataggcccataaatgcatcttttgaggactattttcctatgtttatgtactcttagtgaaattagtgtgcagagtcattctaccgataaagttttgaaataatg

SEQ ID NO: 115941 - DNA, 2301 bp, Artificial Sequence
  derived and/or modified sequence
atggaggagatcaaaccagcctccgcatcctgcgtatctaaggagaaaccaagcaaggtctccgacctgattagtcggtttgaaggcgggagctcactcagcaattattccgatctgaagaaagagagtgccgttaacctgaacgcacctcgaacccctggcaggcacggtctgactactacaccacagcagaagctgctgtcacagcacctgcctcagagacaggggaacgacaccgacaaaacgcagggagcccagacatgcgttgccaatggtgtcatggcagcccagaaccagatggagtgtgaagaggagaaagccgccactttgtcttccgatacttccatccaggccagtgaaccactgcttgacacgcacatcgtcaatggcgagcgcgatgagaccgccaccgccccggcctcaccaactacggactcgtgcgatgggaatgcatccgacagttcctacaggacccctggaataggacctgtgctgccgctggaagagcggggcgccgaaacagagacaaaggtacaggaaagggagaacggcgagagccccctggagctggaacagcttgatcagcaccacgagatgaaagaaacaaacgagcaaaagctgcacaagatcgctaatgaattgctccttaccgagcgggcatacgtcaacagacttgatttactggaccaggttttttattgcaagctcctcgaagaagccaaccgtggcagtttcccagccgagatggtgaataaaatcttctcaaacattagctctataaacgcttttcatagtaagttcttactgcctgagctggagaagcggatgcaagaatgggagacaacccccagaataggagatatcttacagaagcttgcccctttcctgaagatgtacggggaatacgtgaagggctttgacaacgccatggagttggtcaagaatatgactgagcggatcccacagtttaaaagtgttgtagaggagattcaaaaacaaaagatatgcggctccctcacgttgcagcaccacatgctggaaccagtccaacgcatcccccgatacgaaatgcttctcaaggattatctacgtaaattgcccccagattctcttgattggaacgacgctaagaagtccctagagatcatctcaactgccgcatcccactctaacagcgccatacgtaagatggagaacctcaaaaagctacttgagatttatgagatgttaggcgaggaagaggacattgtaaatccctccaacgaattgatcaaagagggacagatccttaaactcgccgcaagaaatacatctgcccaggagcgttatttgttcctgtttaacaatatgttgttgtattgtgtccctaagttctctctggtgggttctaagtttaccgtaagaacacgagtgggaatcgacggaatgaaaattgtcgagacccagaatgaggagtatccccataccttccaagtatcgggcaaggaacgtactctggagcttcaggccagcagcgctcaagacaaagaagagtggattaaggccctgcaggagactattgatgccttccatcaacggcatgaaacatttcggaacgccattgctaaggacaacgatatccattctgaggtctctactgctgagctgggtaaaagggcaccacgctggatccgcgacaacgaagtgactatgtgcatgaagtgtaaagagccattcaatgctctaacccgccggagacaccattgcagggcctgtggctatgttgtgtgctggaaatgtagcgactacaaggcacaacttgagtacgatggaggaaaactgtcaaaggtctgtaaagattgctaccagatcatcagtggcttcacagacagcgaggagaagaagaggaagggcattctggagatagaatcggcagaggtgtcagggaattctgtagtgtgttcatttttgcaatacatggaaaaatcaaaaccttggcaaaaggcatggtgcgtgatacccaagcaggaccctctggtgctctacatgtatggagcacctcaggatgtccgggcccaggcaacaatacctctcctcggctacgtggtggacgagatgcctcgcagtgccgatttacctcacagctttaaacttacccagagcaaatcagttcatagtttcgctgccgatagcgaggagctgaagcaaaagtggctgaaagtgatccttctcgcggttaccggggaaactccgggcgggcctaatgagcatcccgcgacactcgacgatcatcccgaacccaaaaagaagtccgaatgctag

SEQ ID NO: 115942 - DNA, 2637 bp, Artificial Sequence
  derived and/or modified sequence
atgaattttaaacgggtgaaacccaacatttttctcctgaatcagtcacggcttatcatctctatctgcgaaataatgtccaccgatcagggatctagtacttgtcccaaaattgccttagtgcccccatgcagcacttcgagcactactaccttagtgggagagaatgtatccgaagaggaagcccaaggcatcaatggcaatcgacctgctaagcatagtgccgccagtcccaaaccccaggtcccgcctaaaccactccatctccaaaacagtccgtcgtctaatatccatcaaacccctcgacacaaggcattgccttcagcgaagccaaggatggaagagatcaaacccgcctccgccagctgcgtttccaaggagaaaccttctaaagtgagcgatctgattagcagatttgaaggcggcagctctttaagcaactacagtgatctcaagaaagaatctgccgtgaatctcaatgcaccacgaactccgggacggcacggtcttaccacgactccccagcagaaactcctaagtcaacatctgcctcagcgacagggaaacgacactgataaaacacagggagcccagacctgtgttgcaaacggagtaatggcagctcagaaccagatggagtgtgaagaggagaaagcagctactcttagctcagacacctccatacaagcctcagagcccctcctcgacacccacattgtgaacggggaacgcgacgagaccgccacggctcctgcctctccaaccaccgattcctgtgatgggaacgccagtgactctagctacagaaccccaggcattgggccagttctacccttggaggaacgcggtgctgagacagaaaccaaggtgcaggaaagagaaaacggagaatctcccctcgagctcgagcagctggaccaacaccacgagatgaaggaaacaaacgagcaaaaactgcataagattgcgaacgaattgctgcttacggaacgagcgtacgttaacagactggatctgcttgaccaagtcttttactgcaagctgttggaagaggccaaccgggggtcgttcccagccgagatggttaataagattttctctaacattagctctataaacgcttttcactcaaagttcctcctgccagagctcgagaaaaggatgcaagaatgggaaaccacccctaggattggggacattctgcagaaactggccccatttctgaagatgtacggggagtatgtgaaaggattcgataatgcaatggagttggtcaagaatatgacagagcgaattccccagttcaaatccgttgttgaagagattcaaaaacagaaaatctgcggttcactgacattgcagcaccacatgctggagcctgtgcagcggattcctcggtacgagatgctcctcaaagactacctgcgcaagctgcctcccgactccctcgactggaacgacgctaagaagtccctggaaattatatccaccgctgctagccacagtaatagcgcaattcggaaaatggagaacttgaagaagctgctcgagatttacgaaatgctcggagaggaggaggatatcgtaaacccatctaatgaactgattaaagaagggcagatcttgaaactggcggctagaaatactagtgcccaggaacgctatctgttcttgtttaacaatatgctgttatattgtgtgccgaaattctctctggtgggttcaaagttcacagttaggacacgcgtgggcatcgatggtatgaagatcgtcgaaacgcaaaacgaagagtatccccatacctttcaggtgagtggcaaggagaggactctggagctccaggcaagcagcgcccaggacaaggaggagtggataaaggcacttcaagaaaccattgatgcgttccatcagaggcacgagacattcaggaatgccattgccaaggataacgatattcatagtgaggtgtcaactgccgagctcggaaaaagagctcctcgttggataagagacaacgaagtgacaatgtgcatgaaatgcaaggagcctttcaacgctcttaccaggcgaagacatcattgccgcgcttgcggatacgtggtttgttggaagtgcagcgactataaagctcagcttgagtacgatgggggaaaactgtctaaagtttgcaaggactgttaccagataatctcaggcttcacagattcggaggagaagaagagaaaggggattctcgagatcgagagcgcggaagtctccggtaacagtgtggtatgcagttttctgcagtatatggagaagtcaaagccttggcagaaggcatggtgtgtgatcccaaaacaagaccccctcgtgctgtatatgtacggcgccccccaggacgtgcgcgctcaggccaccatcccacttcttggttatgtggtcgacgaaatgcctaggagtgccgacctcccccacagcttcaagctgacccaaagtaagagcgtgcactctttcgccgccgacagcgaggagctcaagcagaagtggcttaaggtgatactcctggcagtaaccggtgagacccctgggggtcctaacgagcatcccgctacactggatgatcaccccgaaccgaaaaagaaaagtgagtgttag

SEQ ID NO: 115943 - DNA, 2301 bp, Artificial Sequence
  derived and/or modified sequence
atggaggagatcaagccagccagcgccagctgtgtgtccaaggagaagcccagcaaggtgtctgacctgatcagcagatttgaaggaggcagcagcctgagcaactacagcgacctgaagaaggagagcgctgtgaacctgaatgcccccaggaccccaggccgccacggcctgaccaccaccccccagcagaagctgctgagccagcacctgccccagaggcagggcaatgacacagacaagacccagggcgcccagacctgtgtggccaatggagtgatggccgcccagaaccagatggagtgtgaggaggagaaggccgccaccctgagcagtgacaccagcatccaggccagcgagcccctgctggacacccacatcgtgaatggagagagagatgaaacagccacagccccagccagccccaccacagacagctgtgatggaaatgccagtgacagcagctaccgcaccccaggcatcggccctgtgctgcccctggaggagagaggagctgagacagagaccaaggtgcaggagcgggagaatggagagagccccctggagctggagcagctggaccagcaccacgagatgaaggagaccaatgagcagaagctgcacaagatcgccaatgagctgctgctgacagagcgggcctacgtgaaccggctggacctgctggaccaggtgttctactgcaagctgctggaggaggccaacagaggcagcttccctgctgagatggtgaacaagatcttcagcaacatcagcagcatcaatgccttccacagcaagttcctgctgcctgagctggagaagaggatgcaggagtgggagaccaccccaagaattggagacatcctgcagaagctggcccccttcctgaagatgtatggagaatatgtgaagggctttgacaatgccatggagctggtgaagaacatgacagagcgcatcccccagttcaagtctgtggtggaggagatccagaagcagaagatctgtggcagcctgaccctgcagcaccacatgctggagcctgtgcagaggatccccaggtatgagatgctgctgaaggactacctgaggaagctgcccccagacagcctggactggaatgatgccaagaagagcctggagatcatcagcacagctgccagccacagcaacagcgccatcaggaagatggagaacctgaagaagctgctggagatctatgagatgctgggggaggaggaggacatcgtgaaccccagcaatgaactcatcaaggagggccagatcctgaagctggccgccaggaacaccagcgcccaggagcgctacctgttcctgttcaacaacatgctgctgtactgtgtgcccaagttcagcctggtgggcagcaagttcaccgtgaggaccagggtgggcattgatggcatgaagatcgtggagacccagaatgaggagtacccccacaccttccaggtgtctgggaaggagaggaccctggagctgcaggccagcagcgcccaggacaaggaggagtggatcaaggccctgcaggagaccattgatgccttccaccagagacatgagaccttcagaaatgccatcgccaaggacaatgacatccacagcgaggtgtccacagctgagctgggcaagagggccccccgctggatccgggacaatgaggtgaccatgtgcatgaagtgcaaggagcccttcaatgccctgacccggcggcggcaccactgccgggcctgtggctacgtggtgtgctggaagtgcagcgactacaaggcccagctggagtatgatggcggcaagctgagcaaggtgtgcaaggactgctaccagatcatcagcggcttcacagacagcgaggagaagaagaggaagggcatcctggagattgaatctgctgaggtgtctggcaacagcgtggtgtgcagcttcctgcagtacatggagaagagcaagccctggcagaaggcctggtgtgtgatccccaagcaggaccccctggtgctgtacatgtatggagccccccaggatgtgcgggcccaggccaccatccccctgctgggctacgtggtggatgagatgcccaggtctgctgacctgccccacagcttcaagctgacccagagcaagtctgtgcacagctttgctgctgacagcgaggagctgaagcagaagtggctgaaggtgatcctgctggccgtgactggagagacccctgggggccccaatgagcacccagccaccctggatgaccaccctgagcccaagaagaagtcagaatgttag

SEQ ID NO: 115944 - DNA, 2637 bp, Artificial Sequence
  derived and/or modified sequence
atgaacttcaagagggtgaagcccaacatcttcctgctgaaccagagccgcctcatcatcagcatctgtgagatcatgagcacagaccagggcagcagcacctgccccaagatcgccctggtgcccccctgcagcaccagcagcaccaccaccctggtgggagaaaatgtgtctgaggaggaggcccagggcatcaatggaaacagacctgccaagcacagcgctgccagccccaagccccaggtgccccccaagcccctgcacctgcagaacagccccagcagcaacatccaccagacccccaggcacaaggccctgcccagcgccaagcccaggatggaggagatcaagccagccagcgccagctgtgtgtccaaggagaagcccagcaaggtgtctgacctgatcagcagatttgaaggaggcagcagcctgagcaactacagcgacctgaagaaggagagcgctgtgaacctgaatgcccccaggaccccaggccgccacggcctgaccaccaccccccagcagaagctgctgagccagcacctgccccagaggcagggcaatgacacagacaagacccagggcgcccagacctgtgtggccaatggagtgatggccgcccagaaccagatggagtgtgaggaggagaaggccgccaccctgagcagtgacaccagcatccaggccagcgagcccctgctggacacccacatcgtgaatggagagagagatgaaacagccacagccccagccagccccaccacagacagctgtgatggaaatgccagtgacagcagctaccgcaccccaggcatcggccctgtgctgcccctggaggagagaggagctgagacagagaccaaggtgcaggagcgggagaatggagagagccccctggagctggagcagctggaccagcaccacgagatgaaggagaccaatgagcagaagctgcacaagatcgccaatgagctgctgctgacagagcgggcctacgtgaaccggctggacctgctggaccaggtgttctactgcaagctgctggaggaggccaacagaggcagcttccctgctgagatggtgaacaagatcttcagcaacatcagcagcatcaatgccttccacagcaagttcctgctgcctgagctggagaagaggatgcaggagtgggagaccaccccaagaattggagacatcctgcagaagctggcccccttcctgaagatgtatggagaatatgtgaagggctttgacaatgccatggagctggtgaagaacatgacagagcgcatcccccagttcaagtctgtggtggaggagatccagaagcagaagatctgtggcagcctgaccctgcagcaccacatgctggagcctgtgcagaggatccccaggtatgagatgctgctgaaggactacctgaggaagctgcccccagacagcctggactggaatgatgccaagaagagcctggagatcatcagcacagctgccagccacagcaacagcgccatcaggaagatggagaacctgaagaagctgctggagatctatgagatgctgggggaggaggaggacatcgtgaaccccagcaatgaactcatcaaggagggccagatcctgaagctggccgccaggaacaccagcgcccaggagcgctacctgttcctgttcaacaacatgctgctgtactgtgtgcccaagttcagcctggtgggcagcaagttcaccgtgaggaccagggtgggcattgatggcatgaagatcgtggagacccagaatgaggagtacccccacaccttccaggtgtctgggaaggagaggaccctggagctgcaggccagcagcgcccaggacaaggaggagtggatcaaggccctgcaggagaccattgatgccttccaccagagacatgagaccttcagaaatgccatcgccaaggacaatgacatccacagcgaggtgtccacagctgagctgggcaagagggccccccgctggatccgggacaatgaggtgaccatgtgcatgaagtgcaaggagcccttcaatgccctgacccggcggcggcaccactgccgggcctgtggctacgtggtgtgctggaagtgcagcgactacaaggcccagctggagtatgatggcggcaagctgagcaaggtgtgcaaggactgctaccagatcatcagcggcttcacagacagcgaggagaagaagaggaagggcatcctggagattgaatctgctgaggtgtctggcaacagcgtggtgtgcagcttcctgcagtacatggagaagagcaagccctggcagaaggcctggtgtgtgatccccaagcaggaccccctggtgctgtacatgtatggagccccccaggatgtgcgggcccaggccaccatccccctgctgggctacgtggtggatgagatgcccaggtctgctgacctgccccacagcttcaagctgacccagagcaagtctgtgcacagctttgctgctgacagcgaggagctgaagcagaagtggctgaaggtgatcctgctggccgtgactggagagacccctgggggccccaatgagcacccagccaccctggatgaccaccctgagcccaagaagaagtcagaatgttag

SEQ ID NO: 115945 - DNA, 2301 bp, Artificial Sequence
  derived and/or modified sequence
atggaggagatcaagcccgccagcgccagctgcgtgagcaaggagaagccgtccaaggtgtctgacttgataagtcggttcgagggcggatctagcttaagtaattactcagacctcaagaaggaatcagccgtgaaccttaatgctccccggaccccagggagacacggcttaacaacaaccccccagcagaagctactgtcacaacacctgccccagagacaagggaacgatactgataaaacccagggagcccagacgtgtgttgccaatggggtgatggccgctcagaaccagatggagtgtgaggaagagaaagcagccacactcagcagcgacacttcaattcaggcatccgagcccctcctggatactcatattgtcaacggagaaagagatgagactgctacagctcctgccagtccaaccactgactcttgcgacggaaatgcttctgacagcagctaccgaacacccggaatcggacctgtgctccccctcgaagaacgcggggccgagactgagacgaaagtgcaggaacgtgagaatggcgaatcccccctggagttggagcagctggaccagcatcatgagatgaaggaaactaacgagcaaaagttacataagatagctaatgaactcctgttaactgagagagcgtatgtcaatcgtctggacctgttggatcaggtgttctactgtaagctgctggaggaagcgaaccgtggtagcttccctgccgaaatggttaataagatattctccaacataagcagtatcaacgccttccacagcaagttcctactgcctgaattggaaaaaagaatgcaggagtgggagacaacccccaggatcggcgacatccttcagaaactggccccgttcctgaaaatgtacggcgaatatgttaaaggttttgataacgctatggagctggttaaaaacatgacggaacgtattccacagttcaaatccgtggtagaggagattcagaagcaaaagatttgcgggagcctgaccttgcagcatcacatgctggagcccgtacagaggatcccccggtacgagatgctgctgaaggactatttgcgaaaactccccccagatagtttggactggaacgacgctaagaagtccctcgaaatcatttctaccgctgctagtcatagcaactcagcgatcagaaaaatggagaacctgaagaagttattagagatctacgagatgttgggcgaagaagaggacatagtgaacccctccaatgagcttattaaggaaggccagattcttaaactggccgctaggaataccagcgctcaggaaaggtacttattcctgttcaataacatgctcctttactgcgtcccaaagttttcactcgtgggcagcaaatttacagtccgtactcgggtaggcattgatgggatgaagattgtggagactcagaacgaggaatacccccatacgttccaggtgtctggaaaggagcggactctcgaactccaggccagttcagcacaggataaagaagagtggatcaaggctctgcaggagaccatcgatgcatttcaccagaggcacgagaccttccgaaacgccattgcaaaggacaacgatattcacagtgaggtttcaacagccgagctcggcaagcgggccccacgatggatccgggataatgaagttacaatgtgcatgaagtgtaaagagccattcaatgcccttacacgcaggagacatcattgccgcgcctgtggctacgtagtctgttggaaatgctcagactacaaggcacagttggagtatgacggcgggaagctgtctaaggtctgcaaggattgctaccagattatctctggctttaccgattctgaggaaaagaaaaggaagggtatcctggaaatagaatccgccgaggtttccgggaacagcgtagtttgcagcttccttcagtacatggagaagtcgaagccttggcagaaagcatggtgtgttattccgaagcaggatcccctggttctctatatgtatggcgcaccacaagatgttcgcgctcaggcaactatccctcttctcggctacgtggttgacgagatgccgcgcagcgcagatctaccccactcctttaagctgacacagagcaagtccgtgcatagcttcgcggccgactctgaggagctaaaacagaaatggctaaaggtcattctgctggccgtgacaggagagactccaggcggcccgaacgaacatcccgcaaccctggatgatcacccagagcctaaaaaaaagagcgagtgttag

SEQ ID NO: 115946 - DNA, 2637 bp, Artificial Sequence
  derived and/or modified sequence
atgaacttcaagcgggtgaagcccaacatcttcctgctgaaccagtcccgcctgatcataagcatttgcgagataatgtctaccgatcagggttcaagcacgtgcccaaagatcgcactggtgcccccgtgcagcacttcttcaaccacaactctggtcggggagaacgtctctgaggaagaggcccagggcatcaacggcaacagaccggcaaaacactccgccgcgtcccccaaacctcaggtaccgccaaagcccctgcacctgcaaaattccccatcatccaacattcaccagactcctcgccataaggcactccccagtgccaagcctcggatggaggagatcaaacccgcctctgcatcctgcgtgtcaaaagagaagccctcaaaggtaagtgacctaattagtagattcgagggaggtagtagcttgagtaattatagcgacctgaagaaggagagcgccgtgaaccttaatgcgccccggaccccaggcaggcacggcctgactaccacgccccagcagaagttgctgtctcagcatctaccgcaaagacagggcaacgataccgataaaacccaaggtgcacaaacttgtgtagcgaacggagttatggctgctcaaaatcagatggagtgcgaggaggagaaggccgccacactctcctcagacacctctatacaggcttcagaacccctgttagatacccacattgtcaatggtgagcgggacgagactgccacagcgcctgcgtcccctactacagatagctgtgatggaaacgcaagcgacagcagctataggacaccagggataggaccggttctgccactggaagagcggggggcagagaccgagacaaaagtccaggagcgggagaatggcgaatcaccactggaattggaacagctcgatcagcatcacgagatgaaggaaaccaacgagcagaagctgcataaaatcgccaacgaactccttctcacagagagggcttatgtgaaccggctagacttacttgaccaggtattctattgcaagctgttagaggaagcaaatcgtgggagttttcctgcagagatggttaataagattttttcaaatattagctccattaatgctttccattctaaatttctgctcccggaattagagaagcgaatgcaggagtgggaaactacaccgaggattggcgacatcctgcagaaacttgctccattcctcaaaatgtacggagagtatgttaaaggtttcgataatgcaatggagctcgttaagaacatgaccgagcggatcccgcaattcaaaagcgtcgtagaagaaatccagaagcagaagatctgtggctccctcacattacagcaccatatgttagaaccagtgcagcggattccgaggtacgagatgctgctgaaggactacctgaggaaactgccaccagattctttggattggaatgacgcgaagaagagtctggagattatttccactgccgcttcccactctaactcagccatcaggaagatggagaatctgaaaaagcttcttgagatatatgagatgctcggagaagaggaggacatcgtcaaccccagtaatgagctcatcaaggaaggccaaattcttaagttggccgcgagaaatacaagtgcacaggagaggtatctgttcttgttcaataacatgctgctatattgcgtcccaaagtttagtctggtcggaagcaagttcacggtgcgtacaagagttggtatcgacggaatgaaaatagtggagactcagaacgaggaatacccccacacctttcaagtcagcgggaaggaacgcacgctggaactgcaggcgagctctgcacaggataaggaggagtggatcaaagccctgcaggagaccattgacgcttttcatcaacggcatgagacatttcgcaacgctatagccaaggacaacgatatccacagcgaagtcagtacagcagagcttggcaaacgagcgcccagatggattagagacaatgaggttaccatgtgtatgaagtgtaaagagccatttaacgctttgactcgccggcgtcaccactgccgcgcctgcggatacgtcgtatgttggaagtgttccgactataaagcccaactggagtacgatggcggcaaactgtccaaagtgtgtaaggactgttaccagatcataagtggcttcactgacagcgaagaaaagaagcggaagggtattttggagatcgaatccgcggaagtgagcggaaattctgtggtgtgcagttttctgcagtacatggaaaagagtaagccttggcagaaagcctggtgcgtaattcccaagcaggaccctctcgtactgtacatgtatggtgcgcctcaggatgtgcgcgcccaggccaccatccccttattaggctacgtggtagatgaaatgccaagatccgcagatcttccacacagcttcaagctgacccagtcgaaatccgttcacagcttcgcagccgattctgaagagcttaaacagaagtggctaaaagtgattctgcttgccgtgacaggcgagacaccagggggaccaaacgaacatcctgcgactctagacgaccacccagagcccaaaaaaaaaagcgaatgttag

SEQ ID NO: 115947 - DNA, 2301 bp, Artificial Sequence
  derived and/or modified sequence
atggaagagatcaagcctgcatccgctagctgtgtctctaaagaaaaaccatcaaaggttagcgatctgatctctcggttcgaaggaggatccagcctatcgaattattctgacctgaagaaagagtcagcggttaacctcaacgctcctaggacccccggacgccatggcttaacaaccacaccccagcagaaactgctcagtcagcacctgccccaacgtcagggaaacgataccgacaagacacagggcgctcagacttgtgttgcgaacggcgtgatggctgcacagaaccagatggaatgtgaggaagagaaagcggcaacactgtcttctgacacttcaatccaagctagcgagcctctgctcgatacccatatcgttaatggggagagagacgagaccgcaaccgccccagctagtcccacaactgactcttgcgacgggaatgcaagcgacagtagctatcgaacccctggcatcggtcctgtgttacctctcgaagagcgcggagccgagaccgaaaccaaggtacaggaaagagaaaatggcgaaagtccactagagttagaacagttggatcagcatcatgagatgaaagagaccaatgagcagaaactgcacaaaattgcaaatgagttgctgcttacagagagggcatatgtgaacagactcgatctactagaccaagtattttactgtaagctacttgaggaggccaatagggggtctttcccggcagagatggtaaacaaaatattttcaaacatctccagtatcaacgccttccattcgaaattcctactgcccgagctggagaagcgcatgcaggagtgggagaccacgcccaggattggagacatcctccagaaactagcacccttcctcaaaatgtacggagaatacgttaaggggtttgataatgccatggaactggtaaagaacatgacagagcgtatccctcagtttaagagtgttgttgaggaaattcagaaacaaaaaatttgcggctccttgaccttacagcaccacatgctggaaccagtgcagaggattcccagatacgaaatgctcctgaaggactatcttagaaagctcccacccgactccctggactggaacgacgccaagaagtccttagaaatcatctccaccgctgcctcgcacagtaactccgcaatccggaagatggagaatctaaaaaagctactggaaatttatgagatgctcggggaagaagaagatattgtgaacccatcaaatgaacttatcaaggaaggtcagatcctgaagttggcagctaggaatacatccgctcaggagcgttatctgttcctgttcaataacatgttgctgtattgcgtgcccaaattctctcttgtcggttccaaattcaccgtcagaactagagtgggcatagacgggatgaagatcgtggaaacccagaacgaggaatatccacatacctttcaggtgtctggcaaagaaaggacactagagttacaggcctctagcgcccaagacaaagaagaatggattaaagccctgcaggagactatcgatgccttccatcagcgacacgaaacattcagaaacgcgatcgccaaggataacgacattcattcagaagtcagcacagcggaactcggcaagagagcccctcgctggatcagagacaacgaggtgacgatgtgcatgaagtgcaaggagccctttaacgccctgacccgtcgacggcaccactgtcgggcatgtggatatgtggtgtgttggaaatgttctgactataaggcccaactcgagtacgacggtggcaagctatccaaagtatgcaaggactgttaccagattatcagcggttttacggacagtgaggaaaaaaagcgcaagggcattctggagattgagagtgcagaagtgtccgggaattcagtggtgtgcagctttctacagtacatggaaaaatctaaaccatggcagaaggcttggtgtgtaatccccaagcaggaccccctggttctatatatgtatggggctccccaagacgtcagggcccaggctacaataccactccttggttacgtggtcgacgagatgcccaggtccgctgacctgccacactctttcaaactgacacagtctaaatctgtgcactcctttgccgcagacagcgaagagctcaaacagaaatggttaaaggttatcttgctggcagttactggtgagactccaggcggacccaacgagcaccctgctacgctggacgatcaccccgagcccaaaaagaagagcgagtgctag

SEQ ID NO: 115948 - DNA, 2637 bp, Artificial Sequence
  derived and/or modified sequence
atgaatttcaaacgcgtgaaaccgaacattttcttgctcaaccagtcgcgtctcataatatcaatctgtgagataatgtcaacagaccagggttcctccacctgccccaaaatcgcactcgttccgccttgtagcacatcctctaccacaactttggtcggggagaatgttagcgaagaggaagcacagggcataaatggtaaccgacctgcaaagcattccgctgccagccctaagccccaggtgcctccgaaacctctccacctgcagaacagcccttcatccaatatccaccaaactcctcgccacaaggccctgccttcagccaaacccaggatggaggaaataaagcctgcaagcgcgtcttgtgtgtctaaggagaaaccatcaaaggtgtctgacctgatatcccgctttgagggtgggtcctctctcagcaattactctgacctcaaaaaggagagcgccgttaacttgaacgccccaagaaccccaggcaggcacggcctgacgacgacacctcagcaaaaactgctgagtcagcacctgccacagcgtcagggaaacgacacagacaaaacgcagggagcacagacttgcgttgccaatggtgtgatggccgctcagaatcagatggagtgcgaagaagaaaaagccgctacattgagctctgatacatctatacaggcctcagaacctttattggatacccacattgtgaacggcgaaagggacgagacagctaccgctcccgcttcacccacaacagatagctgtgatggcaatgctagtgattcatcatacagaacaccaggtatcggacctgttttacctctggaagaaagaggagcagagaccgagactaaagtgcaggagcgtgaaaatggggagtctccactggagctggaacagctcgaccaacaccatgagatgaaagaaacgaatgagcaaaaattgcacaagatcgcgaatgagttgctgctgaccgaaagagcctacgtgaataggctcgatctactggaccaggtgttctattgcaagttactagaagaagccaaccggggttcttttcctgctgaaatggtgaacaaaatattctccaatatttcttctatcaatgcttttcactcaaagttcctgttgccagaactagaaaaacgcatgcaagagtgggagaccaccccgcgaattggcgatattctgcaaaaactcgctccatttctcaaaatgtatggagagtacgtcaaaggattcgacaacgccatggaactcgtaaaaaatatgactgagaggattccacagtttaagtcggtggtagaagagattcagaagcaaaagatttgcggcagtctgacactgcagcaccatatgctggagcccgtccagcgcattccccgttacgaaatgcttctgaaagactatctgagaaagctgcccccagatagtctggactggaatgatgcaaagaagtccttagaaatcatcagcactgctgcaagccacagcaactctgctatacggaagatggaaaacctgaagaagctgcttgaaatctacgaaatgctgggggaagaagaggatattgttaatcccagcaacgaactcatcaaagagggtcagatcctcaaacttgctgctcgcaatacatccgctcaggaacgctatctcttcctgttcaacaacatgctgctgtactgcgtcccaaagttcagcctggtcgggagcaaatttacagtccggacaagggtggggatcgacggcatgaaaatcgtcgagacccagaatgaagagtatccccacacgtttcaggttagtgggaaagagcggacgctggaactccaggcctcatcggcccaggataaggaggagtggatcaaagctttacaggagacaatagatgccttccaccaaaggcacgaaacctttagaaacgccattgccaaggacaacgatatacacagcgaggtgtctacggctgagctgggaaaacgcgctcctaggtggattagggataatgaagtaaccatgtgtatgaagtgtaaagagccattcaacgcgcttaccaggagaagacatcattgccgtgcctgcggatatgtggtgtgttggaagtgttctgattacaaagcgcagcttgaatatgacggaggcaagctgtctaaagtctgtaaggactgttaccagatcatatccgggtttacggactccgaagaaaagaagcgcaaaggcattctcgaaattgagtctgcagaggtcagcggcaacagcgtggtgtgtagttttttacaatacatggaaaagtctaagccctggcagaaggcctggtgtgtgattcccaagcaagaccctttagttctgtacatgtatggagctccccaagacgttagggcgcaagctaccattcctctactggggtacgtggttgacgagatgcctagatctgcagatttacctcatagcttcaaactcacacagtcgaaatctgttcattcctttgcagctgactcggaggaactgaagcagaaatggttgaaggtgattctgttggccgtcactggggaaacaccaggaggaccaaatgaacatcctgcgaccctggatgaccacccagagcccaaaaagaagtctgaatgctag

SEQ ID NO: 115949 - DNA, 2301 bp, Artificial Sequence
  derived and/or modified sequence
atggaggagatcaagcccgccagcgccagctgcgtgagcaaggagaagcccagcaaggtgagcgacctgatcagcagattcgagggcggcagcagcctgagcaactacagcgacctgaagaaggagagcgccgtgaacctgaacgcccccagaacccccggcagacacggcctgaccaccaccccccagcagaagctgctgagccagcacctgccccagagacagggcaacgacaccgacaagacccagggcgcccagacctgcgtggccaacggcgtgatggccgcccagaaccagatggagtgcgaggaggagaaggccgccaccctgagcagcgacaccagcatccaggccagcgagcccctgctggacacccacatcgtgaacggcgagagagacgagaccgccaccgcccccgccagccccaccaccgacagctgcgacggcaacgccagcgacagcagctacagaacccccggcatcggccccgtgctgcccctggaggagagaggcgccgagaccgagaccaaggtgcaggagagagagaacggcgagagccccctggagctggagcagctggaccagcaccacgagatgaaggagaccaacgagcagaagctgcacaagatcgccaacgagctgctgctgaccgagagagcctacgtgaacagactggacctgctggaccaggtgttctactgcaagctgctggaggaggccaacagaggcagcttccccgccgagatggtgaacaagatcttcagcaacatcagcagcatcaacgccttccacagcaagttcctgctgcccgagctggagaagagaatgcaggagtgggagaccacccccagaatcggcgacatcctgcagaagctggcccccttcctgaagatgtacggcgagtacgtgaagggcttcgacaacgccatggagctggtgaagaacatgaccgagagaatcccccagttcaagagcgtggtggaggagatccagaagcagaagatctgcggcagcctgaccctgcagcaccacatgctggagcccgtgcagagaatccccagatacgagatgctgctgaaggactacctgagaaagctgccccccgacagcctggactggaacgacgccaagaagagcctggagatcatcagcaccgccgccagccacagcaacagcgccatcagaaagatggagaacctgaagaagctgctggagatctacgagatgctgggcgaggaggaggacatcgtgaaccccagcaacgagctgatcaaggagggccagatcctgaagctggccgccagaaacaccagcgcccaggagagatacctgttcctgttcaacaacatgctgctgtactgcgtgcccaagttcagcctggtgggcagcaagttcaccgtgagaaccagagtgggcatcgacggcatgaagatcgtggagacccagaacgaggagtacccccacaccttccaggtgagcggcaaggagagaaccctggagctgcaggccagcagcgcccaggacaaggaggagtggatcaaggccctgcaggagaccatcgacgccttccaccagagacacgagaccttcagaaacgccatcgccaaggacaacgacatccacagcgaggtgagcaccgccgagctgggcaagagagcccccagatggatcagagacaacgaggtgaccatgtgcatgaagtgcaaggagcccttcaacgccctgaccagaagaagacaccactgcagagcctgcggctacgtggtgtgctggaagtgcagcgactacaaggcccagctggagtacgacggcggcaagctgagcaaggtgtgcaaggactgctaccagatcatcagcggcttcaccgacagcgaggagaagaagagaaagggcatcctggagatcgagagcgccgaggtgagcggcaacagcgtggtgtgcagcttcctgcagtacatggagaagagcaagccctggcagaaggcctggtgcgtgatccccaagcaggaccccctggtgctgtacatgtacggcgccccccaggacgtgagagcccaggccaccatccccctgctgggctacgtggtggacgagatgcccagaagcgccgacctgccccacagcttcaagctgacccagagcaagagcgtgcacagcttcgccgccgacagcgaggagctgaagcagaagtggctgaaggtgatcctgctggccgtgaccggcgagacccccggcggccccaacgagcaccccgccaccctggacgaccaccccgagcccaagaagaagagcgagtgctag

SEQ ID NO: 115950 - DNA, 2637 bp, Artificial Sequence
  derived and/or modified sequence
atgaacttcaagagagtgaagcccaacatcttcctgctgaaccagagcagactgatcatcagcatctgcgagatcatgagcaccgaccagggcagcagcacctgccccaagatcgccctggtgcccccctgcagcaccagcagcaccaccaccctggtgggcgagaacgtgagcgaggaggaggcccagggcatcaacggcaacagacccgccaagcacagcgccgccagccccaagccccaggtgccccccaagcccctgcacctgcagaacagccccagcagcaacatccaccagacccccagacacaaggccctgcccagcgccaagcccagaatggaggagatcaagcccgccagcgccagctgcgtgagcaaggagaagcccagcaaggtgagcgacctgatcagcagattcgagggcggcagcagcctgagcaactacagcgacctgaagaaggagagcgccgtgaacctgaacgcccccagaacccccggcagacacggcctgaccaccaccccccagcagaagctgctgagccagcacctgccccagagacagggcaacgacaccgacaagacccagggcgcccagacctgcgtggccaacggcgtgatggccgcccagaaccagatggagtgcgaggaggagaaggccgccaccctgagcagcgacaccagcatccaggccagcgagcccctgctggacacccacatcgtgaacggcgagagagacgagaccgccaccgcccccgccagccccaccaccgacagctgcgacggcaacgccagcgacagcagctacagaacccccggcatcggccccgtgctgcccctggaggagagaggcgccgagaccgagaccaaggtgcaggagagagagaacggcgagagccccctggagctggagcagctggaccagcaccacgagatgaaggagaccaacgagcagaagctgcacaagatcgccaacgagctgctgctgaccgagagagcctacgtgaacagactggacctgctggaccaggtgttctactgcaagctgctggaggaggccaacagaggcagcttccccgccgagatggtgaacaagatcttcagcaacatcagcagcatcaacgccttccacagcaagttcctgctgcccgagctggagaagagaatgcaggagtgggagaccacccccagaatcggcgacatcctgcagaagctggcccccttcctgaagatgtacggcgagtacgtgaagggcttcgacaacgccatggagctggtgaagaacatgaccgagagaatcccccagttcaagagcgtggtggaggagatccagaagcagaagatctgcggcagcctgaccctgcagcaccacatgctggagcccgtgcagagaatccccagatacgagatgctgctgaaggactacctgagaaagctgccccccgacagcctggactggaacgacgccaagaagagcctggagatcatcagcaccgccgccagccacagcaacagcgccatcagaaagatggagaacctgaagaagctgctggagatctacgagatgctgggcgaggaggaggacatcgtgaaccccagcaacgagctgatcaaggagggccagatcctgaagctggccgccagaaacaccagcgcccaggagagatacctgttcctgttcaacaacatgctgctgtactgcgtgcccaagttcagcctggtgggcagcaagttcaccgtgagaaccagagtgggcatcgacggcatgaagatcgtggagacccagaacgaggagtacccccacaccttccaggtgagcggcaaggagagaaccctggagctgcaggccagcagcgcccaggacaaggaggagtggatcaaggccctgcaggagaccatcgacgccttccaccagagacacgagaccttcagaaacgccatcgccaaggacaacgacatccacagcgaggtgagcaccgccgagctgggcaagagagcccccagatggatcagagacaacgaggtgaccatgtgcatgaagtgcaaggagcccttcaacgccctgaccagaagaagacaccactgcagagcctgcggctacgtggtgtgctggaagtgcagcgactacaaggcccagctggagtacgacggcggcaagctgagcaaggtgtgcaaggactgctaccagatcatcagcggcttcaccgacagcgaggagaagaagagaaagggcatcctggagatcgagagcgccgaggtgagcggcaacagcgtggtgtgcagcttcctgcagtacatggagaagagcaagccctggcagaaggcctggtgcgtgatccccaagcaggaccccctggtgctgtacatgtacggcgccccccaggacgtgagagcccaggccaccatccccctgctgggctacgtggtggacgagatgcccagaagcgccgacctgccccacagcttcaagctgacccagagcaagagcgtgcacagcttcgccgccgacagcgaggagctgaagcagaagtggctgaaggtgatcctgctggccgtgaccggcgagacccccggcggccccaacgagcaccccgccaccctggacgaccaccccgagcccaagaagaagagcgagtgctag

SEQ ID NO: 115951 - protein, 851 aa, Artificial Sequence
  derived and/or modified sequence
MGGCSSTCPKIALVPPCSTSSTTTLVGENVSEEEAQGINGNRPAKHSAASPKPQVPPKPLHLQNSPSSNIHQTPRHKALPSAKPRMEEIKPASASCVSKEKPSKVSDLISRFEGGSSLSNYSDLKKESAVNLNAPRTPGRHGLTTTPQQKLLSQHLPQRQGNDTDKTQGAQTCVANGVMAAQNQMECEEEKAATLSSDTSIQASEPLLDTHIVNGERDETATAPASPTTDSCDGNASDSSYRTPGIGPVLPLEERGAETETKVQERENGESPLELEQLDQHHEMKETNEQKLHKIANELLLTERAYVNRLDLLDQVFYCKLLEEANRGSFPAEMVNKIFSNISSINAFHSKFLLPELEKRMQEWETTPRIGDILQKLAPFLKMYGEYVKGFDNAMELVKNMTERIPQFKSVVEEIQKQKICGSLTLQHHMLEPVQRIPRYEMLLKDYLRKLPPDSLDWNDAKKSLEIISTAASHSNSAIRKMENLKKLLEIYEMLGEEEDIVNPSNELIKEGQILKLAARNTSAQERYLFLFNNMLLYCVPKFSLVGSKFTVRTRVGIDGMKIVETQNEEYPHTFQVSGKERTLELQASSAQDKEEWIKALQETIDAFHQRHETFRNAIAKDNDIHSEVSTAELGKRAPRWIRDNEVTMCMKCKEPFNALTRRRHHCRACGYVVCWKCSDYKAQLEYDGGKLSKVCKDCYQIISGFTDSEEKKRKGILEIESAEVSGNSVVCSFLQYMEKSKPWQKAWCVIPKQDPLVLYMYGAPQDVRAQATIPLLGYVVDEMPRSADLPHSFKLTQSKSVHSFAADSEELKQKWLKVILLAVTGETPGGPNEHPATLDDHPEPKKKSEC

SEQ ID NO: 115952 - DNA, 2924 bp, Artificial Sequence
  derived and/or modified sequence
agttagttctttatcatgttgaacactagatgtgtatgtgtctagtgtctaaatacagaatgcctatagtttctaccaacaaattatggatccaaatccttgctccagaagcaggaaataggttaatcagaagattgctggatgttatgaaaagaatcttttatggggggctgcagcagtacctgtccaaagatcgctttagttccaccttgctccacaagcagcacaaccacactggttggtgagaatgtatctgaagaagaggctcagggaataaatgggaacaggccagcaaaacactcagctgcaagtccaaagccacaagtgcctccaaagccattacacctgcagaattcaccttcgtccaatatacaccaaacccccaggcataaagctttacctagtgcaaaaccaaggatggaggaaattaaacctgcctctgcttcttgtgtctcaaaagaaaaacccagtaaggtatcagatctcatcagtcgctttgaaggaggcagctcattatcaaattatagtgatttgaagaaagagtctgctgtgaacctaaatgctcctagaaccccaggaaggcatggattgacaaccacacctcaacaaaaactcctctcccagcacttgccacagaggcagggaaatgatacagataagactcagggtgcacagacttgtgtggccaacggtgtaatggcagcacaaaaccagatggaatgtgaggaggagaaagctgccactcttagctcagatacttctattcaagcttctgaacccttgcttgatacgcacatagtgaatggagaaagagatgaaactgccacagctcctgcatcacccacaacagacagctgtgatggaaatgcttctgacagtagctacaggactccaggcataggcccagtgctccccctagaagaaagaggggcagaaacagaaaccaaggtacaagagagggaaaatggggaaagccctctggaactggagcagctggaccagcaccatgagatgaaggagactaatgagcaaaaacttcacaaaatagccaatgaacttttgcttactgaaagagcttatgtcaaccgacttgacctcttagatcaggtattttattgcaaactgttggaagaagcaaaccgaggctcgtttccagcagagatggtgaataaaatcttttctaatatttcatcaataaatgccttccatagtaaattcctcttgccagagctggagaaacgaatgcaagaatgggaaactactcctagaattggagacatccttcagaaattggcaccattccttaagatgtatggagaatatgtgaaaggatttgataatgcaatggaattggttaaaaacatgacagaacgtattccccagttcaaatcagtggttgaagaaattcagaaacagaaaatctgtgggagcttaactttgcagcatcacatgctagaacctgttcagcggattccccggtatgagatgctccttaaggactatctaaggaaattgcctcctgattccctggactggaatgatgctaaaaaatcacttgaaattatatctacagcagcaagccattctaatagtgcaataaggaaaatggagaacctaaagaaactcttagagatttatgaaatgttgggagaagaagaagacattgtaaacccttcaaatgaactaataaaagaaggacagatcctcaaactagctgctcggaacacttcagcacaagaacgctaccttttcttattcaacaacatgttgctgtactgtgtgcccaaattcagcttggtaggctctaaattcacagttcgaaccagggttggcattgatggaatgaaaattgtagagactcaaaatgaagaatatccacatactttccaggtgtctgggaaagagagaacactggaactgcaggccagttctgcgcaagacaaagaagaatggatcaaggcccttcaagaaaccatcgatgcttttcatcaaaggcatgaaaccttcagaaatgcaattgcaaaggataatgacattcactcagaggtttctactgctgagctagggaaaagagccccaagatggatccgagataatgaagtgacaatgtgtatgaaatgtaaagaacctttcaatgcactgacacgaaggaggcatcattgtcgagcatgtggatatgtggtttgttggaaatgctccgactacaaagctcaacttgaatatgatggtggtaaattgagcaaagtttgtaaagactgttatcaaatcataagtggattcacagacagtgaagaaaagaaaagaaaaggaattttagagattgaatcagcagaagtatctggaaacagtgtggtgtgcagctttcttcagtatatggagaagtcaaaaccttggcagaaagcttggtgtgtgatccccaagcaagaccctcttgtgctgtacatgtatggtgccccccaggacgtcagagcccaggccaccattccacttctgggctatgtggtggatgaaatgccaaggagcgcagacctgccacacagtttcaaactgacccagtctaagtccgtgcacagctttgctgcagacagtgaggaactgaagcagaagtggctgaaagtcatccttttagctgtcacaggtgagacaccaggtggtccaaatgagcatccagccaccttggatgatcatcctgaacctaagaaaaaatcagaatgctgaactcctccaggaccagccatggtgtggaggtctcaggacttacagctcaagacattcccagctcttcttacacatctgctagcactttatgttgaaaaatataggcccataaatgcatcttttgaggactattttcctatgtttatgtactcttagtgaaattagtgtgcagagtcattctaccgataaagttttgaaataatgtg

SEQ ID NO: 115953 - DNA, 2556 bp, Artificial Sequence
  derived and/or modified sequence
atgggagggtgtagcagcacgtgtcctaaaatagcccttgtccccccctgttccacttcaagtactactactctggttggggaaaacgtcagcgaagaggaggcgcaaggtatcaacgggaataggcctgctaagcacagcgcagcctcacccaagcctcaggtgccccccaaacctctccatctgcagaacagtcctagcagtaacatccatcaaacacctaggcacaaagctctgccgtccgctaagcccagaatggaagaaattaaaccggcgagcgcttcatgcgtgtcgaaggagaagccttctaaagtgtccgacctgattagcagatttgaagggggatcttctctgtcaaactacagtgacttgaaaaaagaatccgccgtgaatctaaacgccccacggacccccggccgccacggcctgaccacaaccccacagcagaagcttctgtctcagcacctaccacagagacagggaaacgatacggacaagacgcagggtgcacagacttgtgtggctaatggtgtcatggcagcgcagaaccagatggagtgtgaggaggagaaagcagcaaccctgtcaagcgatacatctatccaggcaagcgaacccctgctggatactcacatagtgaatggagaaagggatgaaaccgccactgcaccagcctcgccgaccacggacagctgcgatgggaatgcctctgacagcagctacaggacccccggtattgggcccgtgcttccattggaagaaaggggtgccgagacagagactaaggtgcaggaacgggagaatggcgaatcaccattggaactggaacaactggatcagcaccatgagatgaaggaaacaaatgaacagaagctgcataagatcgccaacgaattacttctcacggaacgggcgtacgttaaccgtcttgacttattggaccaggtcttttactgcaagttactcgaggaagcaaaccgggggtccttcccggccgaaatggttaacaagatattttcaaatatttccagcattaacgccttccactctaaatttctgctgccggagttggagaagagaatgcaggaatgggaaacaacacctcggattggcgacattttacagaagctggcaccctttcttaagatgtatggggagtatgtcaagggctttgataatgccatggagcttgtgaagaatatgacggagaggataccacaattcaagagcgtagtggaagaaattcagaagcagaagatctgcgggtcactgactctccagcatcacatgctggaacccgtgcagagaataccgcgatatgagatgctgctcaaagactacctgagaaaactgccccccgactcccttgattggaatgacgcaaaaaaatcactggaaatcattagcaccgcggcctcacactctaatagcgccattagaaagatggaaaatttgaaaaagctcttggagatctacgaaatgttgggtgaagaagaagacattgtgaatccctccaatgaattgattaaagagggacagatcctgaaactcgctgcgaggaatacaagtgctcaggaacgttatctgtttctgttcaacaatatgcttttgtactgcgtgccaaagttttccctggtggggtctaagttcactgtccgcacgcgtgtcggaatcgacggaatgaaaattgtggaaacccaaaatgaagaatacccgcacactttccaggtgtcagggaaagaacggactctcgaattacaggcctcatcagcccaggataaagaggagtggattaaggccctccaggaaactatcgatgcattccaccagagacatgagaccttccgaaatgcaattgccaaggacaatgatatccattccgaggtgagtactgcggaactcggcaaaagagcaccaaggtggatccgagacaacgaagttacaatgtgcatgaagtgtaaggaaccctttaacgccctgacccgtagaaggcaccactgcagggcatgtggatacgtcgtgtgttggaagtgctccgactacaaagcacaattagagtacgatgggggaaagctctccaaggtgtgcaaggattgctaccagataatatccgggttcaccgatagtgaagagaaaaagcgcaagggtatcctcgaaattgagagcgcagaggtgtctggaaactccgtggtgtgctcattcctgcagtatatggagaagtcaaagccttggcagaaagcatggtgtgtcatccctaagcaggacccgcttgtcctgtatatgtacggagctccccaggatgtgcgggcccaggcaactatccctctcttaggctacgtggtcgatgagatgcccaggagtgctgatcttccccactctttcaaactgacccagtcaaagagtgtgcactcattcgccgccgattccgaagaattgaagcaaaagtggttgaaagtgatcctgctggccgttacgggggagacgcctggaggccctaacgaacacccagcaaccctggatgaccatcctgaacccaaaaagaaatccgagtgttag

SEQ ID NO: 115954 - DNA, 2556 bp, Artificial Sequence
  derived and/or modified sequence
atgggcggctgcagcagcacctgccccaagatcgccctggtgcccccctgcagcaccagcagcaccaccaccctggtgggggagaatgtgtctgaggaggaggcccagggcatcaatggaaacagacctgccaagcacagcgctgccagccccaagccccaggtgccccccaagcccctgcacctgcagaacagccccagcagcaacatccaccagacccccaggcacaaggccctgcccagcgccaagcccaggatggaggagatcaagccagccagcgccagctgtgtgtccaaggagaagcccagcaaggtgtctgacctgatcagcagatttgagggcggcagcagcctgagcaactacagcgacctgaagaaggagagcgctgtgaacctgaatgcccccaggaccccaggaagacatggcctgaccaccaccccccagcagaagctgctgagccagcacctgccccagaggcagggcaatgacacagacaagacccagggcgcccagacctgtgtggccaacggggtgatggccgcccagaaccagatggagtgtgaggaggagaaggccgccaccctgagcagtgacaccagcatccaggccagcgagcccctgctggacacccacatcgtgaatggagagagagatgaaacagccacagccccagccagccccaccacagacagctgtgatggaaatgccagtgacagcagctaccgcaccccaggcatcggccctgtgctgcccctggaggagagaggagctgagacagagaccaaggtgcaggagagagaaaatggagagagccccctggagctggagcagctggaccagcaccacgagatgaaggagaccaatgagcagaagctgcacaagatcgccaatgagctgctgctgacagagcgggcctacgtgaaccggctggacctgctggaccaggtgttctactgcaagctgctggaggaggccaacagaggcagcttccctgctgagatggtgaacaagatcttcagcaacatcagcagcatcaatgccttccacagcaagttcctgctgcctgagctggagaagaggatgcaggagtgggagaccaccccccgcatcggggacatcctgcagaagctggcccccttcctgaagatgtacggggagtatgtgaagggctttgacaatgccatggagctggtgaagaacatgacagagcgcatcccccagttcaagtctgtggtggaggagatccagaagcagaagatctgtggcagcctgaccctgcagcaccacatgctggagcctgtgcagaggatccccaggtatgagatgctgctgaaggactacctgaggaagctgcccccagacagcctggactggaatgatgccaagaagagcctggagatcatcagcacagctgccagccacagcaacagcgccatcaggaagatggagaacctgaagaagctgctggagatctatgagatgctgggggaggaggaggacatcgtgaaccccagcaatgagctgatcaaggagggccagatcctgaagctggccgccaggaacaccagcgcccaggagcgctacctgttcctgttcaacaacatgctgctgtactgtgtgcccaagttcagcctggtgggcagcaagttcaccgtgaggaccagggtgggcattgatggcatgaagatcgtggagacccagaatgaggagtacccccacaccttccaggtgtctgggaaggagaggaccctggagctgcaggccagcagcgcccaggacaaggaggagtggatcaaggccctgcaggagaccattgatgccttccaccagagacatgagaccttcagaaatgccatcgccaaggacaatgacatccacagcgaggtgtccacagctgagctgggcaagagggccccccgctggatccgggacaatgaggtgaccatgtgcatgaagtgcaaggagcccttcaatgccctgaccaggagaagacaccactgccgggcctgtggctacgtggtgtgctggaagtgcagcgactacaaggcccagctggagtatgatggcggcaagctgagcaaggtgtgcaaggactgctaccagatcatcagcggcttcacagattctgaggagaagaagaggaagggcatcctggagattgagagcgctgaggtgtctggcaacagcgtggtgtgcagcttcctgcagtacatggagaagagcaagccctggcagaaggcctggtgtgtgatccccaagcaggaccccctggtgctgtacatgtacggggccccccaggatgtgcgggcccaggccaccatccccctgctgggctacgtggtggatgagatgcccaggtctgctgacctgccccacagcttcaagctgacccagagcaagtctgtgcacagctttgctgctgacagcgaggagctgaagcagaagtggctgaaggtgatcctgctggccgtgactggagagaccccaggcggccccaatgagcacccagccaccctggatgaccaccctgagcccaagaagaagtctgagtgctag

SEQ ID NO: 115955 - DNA, 2556 bp, Artificial Sequence
  derived and/or modified sequence
atgggcggctgcagcagcacctgccccaagatcgccctggtgcccccctgctctacttcatcaacgaccacccttgtgggcgagaacgtcagtgaggaggaagctcaggggattaatgggaaccgacctgccaagcactcagcagccagcccaaagccccaggtccctcctaagcccctacatctgcagaacagtccgtcttccaacatccaccagactccacggcataaagcactgccctctgccaaaccccggatggaggagattaaacccgctagcgcttcttgtgtttccaaggagaagcccagcaaggtgtctgatctgattagtaggttcgaaggaggaagctccctgtctaactattccgacctaaagaaggaaagcgccgtcaacttaaatgctccaagaacacctggtaggcacggtttgaccaccacacctcaacagaaactgctgagccagcatctcccacagagacagggcaacgatacggacaagactcagggagcacagacctgcgttgcgaacggagtcatggcggctcaaaatcagatggaatgcgaagaggagaaggctgcaactctgtccagtgacacaagtatacaggcgtctgagcccctgctcgacactcatatcgtgaacggggagagagatgaaacagctaccgcacctgcatccccgacgaccgactcctgtgatgggaacgcaagtgactcatcataccgcacccctggcatcgggcccgtgctgccgttagaggagcggggtgctgagactgagaccaaagttcaggagcgcgagaacggcgagtcccccttggaattggaacagctggatcaacatcacgagatgaaggagaccaatgaacaaaaactacacaagatagccaatgaacttctcctaaccgagagggcctacgtcaatcgactggatttgcttgaccaagtgttttattgcaaattgctggaggaagccaatcgcggaagttttcccgctgaaatggtgaataagattttttccaacataagctctatcaatgcctttcactcaaaatttttactgcctgagctggaaaaacggatgcaggaatgggagactacgcctcgaattggggacatactacagaaattggccccctttttgaaaatgtacggcgagtacgttaaaggctttgacaatgctatggaactagtgaagaacatgacagagaggattccccagttcaaaagtgtggtcgaggaaatccagaaacagaaaatctgtggatcacttaccttgcagcaccatatgctcgaaccagtgcagaggatacctcgctatgagatgctgttgaaggattacttgagaaaactgccccccgacagtttggattggaacgatgccaagaagtccctggaaataataagcaccgccgcgagtcattccaattctgcgattcgcaagatggaaaatctgaagaaattgttagaaatctacgagatgttgggagaagaagaggatatcgttaatccatctaacgagttgatcaaagaagggcagatcctgaaactggccgctagaaatacatctgcacaggagcgttacctgtttttatttaataatatgcttctctactgtgtcccaaagttttctctagtggggtcaaaattcaccgtgcgcactcgcgtgggcatagacggtatgaagattgtcgagactcagaatgaagagtacccccatacttttcaagtgtctggaaaggaaaggaccttggaactgcaggcttcatcggcccaggataaggaggaatggataaaagcattgcaggagaccatagacgcttttcatcaacggcatgaaactttcagaaacgccatcgccaaggacaacgacatccacagcgaggtttccacagcagaacttgggaaaagagcaccaaggtggattagggataacgaggtaactatgtgcatgaagtgtaaagagcctttcaatgcgcttacacgccgaaggcatcattgtagagcttgtggatacgtcgtctgttggaagtgcagcgactataaagctcagctcgagtacgatggcggcaaactttccaaggtctgtaaggactgttatcagatcatctccggttttactgactcagaggaaaaaaagaggaagggcatcctggagatcgagtctgccgaagtgtccgggaattctgtggtttgtagtttcctccagtatatggagaaaagtaaaccatggcagaaagcatggtgtgtaatccccaagcaagatccccttgttctgtacatgtatggggctccacaggatgttagagcgcaggccacaattccactcttgggctacgttgtggacgaaatgccgcgttccgctgacttaccacatagtttcaaattgactcagagcaaaagtgtccattcttttgccgccgactcagaggagctgaaacagaaatggctcaaggtgatcctgcttgcggttacaggcgagacgccagggggccctaatgagcacccagccactctggatgatcaccccgagcccaagaagaagtccgagtgctag

SEQ ID NO: 115956 - DNA, 2556 bp, Artificial Sequence
  derived and/or modified sequence
atgggaggatgcagtagcacctgcccgaaaatcgctctggtccctccctgttcaacatccagcactaccacgctggtcggcgagaatgtcagtgaagaagaggcccaggggatcaatggcaatcggccagcaaaacactctgcggcttcccccaagccacaggtgcctccaaaacccttgcacctccagaactccccttcaagtaatattcatcaaactcctagacataaggcgttgcccagtgcaaagcctagaatggaagagatcaaaccagcctcagcatcgtgtgtttcaaaagagaaaccatccaaggtaagcgatttaattagtcgatttgaagggggttcatccctgagcaattattccgatcttaaaaaggagagtgccgtgaatctgaacgcacctagaacccccggtcgccacgggctcacaacaaccccacaacaaaaattattgagtcagcatctgccacagcgccaaggaaatgacacagacaagacacagggtgctcaaacctgcgtggccaacggagtgatggcagctcagaaccaaatggagtgcgaggaagagaaagcagccaccctgtcaagcgacacaagcatccaggcctccgaacctcttctggatacacacattgtgaatggggaaagagacgaaacggcaaccgcccctgcttcgccaacaactgatagttgtgatgggaacgcaagcgactcatcctatcggacacccggaatcggcccagtattgcctctggaagaacgcggagcagaaacagagacaaaggtgcaggagagggagaacggcgaatccccactggagctcgagcagctggaccagcaccatgagatgaaggagacaaatgagcagaaactgcataaaatcgctaacgagctgctcctaaccgaacgggcttatgtcaaccgcctggatttgctggatcaggtcttttactgcaaactgcttgaggaagctaacagaggctcgttccctgcggaaatggtgaacaagatctttagcaacatttcctctatcaacgcgttccacagcaagttcctcctgccagaactggaaaaaaggatgcaggaatgggagaccactcccagaatcggtgatattctgcagaaactggcgccttttttaaaaatgtatggcgaatatgtcaaaggatttgataacgcaatggagttggtcaagaatatgaccgagcgtatccctcagtttaaatcagtggtagaagagatccagaagcagaaaatatgtggaagtctgaccctgcagcaccacatgctcgagcctgtccagcgcattcccagatacgagatgctcctgaaagattacctacggaagctgccgccagattccctagactggaatgacgccaaaaagagtctcgaaattatctctacagcagccagccattccaacagtgcaattagaaagatggaaaacctcaagaaactgctggaaatttatgagatgttgggtgaggaagaagacatagtgaacccctcaaatgagctaataaaagaggggcaaatactgaaactagcagcgagaaatacaagcgcacaagagcgatacctatttttattcaacaatatgcttctgtattgcgttccgaaattctcgctagtggggtcgaagtttactgtgaggacaagagtcggaatcgacggtatgaagattgtggagacccaaaatgaagaataccctcacaccttccaagtatcaggaaaggaacgaactcttgaactgcaggcttcatctgcacaagacaaggaagagtggattaaagcgctgcaggagaccatcgatgcattccaccagaggcatgaaaccttcaggaatgccatcgcaaaggataacgacatccacagcgaggtgtcgacagccgaactgggcaagagggctcccaggtggattcgcgacaacgaagtgacgatgtgtatgaagtgcaaagagccctttaatgccctcacccgacgtcgccatcattgtcgcgcttgcgggtacgtcgtgtgttggaagtgtagcgactacaaggcgcagctggaatatgatggtggcaaactcagcaaagtctgtaaagactgttaccaaataatttcaggatttaccgattccgaagagaaaaagaggaaggggatcctggaaatcgaatctgccgaggtctctgggaattccgtggtgtgcagcttcctgcagtacatggaaaaatctaagccttggcagaaggcgtggtgtgtgatccctaaacaagatccattggttctgtacatgtatggcgcaccacaagacgtccgagcccaagctacaatcccattattaggatacgttgtggacgagatgccacggagtgcagatttaccccattcgtttaagttgacccagagcaagagtgttcactcttttgcagctgactccgaagaactgaagcagaaatggctcaaagtgatcctgctggccgtgacaggggagacccctggcggacccaacgagcaccccgcaaccctggacgatcaccctgagccaaagaaaaagtctgaatgctag

SEQ ID NO: 115957 - DNA, 2556 bp, Artificial Sequence
  derived and/or modified sequence
atgggcggctgcagcagcacctgccccaagatcgccctggtgcccccctgcagcaccagcagcaccaccaccctggtgggcgagaacgtgagcgaggaggaggcccagggcatcaacggcaacagacccgccaagcacagcgccgccagccccaagccccaggtgccccccaagcccctgcacctgcagaacagccccagcagcaacatccaccagacccccagacacaaggccctgcccagcgccaagcccagaatggaggagatcaagcccgccagcgccagctgcgtgagcaaggagaagcccagcaaggtgagcgacctgatcagcagattcgagggcggcagcagcctgagcaactacagcgacctgaagaaggagagcgccgtgaacctgaacgcccccagaacccccggcagacacggcctgaccaccaccccccagcagaagctgctgagccagcacctgccccagagacagggcaacgacaccgacaagacccagggcgcccagacctgcgtggccaacggcgtgatggccgcccagaaccagatggagtgcgaggaggagaaggccgccaccctgagcagcgacaccagcatccaggccagcgagcccctgctggacacccacatcgtgaacggcgagagagacgagaccgccaccgcccccgccagccccaccaccgacagctgcgacggcaacgccagcgacagcagctacagaacccccggcatcggccccgtgctgcccctggaggagagaggcgccgagaccgagaccaaggtgcaggagagagagaacggcgagagccccctggagctggagcagctggaccagcaccacgagatgaaggagaccaacgagcagaagctgcacaagatcgccaacgagctgctgctgaccgagagagcctacgtgaacagactggacctgctggaccaggtgttctactgcaagctgctggaggaggccaacagaggcagcttccccgccgagatggtgaacaagatcttcagcaacatcagcagcatcaacgccttccacagcaagttcctgctgcccgagctggagaagagaatgcaggagtgggagaccacccccagaatcggcgacatcctgcagaagctggcccccttcctgaagatgtacggcgagtacgtgaagggcttcgacaacgccatggagctggtgaagaacatgaccgagagaatcccccagttcaagagcgtggtggaggagatccagaagcagaagatctgcggcagcctgaccctgcagcaccacatgctggagcccgtgcagagaatccccagatacgagatgctgctgaaggactacctgagaaagctgccccccgacagcctggactggaacgacgccaagaagagcctggagatcatcagcaccgccgccagccacagcaacagcgccatcagaaagatggagaacctgaagaagctgctggagatctacgagatgctgggcgaggaggaggacatcgtgaaccccagcaacgagctgatcaaggagggccagatcctgaagctggccgccagaaacaccagcgcccaggagagatacctgttcctgttcaacaacatgctgctgtactgcgtgcccaagttcagcctggtgggcagcaagttcaccgtgagaaccagagtgggcatcgacggcatgaagatcgtggagacccagaacgaggagtacccccacaccttccaggtgagcggcaaggagagaaccctggagctgcaggccagcagcgcccaggacaaggaggagtggatcaaggccctgcaggagaccatcgacgccttccaccagagacacgagaccttcagaaacgccatcgccaaggacaacgacatccacagcgaggtgagcaccgccgagctgggcaagagagcccccagatggatcagagacaacgaggtgaccatgtgcatgaagtgcaaggagcccttcaacgccctgaccagaagaagacaccactgcagagcctgcggctacgtggtgtgctggaagtgcagcgactacaaggcccagctggagtacgacggcggcaagctgagcaaggtgtgcaaggactgctaccagatcatcagcggcttcaccgacagcgaggagaagaagagaaagggcatcctggagatcgagagcgccgaggtgagcggcaacagcgtggtgtgcagcttcctgcagtacatggagaagagcaagccctggcagaaggcctggtgcgtgatccccaagcaggaccccctggtgctgtacatgtacggcgccccccaggacgtgagagcccaggccaccatccccctgctgggctacgtggtggacgagatgcccagaagcgccgacctgccccacagcttcaagctgacccagagcaagagcgtgcacagcttcgccgccgacagcgaggagctgaagcagaagtggctgaaggtgatcctgctggccgtgaccggcgagacccccggcggccccaacgagcaccccgccaccctggacgaccaccccgagcccaagaagaagagcgagtgctag

SEQ ID NO: 115958 - DNA, 414 bp, Artificial Sequence
  derived and/or modified sequence
atgaccagccccctggtgttcgccagcctgagccccgacgccatggccaagatgctggagatggccgccctgaacgtgggcaccatcagaatcagcctgaacaccgagcccagaccccccgtgatcacccagctggcccccagccccgagaccctgcccttctgccccgagtggggcgccgagaaccagagcagacacctgaagctgccccccttcttcatctgcagatgcagaggccccctgtaccaggaggagagcctgagcgagatccactgccacagcggcctgttcctggaccagctgagcctgcccacccccttcagcagcctgagcgtgagcctgatccactggaccttcatcagcaccaagtacgtgcccggcatcatgctggccttcggcggcaccaacaagtag

SEQ ID NO: 115959 - DNA, 591 bp, Artificial Sequence
  derived and/or modified sequence
atggtgtgcagactgatctgcgtgttccacagcaccaacgccgtgagcgtgttcagcctgagcctgttcagagcctgcacccccgtgcccgaccccgccccctggcccatcccctgcagaggcgccagcggcaagaagaccggcagacccgccagagccagactgagaagaggccaccccgccagcccccccaccgccagatgcctgacctgcttcgccaccgacagctgcagccagcccctgggcgccagcgtgttcggcgtgggcgagctgctgagagactgcgccagacccagaccccccaccctgaagtgccagcaccaccagcaccagatcctgagaagacacaccgccctgagaaccagaagacccggcagactggtgagcagctgcatcaagctgagcccctgccccctgctgcccctgccccccgtgttcctgctgatcttcttcagccccttcccccccagcctgagcgccttcttcccctggttcagcaccggcaagaccgtgcccctgcccccctgcctgcacggcagccccgcccacgtgatgctgcccagcctgttcttcgtgtgcgtgttcatctag

SEQ ID NO: 115960 - DNA, 591 bp, Artificial Sequence
  derived and/or modified sequence
atggtgtgtcggctcatttgtgtgttccacagtacaaacgcggtctcagtcttcagtctttcactgtttagggcatgtaccccggtcccggaccccgcaccctggcctattccatgtagaggggccagcggcaagaaaacagggcgccctgcacgtgcccggttaaggcgcgggcatcctgccagtcctccaacagctagatgcctcacctgctttgctactgactcctgttcccagccacttggagcaagcgtgtttggcgtgggggaactgctgagggattgtgcaaggccaagacctcccacattgaagtgccagcaccatcaacaccagattcttcgtagacataccgcactgcggacaagaaggcctggccggcttgtgagcagctgtatcaagctcagcccctgtccacttctaccactgcctcctgtgtttttgctgatttttttcagcccttttcccccatcactcagcgccttttttccatggttttccacaggcaagaccgtgcccctgcccccttgcttgcatggatctcctgcccacgttatgcttccaagtctctttttcgtgtgtgttttcatttag

SEQ ID NO: 115961 - DNA, 591 bp, Artificial Sequence
  derived and/or modified sequence
atggtgtgccgcctcatctgtgtgttccacagcaccaatgctgtgtctgtgttcagcctgagcctcttccgggcctgcacccctgtgcctgaccctgccccctggcccatcccctgccgcggggccagcggcaagaagacaggccggcctgcccgggcccggctgcggcggggccacccagccagccccccaacagcccgctgcctgacctgctttgccacagacagctgcagccagcccctgggcgcctctgtgtttggagtgggggagctgctgcgggactgtgcccggccccggccccccaccctgaagtgccagcaccaccagcaccagatcctgcggcggcacacagccctgcggacccggcggcccggccgcctggtgagcagctgcatcaagctgagcccctgccccctgctgcccctgccccctgtgttcctgctgatcttcttcagccccttcccccccagcctgagcgccttcttcccctggttcagcacaggcaagacagtgcccctgcccccctgcctgcacggcagccctgcccacgtgatgctgcccagcctcttctttgtgtgtgtgttcatctag

SEQ ID NO: 115962 - DNA, 591 bp, Artificial Sequence
  derived and/or modified sequence
atggtgtgccggctgatctgcgtgttccacagcaccaacgccgtgtctgtcttcagcctctccttgtttagggcatgtacccccgtgcctgaccccgccccatggcccatcccttgcaggggtgcttccggcaagaaaactgggcgccccgcacgcgcccgtttacgtcgcggccatccagcttccccacctactgcccgctgtctgacatgtttcgctaccgactcatgtagccagcctttaggggcttccgtgtttggtgtcggtgagttgctgagggattgtgcccgccctcggcctccgactctgaaatgccagcaccatcagcaccagatactgcggcgacacacagccctccgtacccggaggcccgggaggcttgtctcttcttgcatcaagctgtcaccatgccccctgctaccactcccccctgtcttcctcctcatatttttttccccatttcctccctccctgtcagcattttttccatggttctcgacaggtaagacagtcccacttcctccctgcctgcacggcagcccagcccatgtgatgctaccgtccctcttcttcgtgtgtgtttttatttag

SEQ ID NO: 115963 - DNA, 591 bp, Artificial Sequence
  derived and/or modified sequence
atggtctgccgccttatctgtgtcttccactcaacaaatgccgttagcgttttctctttgtcccttttccgcgcatgcacacctgttcccgaccccgctccttggccgatcccctgtcggggagcttcaggtaagaagaccggcagacctgccagggccagacttcgacgaggccaccctgcctcaccaccgacagcccgatgtttaacatgcttcgccactgatagctgcagccagccactaggagcttcggttttcggagtgggagaacttctgcgggattgcgccaggccacggccaccgaccctgaagtgtcagcatcatcagcaccagatacttcgtaggcatacagctttgcgaacaagaagacccggacgtctggtctcttcctgcatcaaactgagtccctgtcctctgctgcccctgcctcctgtgttcctgttgatctttttcagccccttcccacctagcttgtcagctttttttccttggttctccactggcaaaacggtcccgctgcctccttgcctgcatggttcccctgcccacgtaatgcttccgagtttattctttgtgtgcgttttcatctag

SEQ ID NO: 115964 - protein, 471 aa, Artificial Sequence
  derived and/or modified sequence
MVNKIFSNISSINAFHSKFLLPELEKRMQEWETTPRIGDILQKLAPFLKMYGEYVKGFDNAMELVKNMTERIPQFKSVVEEIQKQKICGSLTLQHHMLEPVQRIPRYEMLLKDYLRKLPPDSLDWNDAKKSLEIISTAASHSNSAIRKMENLKKLLEIYEMLGEEEDIVNPSNELIKEGQILKLAARNTSAQERYLFLFNNMLLYCVPKFSLVGSKFTVRTRVGIDGMKIVETQNEEYPHTFQVSGKERTLELQASSAQDKEEWIKALQETIDAFHQRHETFRNAIAKDNDIHSEVSTAELGKRAPRWIRDNEVTMCMKCKEPFNALTRRRHHCRACGYVVCWKCSDYKAQLEYDGGKLSKVCKDCYQIISGFTDSEEKKRKGILEIESAEVSGNSVVCSFLQYMEKSKPWQKAWCVIPKQDPLVLYMYGAPQVSKPHLSEGTDALGGKGKRVDSGLKICRTRVQAVSLFH

SEQ ID NO: 115965 - DNA, 2679 bp, Artificial Sequence
  derived and/or modified sequence
ctgggctgggaagtggggaaagcaggggagcctgtgctgggtgagattatctgcaatggaccgggttaatgggaggcttgctttggctcgctggaagaacaaatgaagggagttttacttcaaccatttgtgacttctggccaagaggaataaattcagcttttataaggcagcagtacctgtccaaagatcgctttagttccaccttgctccacaagcagcacaaccacactggttggtgagaatgtatctgaagaagaggctcagggaataaatgggaacaggccagcaaaacactcagctgcaagtccaaagccacaagtgcctccaaagccattacacctgcagaattcaccttcgtccaatatacaccaaacccccaggcataaagctttacctagtgcaaaaccaaggatggaggaaattaaacctgcctctgcttcttgtgtctcaaaagaaaaacccagtaaggtatcagatctcatcagtcgctttgaaggaggcagctcattatcaaattatagtgatttgaagaaagagtctgctgtgaacctaaatgctcctagaaccccaggaaggcatggattgacaaccacacctcaacaaaaactcctctcccagcacttgccacagaggcagggaaatgatacagataagactcagggtgcacagacttgtgtggccaacggtgtaatggcagcacaaaaccagatggaatgtgaggaggagaaagctgccactcttagctcagatacttctattcaagcttctgaacccttgcttgatacgcacatagtgaatggagaaagagatgaaactgccacagctcctgcatcacccacaacagacagctgtgatggaaatgcttctgacagtagctacaggactccaggcataggcccagtgctccccctagaagaaagaggggcagaaacagaaaccaaggtacaagagagggaaaatggggaaagccctctggaactggagcagctggaccagcaccatgagatgaaggagactaatgagcaaaaacttcacaaaatagccaatgaacttttgcttactgaaagagcttatgtcaaccgacttgacctcttagatcagaaaatagagtggaggtgaatttagaaaattaacaaccatctggacattatgaaggaatagacctccttctgcctacatgtaacagaatggcaattaagaggtattttattgcaaactgttggaagaagcaaaccgaggctcgtttccagcagagatggtgaataaaatcttttctaatatttcatcaataaatgccttccatagtaaattcctcttgccagagctggagaaacgaatgcaagaatgggaaactactcctagaattggagacatccttcagaaattggcaccattccttaagatgtatggagaatatgtgaaaggatttgataatgcaatggaattggttaaaaacatgacagaacgtattccccagttcaaatcagtggttgaagaaattcagaaacagaaaatctgtgggagcttaactttgcagcatcacatgctagaacctgttcagcggattccccggtatgagatgctccttaaggactatctaaggaaattgcctcctgattccctggactggaatgatgctaaaaaatcacttgaaattatatctacagcagcaagccattctaatagtgcaataaggaaaatggagaacctaaagaaactcttagagatttatgaaatgttgggagaagaagaagacattgtaaacccttcaaatgaactaataaaagaaggacagatcctcaaactagctgctcggaacacttcagcacaagaacgctaccttttcttattcaacaacatgttgctgtactgtgtgcccaaattcagcttggtaggctctaaattcacagttcgaaccagggttggcattgatggaatgaaaattgtagagactcaaaatgaagaatatccacatactttccaggtgtctgggaaagagagaacactggaactgcaggccagttctgcgcaagacaaagaagaatggatcaaggcccttcaagaaaccatcgatgcttttcatcaaaggcatgaaaccttcagaaatgcaattgcaaaggataatgacattcactcagaggtttctactgctgagctagggaaaagagccccaagatggatccgagataatgaagtgacaatgtgtatgaaatgtaaagaacctttcaatgcactgacacgaaggaggcatcattgtcgagcatgtggatatgtggtttgttggaaatgctccgactacaaagctcaacttgaatatgatggtggtaaattgagcaaagtttgtaaagactgttatcaaatcataagtggattcacagacagtgaagaaaagaaaagaaaaggaattttagagattgaatcagcagaagtatctggaaacagtgtggtgtgcagctttcttcagtatatggagaagtcaaaaccttggcagaaagcttggtgtgtgatccccaagcaagaccctcttgtgctgtacatgtatggtgccccccaggtatctaaaccacatctgtctgaagggacagatgcccttgggggcaaggggaagcgagtggacagcggactcaaaatctgtagaacaagagttcaggcagtttcactgtttcattaaaattg

SEQ ID NO: 115966 - DNA, 1416 bp, Artificial Sequence
  derived and/or modified sequence
atggtcaataagatcttttctaatattagtagcattaacgcgttccacagcaagttcctgctgcctgaactggagaaacggatgcaagagtgggaaactacaccgcgcattggcgatatcttacaaaagctagctccattcctaaagatgtacggtgaatacgtcaaggggttcgataatgcaatggagctggtcaagaatatgacagagcgaatcccacaattcaagagcgtagtggaggagattcagaaacagaaaatttgtggctctctcacgctccagcaccatatgctggaaccagtgcaaaggatcccgcgttatgagatgttactgaaggactaccttcgaaaattacctccagactccctggattggaacgatgccaagaaaagcttagagataatatcaacagcagcgtctcactcaaactctgcaatcaggaaaatggagaacttaaagaaattgcttgaaatctatgagatgctgggtgaggaagaggacattgttaatccatcaaatgaactgatcaaggagggacagattctgaagctggccgctaggaatactagtgcccaggagagatacttatttctgttcaacaacatgctcctctattgcgtgcctaaattttcgttggttgggtctaagttcactgtgaggacaagagtgggaatagacgggatgaaaatcgttgagacgcaaaatgaagagtaccctcatactttccaggtgagtggcaaggagagaacacttgagcttcaggcctcatccgctcaggataaggaagagtggatcaaggcgctgcaggaaacgattgacgcattccaccagaggcacgagacatttagaaacgccatcgccaaggacaatgacatccatagcgaggtcagcactgcggagctcggcaagcgtgcaccacggtggattcgggataatgaggtaacaatgtgtatgaagtgtaaagaaccgtttaatgccctcacccgaaggaggcaccactgcagagcttgtggctacgtggtgtgttggaagtgttccgattataaagcacaattggagtatgacggtggaaagctctccaaagtgtgcaaagattgctatcagatcatttccgggttcactgattccgaggaaaagaaaaggaaggggatcctggagatcgaaagcgccgaagtttcaggaaactctgtggtctgtagtttcttgcaatacatggaaaagtctaagccctggcagaaggcctggtgcgtgatcccgaagcaggaccccctagtgctgtatatgtacggcgctcctcaggttagtaaacctcacctgagtgagggcactgatgccctcggtggcaagggtaagagggtcgactcagggctgaagatttgcaggactcgagtgcaggccgtgtcactgttccactag

SEQ ID NO: 115967 - DNA, 843 bp, Artificial Sequence
  derived and/or modified sequence
atggtcaataagatttttagtaatatttcgtcaattaatgcattccattccaagttccttttaccggagctcgaaaaaaggatgcaggaatgggagactacccccaggattggtgatattttgcagaagctagcaccttttctcaaaatgtatggcgaatatgtgaagggcttcgataatgctatggaactggtgaaaaacatgactgaacgcatccctcagttcaagagcgtagttgaggaaatacagaaacagaagatctgtggcagcctcaccctgcagcatcatatgctcgaaccagtccagagaatccctaggtacgaaatgctgttgaaggactatctgcgaaagctgccaccggattctctggactggaatgatgctaaaaagagtttggagatcatcagtaccgctgctagccacagcaatagtgctatccgaaaaatggagaacctgaagaagctgttagagatctatgagatgcttggggaggaagaggacatcgtgaacccaagcaatgaactgataaaagaaggccagattttgaaactagctgcacggaacacttccgcccaggagcgttatctctttctgttcaataatatgttgttgtattgcgttcccaagtttagtctggtcggatctaaatttaccgtccggaccagagtcggaattgacggaatgaagattgtggagactcagaatgaggagtatccacacaccttccaggtttcgggaaaggaacgcacgctggagctgcaggccagttcagcacaagacaaggaggaatggatcaagcgcagggggtttgccatgctgccacgtttaatatcaaacagttag

SEQ ID NO: 115968 - DNA, 1416 bp, Artificial Sequence
  derived and/or modified sequence
atggtgaacaagatcttcagcaacatcagcagcatcaatgccttccacagcaagttcctgctgcctgagctggagaagaggatgcaggagtgggagaccaccccaagaattggagacatcctgcagaagctggcccccttcctgaagatgtatggagaatatgtgaagggctttgacaatgccatggagctggtgaagaacatgacagagcgcatcccccagttcaagtctgtggtggaggagatccagaagcagaagatctgtggcagcctgaccctgcagcaccacatgctggagcctgtgcagaggatccccaggtatgagatgctgctgaaggactacctgaggaagctgcccccagacagcctggactggaatgatgccaagaagagcctggagatcatcagcacagctgccagccacagcaacagcgccatcaggaagatggagaacctgaagaagctgctggagatctatgagatgctgggggaggaggaggacatcgtgaaccccagcaatgaactcatcaaggagggccagatcctgaagctggccgccaggaacaccagcgcccaggagcgctacctgttcctgttcaacaacatgctgctgtactgtgtgcccaagttcagcctggtgggcagcaagttcaccgtgaggaccagggtgggcattgatggcatgaagatcgtggagacccagaatgaggagtacccccacaccttccaggtgtctgggaaggagaggaccctggagctgcaggccagcagcgcccaggacaaggaggagtggatcaaggccctgcaggagaccattgatgccttccaccagagacatgagaccttcagaaatgccatcgccaaggacaatgacatccacagcgaggtgtccacagctgagctgggcaagagggccccccgctggatccgggacaatgaggtgaccatgtgcatgaagtgcaaggagcccttcaatgccctgacccggcggcggcaccactgccgggcctgtggctacgtggtgtgctggaagtgcagcgactacaaggcccagctggagtatgatggcggcaagctgagcaaggtgtgcaaggactgctaccagatcatcagcggcttcacagacagcgaggagaagaagaggaagggcatcctggagattgaatctgctgaggtgtctggcaacagcgtggtgtgcagcttcctgcagtacatggagaagagcaagccctggcagaaggcctggtgtgtgatccccaagcaggaccccctggtgctgtacatgtatggagccccccaggtgtccaagccccacctgtctgagggcacagatgccctgggcggcaagggcaagagggtggacagcggcctgaagatctgcaggaccagggtgcaggccgtgtccctcttccactag

SEQ ID NO: 115969 - DNA, 843 bp, Artificial Sequence
  derived and/or modified sequence
atggtgaacaagatcttcagcaacatcagcagcatcaatgccttccacagcaagttcctgctgcctgagctggagaagaggatgcaggagtgggagaccaccccaagaattggagacatcctgcagaagctggcccccttcctgaagatgtatggagaatatgtgaagggctttgacaatgccatggagctggtgaagaacatgacagagcgcatcccccagttcaagtctgtggtggaggagatccagaagcagaagatctgtggcagcctgaccctgcagcaccacatgctggagcctgtgcagaggatccccaggtatgagatgctgctgaaggactacctgaggaagctgcccccagacagcctggactggaatgatgccaagaagagcctggagatcatcagcacagctgccagccacagcaacagcgccatcaggaagatggagaacctgaagaagctgctggagatctatgagatgctgggggaggaggaggacatcgtgaaccccagcaatgaactcatcaaggagggccagatcctgaagctggccgccaggaacaccagcgcccaggagcgctacctgttcctgttcaacaacatgctgctgtactgtgtgcccaagttcagcctggtgggcagcaagttcaccgtgaggaccagggtgggcattgatggcatgaagatcgtggagacccagaatgaggagtacccccacaccttccaggtgtctgggaaggagaggaccctggagctgcaggccagcagcgcccaggacaaggaggagtggatcaagagaagaggatttgccatgctgcccaggctcatcagcaacagctag

SEQ ID NO: 115970 - DNA, 1416 bp, Artificial Sequence
  derived and/or modified sequence
atggtgaacaagatcttcagcaacatcagcagcatcaacgccttccactcgaagtttcttcttcctgaactcgagaagaggatgcaggagtgggagactactcctcgaatcggggacatactacagaaactcgctcctttccttaagatgtacggcgagtatgtgaaggggttcgacaatgccatggaattagtgaagaatatgaccgagcgaattccacagtttaagtctgtagtggaggagatccaaaagcaaaaaatttgcggctcattgactcttcaacatcacatgcttgagcctgtgcagaggatccccagatatgaaatgctactgaaggactacttacggaagctccccccagattctctggattggaacgacgcaaagaaatctctagaaattatttctaccgctgctagtcattccaattccgccataaggaagatggaaaatttaaagaagctcctggaaatctacgagatgctgggagaggaagaagacatcgtgaatccttctaatgaacttataaaagaaggacagatcctgaagcttgccgcacggaacactagcgcccaggaacgatacctgttcttattcaacaatatgcttctttattgtgtccccaagttttccctggtcggctccaaatttaccgttaggacccgggtgggtatagatgggatgaaaattgtcgaaacgcagaacgaggaatatccgcacacctttcaggtgtcaggcaaggagcgaacgcttgaactccaggcctcttccgcccaggataaggaggaatggatcaaggccctgcaagagaccatagacgcatttcaccagagacatgagactttccggaatgcaattgcaaaagacaatgacatccacagcgaggtctccactgctgagctggggaaacgagcacccagatggatccgcgacaatgaggtaactatgtgcatgaagtgtaaagaaccctttaacgcgctgacacgaagacgccatcattgcagggcctgcgggtacgtagtgtgctggaagtgtagtgattacaaggcccagttagagtatgatggaggtaagctgtcgaaagtttgcaaagattgttaccaaatcatttccggctttaccgattctgaggagaagaaaagaaaaggaatcctcgagatagagagcgcagaagtgagtggaaattcagtggtctgctcttttcttcaatatatggagaagagcaaaccctggcagaaagcctggtgcgtcatccccaaacaggaccctctcgtgctttacatgtatggagccccccaagtttctaaaccacacctcagcgaaggaactgacgctctgggtggcaaaggtaaacgggtggatagcggattgaagatctgcagaacaagagtacaagctgtgagtctgttccactag

SEQ ID NO: 115971 - DNA, 843 bp, Artificial Sequence
  derived and/or modified sequence
atggtgaacaagatcttcagcaacatcagcagcatcaacgccttccactctaaattcctgctacctgagctggaaaaacgcatgcaggaatgggaaaccactcctcggataggcgatatccttcagaagcttgcccccttcctgaagatgtacggagaatatgttaaaggctttgacaatgctatggagctagtcaagaacatgacggagaggatcccccagtttaaatctgttgtcgaggaaatccaaaaacagaagatatgtggctcattgacactgcagcatcacatgctggagcccgtgcagcggatccctaggtacgaaatgctgctaaaggattatctgcgcaagctgccaccggatagtctggattggaatgatgccaagaaatcgctggagattatctctactgcagcctcccattcgaattctgccataaggaaaatggagaatctgaagaagctgctggaaatatatgagatgttaggcgaggaagaggatatcgtaaacccgagtaacgaattgataaaggaaggtcagatcctgaagctcgctgcccgcaatacatccgcccaggagcgctatctattccttttcaacaatatgctgctttattgcgttccaaagttctcactggtggggtcaaagtttacagtgcgaacaagagtcggcattgacgggatgaaaatcgtggagacacaaaacgaagagtatccgcacacatttcaggtatcgggaaaagagcgcacactggaactgcaggcgtccagcgcccaggataaggaagaatggattaagaggaggggtttcgctatgttgcccagacttatttccaattcttag

SEQ ID NO: 115972 - DNA, 1416 bp, Artificial Sequence
  derived and/or modified sequence
atggtgaataagatcttctcaaatatttctagtatcaatgccttccatagcaagttccttttgccagaactggagaagcggatgcaggagtgggagactacgccgaggatcggggacatccttcagaagctggcccctttcctgaaaatgtacggcgagtacgtgaaaggattcgacaacgctatggagcttgtaaagaacatgaccgaacgtattcctcagtttaaaagcgtggtcgaagaaatccagaaacagaaaatctgcggtagcctgacgctgcaacatcacatgttggaaccagtccagcggataccaaggtatgagatgctcctaaaagactacctccgaaaattgccacctgactccctagactggaacgacgccaaaaaatctctagaaattatcagcacggcggcttcccactcaaatagcgcgatacgcaaaatggagaatctcaaaaagctgctggagatctatgagatgctaggagaggaagaggatattgtgaatccatctaacgagctgattaaagagggacaaattcttaaactggctgcacgtaacacctctgcccaggaacggtacctatttctgttcaacaacatgttgttatattgcgtcccgaagtttagcctggtgggaagtaaatttactgttcggacacgcgtggggattgatgggatgaaaatcgtcgagacccagaacgaggagtacccacatacatttcaagtctccggtaaggagagaaccctggaactgcaggccagcagcgcacaggataaggaagagtggatcaaggctttgcaggaaactatcgacgcttttcaccaacggcacgagactttccgcaatgctatcgccaaagataatgacattcactcggaggtcagcacagccgagctgggaaagcgggcaccaaggtggattcgcgataatgaggtcacaatgtgtatgaagtgcaaagaaccgttcaacgccttgaccaggcgacgccaccactgcagagcctgcggttacgtggtctgttggaagtgcagcgattataaagcacagctagaatacgatggtgggaagctcagcaaggtatgtaaagactgttatcaaataataagcggcttcaccgacagcgaagaaaagaagaggaaggggatcttggagatcgaatccgccgaagtcagtggcaattcagtcgtctgcagtttcctgcagtatatggagaagtccaaaccgtggcagaaagcctggtgtgtgatcccaaaacaggacccactggtgttgtacatgtacggagcaccccaagtgtccaagccgcatctcagcgaagggaccgacgccctgggtggaaaaggaaagcgggtagatagcggcctgaaaatctgtcgcacacgggtacaagcagtctccctgtttcattag

SEQ ID NO: 115973 - DNA, 843 bp, Artificial Sequence
  derived and/or modified sequence
atggtgaacaaaattttcagcaacattagttcgattaacgcttttcactctaaatttctgctcccagagctcgagaaaagaatgcaggaatgggaaaccactcccaggattggcgatattttgcagaagctcgctcccttcttgaagatgtatggcgagtatgttaagggatttgacaacgccatggagttagtgaagaatatgacagagagaataccccagtttaagtcggtcgtggaggaaatccaaaaacagaagatatgcggctccctgacgttacaacatcacatgctggaacccgtgcagagaattccccgatacgagatgttgctcaaagactacctccgcaaattgccacctgattccctcgactggaatgacgccaagaagagtctggagattatttcaaccgccgcatctcacagcaatagcgccattcgaaaaatggagaatctcaaaaaactgcttgaaatctacgaaatgctgggcgaggaggaggacattgttaacccatccaatgaactgatcaaggagggtcaaatattaaaactcgccgctaggaacacgtcagcacaagagagatatttgtttctatttaataatatgttgttgtattgtgtgcccaagttcagcctcgtgggaagtaagtttaccgtgagaactagggttgggatagacggcatgaagattgtggaaactcaaaacgaagaatacccgcatacttttcaggtgtctggcaaggaaagaactcttgaacttcaggccagctcagcccaagataaggaggagtggatcaagagacgcggttttgctatgttaccgcgactgatctctaattcttag

SEQ ID NO: 115974 - DNA, 1416 bp, Artificial Sequence
  derived and/or modified sequence
atggtgaacaagatcttcagcaacatcagcagcatcaacgccttccacagcaagttcctgctgcccgagctggagaagagaatgcaggagtgggagaccacccccagaatcggcgacatcctgcagaagctggcccccttcctgaagatgtacggcgagtacgtgaagggcttcgacaacgccatggagctggtgaagaacatgaccgagagaatcccccagttcaagagcgtggtggaggagatccagaagcagaagatctgcggcagcctgaccctgcagcaccacatgctggagcccgtgcagagaatccccagatacgagatgctgctgaaggactacctgagaaagctgccccccgacagcctggactggaacgacgccaagaagagcctggagatcatcagcaccgccgccagccacagcaacagcgccatcagaaagatggagaacctgaagaagctgctggagatctacgagatgctgggcgaggaggaggacatcgtgaaccccagcaacgagctgatcaaggagggccagatcctgaagctggccgccagaaacaccagcgcccaggagagatacctgttcctgttcaacaacatgctgctgtactgcgtgcccaagttcagcctggtgggcagcaagttcaccgtgagaaccagagtgggcatcgacggcatgaagatcgtggagacccagaacgaggagtacccccacaccttccaggtgagcggcaaggagagaaccctggagctgcaggccagcagcgcccaggacaaggaggagtggatcaaggccctgcaggagaccatcgacgccttccaccagagacacgagaccttcagaaacgccatcgccaaggacaacgacatccacagcgaggtgagcaccgccgagctgggcaagagagcccccagatggatcagagacaacgaggtgaccatgtgcatgaagtgcaaggagcccttcaacgccctgaccagaagaagacaccactgcagagcctgcggctacgtggtgtgctggaagtgcagcgactacaaggcccagctggagtacgacggcggcaagctgagcaaggtgtgcaaggactgctaccagatcatcagcggcttcaccgacagcgaggagaagaagagaaagggcatcctggagatcgagagcgccgaggtgagcggcaacagcgtggtgtgcagcttcctgcagtacatggagaagagcaagccctggcagaaggcctggtgcgtgatccccaagcaggaccccctggtgctgtacatgtacggcgccccccaggtgagcaagccccacctgagcgagggcaccgacgccctgggcggcaagggcaagagagtggacagcggcctgaagatctgcagaaccagagtgcaggccgtgagcctgttccactag

SEQ ID NO: 115975 - DNA, 843 bp, Artificial Sequence
  derived and/or modified sequence
atggtgaacaagatcttcagcaacatcagcagcatcaacgccttccacagcaagttcctgctgcccgagctggagaagagaatgcaggagtgggagaccacccccagaatcggcgacatcctgcagaagctggcccccttcctgaagatgtacggcgagtacgtgaagggcttcgacaacgccatggagctggtgaagaacatgaccgagagaatcccccagttcaagagcgtggtggaggagatccagaagcagaagatctgcggcagcctgaccctgcagcaccacatgctggagcccgtgcagagaatccccagatacgagatgctgctgaaggactacctgagaaagctgccccccgacagcctggactggaacgacgccaagaagagcctggagatcatcagcaccgccgccagccacagcaacagcgccatcagaaagatggagaacctgaagaagctgctggagatctacgagatgctgggcgaggaggaggacatcgtgaaccccagcaacgagctgatcaaggagggccagatcctgaagctggccgccagaaacaccagcgcccaggagagatacctgttcctgttcaacaacatgctgctgtactgcgtgcccaagttcagcctggtgggcagcaagttcaccgtgagaaccagagtgggcatcgacggcatgaagatcgtggagacccagaacgaggagtacccccacaccttccaggtgagcggcaaggagagaaccctggagctgcaggccagcagcgcccaggacaaggaggagtggatcaagagaagaggcttcgccatgctgcccagactgatcagcaacagctag

SEQ ID NO: 115976 - protein, 643 aa, Artificial Sequence
  derived and/or modified sequence
MLENYGNVASLGFPLLKPAVISQLEGGSELGGSSPLAAGTGLQGLQTDIQTDNDLTKEMYEGKENVSFELQRDFSQETDFSEASLLEKQQEVHSAGNIKKEKSNTIDGTVKDETSPVEECFFSQSSNSYQCHTITGEQPSGCTGLGKSISFDTKLVKHEIINSEERPFKCEELVEPFRCDSQLIQHQENNTEEKPYQCSECGKAFSINEKLIWHQRLHSGEKPFKCVECGKSFSYSSHYITHQTIHSGEKPYQCKMCGKAFSVNGSLSRHQRIHTGEKPYQCKECGNGFSCSSAYITHQRVHTGEKPYECNDCGKAFNVNAKLIQHQRIHTGEKPYECNECGKGFRCSSQLRQHQSIHTGEKPYQCKECGKGFNNNTKLIQHQRIHTGEKPYECTECGKAFSVKGKLIQHQRIHTGEKPYECNECGKAFRCNSQFRQHLRIHTGEKPYECNECGKAFSVNGKLMRHQRIHTGEKPFECNECGRCFTSKRNLLDHHRIHTGEKPYQCKECGKAFSINAKLTRHQRIHTGEKPFKCMECEKAFSCSSNYIVHQRIHTGEKPFQCKECGKAFHVNAHLIRHQRSHTGEKPFRCVECGKGFSFSSDYIIHQTVHTWKKPYMCSVCGKAFRFSFQLSQHQSVHSEGKS

SEQ ID NO: 115977 - protein, 415 aa, Artificial Sequence
  derived and/or modified sequence
CGKAFSINEKLIWHQRLHSGEKPFKCVECGKSFSYSSHYITHQTIHSGEKPYQCKMCGKAFSVNGSLSRHQRIHTGEKPYQCKECGNGFSCSSAYITHQRVHTGEKPYECNDCGKAFNVNAKLIQHQRIHTGEKPYECNECGKGFRCSSQLRQHQSIHTGEKPYQCKECGKGFNNNTKLIQHQRIHTGEKPYECNECGKAFRCNSQFRQHLRIHTGEKPYECNECGKAFSVNGKLMRHQRIHTGEKPFECNECGRCFTSKRNLLDHHRIHTGEKPYQCKECGKAFSINAKLTRHQRIHTGEKPFKCMECEKAFSCSSNYIVHQRIHTGEKPFQCKECGKAFHVNAHLIRHQRSHTGEKPFRCVECGKGFSFSSDYIIHQTVHTWKKPYMCSVCGKAFRFSFQLSQHQSVHSEGKS

SEQ ID NO: 115978 - protein, 585 aa, Artificial Sequence
  derived and/or modified sequence
MYEGKENVSFELQRDFSQETDFSEASLLEKQQEVHSAGNIKKEKSNTIDGTVKDETSPVEECFFSQSSNSYQCHTITGEQPSGCTGLGKSISFDTKLVKHEIINSEERPFKCEELVEPFRCDSQLIQHQENNTEEKPYQCSECGKAFSINEKLIWHQRLHSGEKPFKCVECGKSFSYSSHYITHQTIHSGEKPYQCKMCGKAFSVNGSLSRHQRIHTGEKPYQCKECGNGFSCSSAYITHQRVHTGEKPYECNDCGKAFNVNAKLIQHQRIHTGEKPYECNECGKGFRCSSQLRQHQSIHTGEKPYQCKECGKGFNNNTKLIQHQRIHTGEKPYECTECGKAFSVKGKLIQHQRIHTGEKPYECNECGKAFRCNSQFRQHLRIHTGEKPYECNECGKAFSVNGKLMRHQRIHTGEKPFECNECGRCFTSKRNLLDHHRIHTGEKPYQCKECGKAFSINAKLTRHQRIHTGEKPFKCMECEKAFSCSSNYIVHQRIHTGEKPFQCKECGKAFHVNAHLIRHQRSHTGEKPFRCVECGKGFSFSSDYIIHQTVHTWKKPYMCSVCGKAFRFSFQLSQHQSVHSEGKS

SEQ ID NO: 115979 - DNA, 2293 bp, Artificial Sequence
  derived and/or modified sequence
gagactgacaatgatttgacaaaggaaatgtatgaaggaaaagagaatgtatcatttgaacttcaaagagacttttcccaggaaacagacttttcagaagcctctcttctagagaaacaacaggaagtccactcagcaggaaatataaagaaggagaagagcaacaccattgatggaacagtgaaagatgagacaagccccgtggaggagtgtttttttagtcaaagttcaaactcatatcagtgtcataccatcactggagagcagccctctgggtgtacaggattggggaaatccatcagctttgatacaaaactcgtgaagcatgaaataattaattctgaggaaagacctttcaaatgtgaagaattagtagagccctttaggtgtgactctcaacttattcaacatcaagagaacaacactgaggaaaagccttatcagtgttcggagtgtggcaaagctttcagcattaatgagaaattaatttggcatcagagacttcacagtggggagaaacccttcaaatgtgtggagtgtgggaaaagcttcagctacagttcccattatatcacacatcagacaatccacagtggggagaagccctatcagtgtaagatgtgtgggaaggccttcagtgttaatggaagcctaagtaggcatcagagaatccatacgggagagaagccctatcagtgcaaggaatgtggaaatggcttcagctgtagttctgcatatattacacatcagagagtccacactggagagaaaccttacgagtgtaatgactgtgggaaagcgttcaatgttaatgcaaaattaattcaacatcagagaatccatactggagagaaaccttatgaatgtaatgaatgtggaaaaggcttcaggtgcagctcccagcttaggcagcatcagagcatccacacaggagaaaagccctatcagtgtaaagagtgtggaaaaggcttcaataataatacaaaactcattcagcatcagagaatccacacaggtgagaaaccctatgaatgcactgaatgtggaaaagccttcagtgtcaaagggaagttaatccaacaccagagaattcacacaggcgagaaaccctatgagtgtaatgaatgcgggaaagccttcagatgtaactcccaatttcggcagcatctgagaattcacactggggagaagccctatgagtgtaatgagtgtggaaaggccttcagcgttaatgggaaactaatgcggcatcagagaattcacactggggagaaaccttttgaatgtaatgagtgtgggagatgctttacttctaaaagaaacctacttgatcatcaccgaatccatactggagaaaagccctatcaatgtaaggaatgtgggaaagccttcagtatcaatgccaaactaactaggcatcagaggatacatactggggagaaacctttcaaatgtatggaatgtgagaaagcattcagctgtagttctaactatattgtgcaccagagaatccatacaggagagaaaccctttcagtgtaaggagtgtggaaaagccttccatgttaatgcccatttaattcggcatcagagaagccacactggggagaaacccttcagatgtgtggaatgtggcaaaggcttcagctttagttctgactacattatacatcagacagtccacacttggaagaaaccctatatgtgtagtgtgtgtgggaaagcattcaggtttagcttccagctcagtcagcatcagagtgtccatagtgaaggaaaatcctaataatgagaaagatatagaaaactcttaaggttaatgccaaaatggatcaagtatcatcagattcatccattgaaaaacctccaagagggcatgaatatggcagagtcttcatatggaaacagtttttattctattcagtttaaatcaggaaaggatgaccagttaaagagaaacatccaaaaatagctttgttttgtaccaacaggaattagaaaatataatgaaaagatttcgttcccagcagcatcaagaaaagtagattttctagaaataaacagttatggaggacttgtatggagaaatttaagtcttcactgagggccactttacaaaggaaatttgaataaatggagagagagagaagccttgttgttggataggaaaacccgtactaaagatactctacctacattaatttatttgtttaatttttgacaacaagcatgtattacttttgaaaagatgaaaaataaagatttatttaaaaaaggaaaaaaaaaaaaaaaaa

SEQ ID NO: 115980 - DNA, 1932 bp, Artificial Sequence
  derived and/or modified sequence
atgctggagaactacggcaacgtggccagcctgggcttccccctgctgaagcccgccgtgatcagccagctggagggcggcagcgagctgggcggcagcagccccctggccgccggcaccggcctgcagggcctgcagaccgacatccagaccgacaacgacctgaccaaggagatgtacgagggcaaggagaacgtgagcttcgagctgcagagagacttcagccaggagaccgacttcagcgaggccagcctgctggagaagcagcaggaggtgcacagcgccggcaacatcaagaaggagaagagcaacaccatcgacggcaccgtgaaggacgagaccagccccgtggaggagtgcttcttcagccagagcagcaacagctaccagtgccacaccatcaccggcgagcagcccagcggctgcaccggcctgggcaagagcatcagcttcgacaccaagctggtgaagcacgagatcatcaacagcgaggagagacccttcaagtgcgaggagctggtggagcccttcagatgcgacagccagctgatccagcaccaggagaacaacaccgaggagaagccctaccagtgcagcgagtgcggcaaggccttcagcatcaacgagaagctgatctggcaccagagactgcacagcggcgagaagcccttcaagtgcgtggagtgcggcaagagcttcagctacagcagccactacatcacccaccagaccatccacagcggcgagaagccctaccagtgcaagatgtgcggcaaggccttcagcgtgaacggcagcctgagcagacaccagagaatccacaccggcgagaagccctaccagtgcaaggagtgcggcaacggcttcagctgcagcagcgcctacatcacccaccagagagtgcacaccggcgagaagccctacgagtgcaacgactgcggcaaggccttcaacgtgaacgccaagctgatccagcaccagagaatccacaccggcgagaagccctacgagtgcaacgagtgcggcaagggcttcagatgcagcagccagctgagacagcaccagagcatccacaccggcgagaagccctaccagtgcaaggagtgcggcaagggcttcaacaacaacaccaagctgatccagcaccagagaatccacaccggcgagaagccctacgagtgcaccgagtgcggcaaggccttcagcgtgaagggcaagctgatccagcaccagagaatccacaccggcgagaagccctacgagtgcaacgagtgcggcaaggccttcagatgcaacagccagttcagacagcacctgagaatccacaccggcgagaagccctacgagtgcaacgagtgcggcaaggccttcagcgtgaacggcaagctgatgagacaccagagaatccacaccggcgagaagcccttcgagtgcaacgagtgcggcagatgcttcaccagcaagagaaacctgctggaccaccacagaatccacaccggcgagaagccctaccagtgcaaggagtgcggcaaggccttcagcatcaacgccaagctgaccagacaccagagaatccacaccggcgagaagcccttcaagtgcatggagtgcgagaaggccttcagctgcagcagcaactacatcgtgcaccagagaatccacaccggcgagaagcccttccagtgcaaggagtgcggcaaggccttccacgtgaacgcccacctgatcagacaccagagaagccacaccggcgagaagcccttcagatgcgtggagtgcggcaagggcttcagcttcagcagcgactacatcatccaccagaccgtgcacacctggaagaagccctacatgtgcagcgtgtgcggcaaggccttcagattcagcttccagctgagccagcaccagagcgtgcacagcgagggcaagagctag

SEQ ID NO: 115981 - DNA, 1932 bp, Artificial Sequence
  derived and/or modified sequence
atgctggagaactacgggaatgtggcctcacttgggtttcctctgttaaagcccgcggtgatatcccaactggagggcggtagcgagctcggaggttcctccccgctggccgccggtacgggccttcagggtttacagaccgacatccaaactgacaatgacctcaccaaagaaatgtatgagggtaaggaaaacgtgagctttgagttacagagagacttctcccaagagactgatttctcagaagctagtctgctggagaagcaacaggaagttcactccgctgggaatattaaaaaagaaaagtctaacacaatagatggcactgtgaaagatgaaacatctcctgtggaagaatgttttttttcacagtctagcaactcgtatcagtgccacaccataacgggggagcaaccgagcggctgtaccggcctaggaaaatccatatccttcgacaccaagctggtgaaacacgaaattataaacagtgaggaacggccctttaaatgcgaggaactggttgagccctttagatgtgacagtcaactcattcaacaccaggagaacaatacagaggagaagccctatcagtgttcagagtgtggcaaggccttcagcattaatgaaaagctgatttggcatcagaggctccactccggggagaaacccttcaagtgtgtggagtgcggcaagtcattttcctactcgagccactacattactcatcagactattcattctggggaaaaaccctaccagtgcaagatgtgcggaaaggcatttagcgtgaatggaagcctgtccaggcaccagcgcatccacacgggcgagaaaccttatcagtgtaaagagtgtggcaacggcttcagctgctctagcgcctacatcactcatcaacgcgtacatacaggcgaaaaaccctatgaatgcaatgattgcggcaaggcatttaacgttaatgctaaactcatccagcaccagaggattcacaccggagaaaaaccttatgagtgcaacgaatgtggcaagggtttcaggtgctcctctcagctacgtcagcaccagagtattcacactggagaaaagccataccagtgtaaggaatgtgggaagggcttcaataacaatacgaaactgatccagcaccagcggatacacactggtgagaaaccttacgagtgcactgaatgtgggaaggcattttcagtgaaggggaagctgatccaacaccaaagaatccacacgggcgagaagccgtacgagtgtaatgaatgcgggaaagcttttcgctgtaatagtcagttccgccagcatttacgcattcacacaggagagaagccttatgagtgcaacgaatgcgggaaggccttcagcgtaaatggaaagcttatgcggcatcagagaatccacacaggagagaaacccttcgagtgcaatgagtgtgggcgctgttttacctctaagagaaatctgctggaccatcaccgtattcatacgggcgagaagccttatcagtgtaaagagtgcggcaaagcattcagcatcaatgcaaagcttacccggcaccagcgtatacatacaggagagaagccgttcaaatgtatggagtgtgaaaaagcattttcctgctcttcgaactacatcgtgcaccaacgtattcataccggggagaaaccctttcagtgcaaagagtgcgggaaggcttttcatgtgaacgctcacctcattagacaccagcgctcccatacaggcgaaaagccctttcgctgcgtcgaatgcgggaagggtttttcctttagcagcgactatattattcaccaaacggtgcatacatggaagaagccctacatgtgttccgtgtgcggcaaagcatttcgattctcgttccagttgtctcagcaccagtctgtgcattcagaaggcaaaagctag

SEQ ID NO: 115982 - DNA, 1932 bp, Artificial Sequence
  derived and/or modified sequence
atgctagaaaactacggcaatgtcgcctcattgggtttccccctcctcaaacctgcagtcatctcccaactcgaaggagggtctgagctgggtggaagctctcctctagctgcaggaacaggcctgcaaggtctgcagactgacatccagaccgataatgatctaaccaaagagatgtacgaaggtaaagagaacgtatcctttgaattgcagagggacttttctcaagagactgactttagcgaagcttcattgctcgaaaagcagcaagaagttcactctgctggaaacatcaaaaaggagaagtctaacaccatcgacggaaccgtcaaggatgagacaagtcctgtggaggagtgcttcttctctcagtcaagcaattcttatcagtgccataccataaccggggaacagcccagtggatgtactggcctgggcaagtcaatctcttttgatacaaaacttgtgaagcacgaaatcattaactcggaagagaggcccttcaaatgtgaagagctcgttgagcctttccgatgtgattcccaactgatccagcaccaagaaaataatactgaagaaaagccatatcagtgtagtgagtgtggcaaagcattttcgatcaacgaaaaattgatctggcaccagagactccactctggtgagaagcctttcaaatgtgtagagtgtggcaagagcttctcgtacagcagtcactacattacccatcagacaatccacagtggagagaaaccataccagtgtaagatgtgcggcaaagcctttagcgtcaacggctcactgagccggcatcagcgaattcacaccggagagaagccttaccagtgtaaagagtgcgggaatggtttctcctgctcaagtgcttacatcacgcatcagcgcgtgcatacaggcgagaagccctacgagtgcaatgattgcggcaaagctttcaacgtgaacgccaaactgatccagcatcaacgcatccatactggtgaaaaaccatacgagtgtaatgagtgtggaaaggggttcaggtgttcctcccaactgcggcagcatcagtctatccacactggagagaagccctaccagtgtaaagaatgtggcaagggtttcaacaataacacaaagctaatacagcatcagcgaattcataccggagagaaaccctatgagtgtactgaatgtgggaaagccttctccgtgaagggaaagcttattcagcatcagagaattcacacaggggagaaaccctacgaatgcaatgagtgcgggaaggcttttcgttgcaactctcagtttaggcagcaccttcggatccatacaggtgagaagccctatgagtgtaatgaatgcgggaaggcttttagtgtaaacggtaagctgatgaggcaccagagaattcacaccggcgagaagccgtttgagtgcaacgaatgtggtagatgttttacaagcaaacgcaacctcctggatcaccaccggatccatactggggaaaaaccttatcagtgcaaagagtgcggaaaggctttttcaatcaacgctaagctgactcgacaccagcggattcatacaggggaaaagcctttcaaatgtatggagtgtgaaaaggccttctcttgttcatctaactacatagttcatcagaggattcatactggggaaaagccatttcagtgcaaagagtgcggaaaggcgtttcatgtgaacgcccatctgattcgtcaccaaagatcccatacgggagaaaaaccctttcggtgcgtggagtgcgggaagggattctcgttcagctcagactacatcatccatcagaccgtacacacatggaagaaaccttacatgtgtagtgtttgtggtaaggcattccgcttctcttttcagctgagccagcaccagagtgtccacagcgaagggaagtcctag

SEQ ID NO: 115983 - DNA, 1932 bp, Artificial Sequence
  derived and/or modified sequence
atgctggagaattacgggaatgtggcatcccttggtttcccattgctgaagccggctgttatttctcaactggaaggcggatccgaattaggcggtagttctcctttggcggcaggcactggcctgcaggggctccagactgacatacagacagataacgatctgacgaaggaaatgtatgagggaaaagagaacgtttcattcgagctgcagcgggatttcagccaggaaacagactttagcgaagcctctttgctagagaagcagcaggaggttcactccgctggaaatatcaagaaggagaagtccaacactattgatggcacagttaaggatgagacctctcctgttgaggaatgtttctttagtcaatcttccaattcttaccagtgccacactatcacgggagaacagccaagcgggtgtacaggtttgggcaaatctatcagcttcgacaccaaactcgtgaagcacgagattatcaattctgaggaaagaccatttaagtgcgaagagttggtggagccatttagatgcgactcacagttgattcaacaccaggagaacaacacagaggagaaaccatatcagtgctccgaatgcggcaaagccttctcaatcaatgagaaattgatctggcatcaaagactccactctggagaaaaaccctttaagtgcgtcgagtgcggaaagtcattctcgtattcctctcactatattacacaccaaacaatccactccggcgagaaaccgtaccagtgcaagatgtgcgggaaggcctttagcgtgaacgggtccctttctcgtcaccaacgtatccacactggcgaaaaaccctaccaatgcaaagagtgcgggaatggatttagttgtagcagcgcttatattacgcatcagagagtccacacaggcgaaaaaccttacgagtgcaatgattgtggcaaagcatttaatgtaaatgctaaactgatccagcaccagagaatacacacaggcgaaaaaccttatgaatgcaacgaatgtgggaaagggtttcgatgcagctcgcagctgcgacagcaccaatccattcacacaggagagaagccatatcagtgtaaggaatgcggaaagggctttaataacaataccaagctaatacaacaccagcggatccacacaggggaaaagccttacgagtgcaccgaatgcggtaaagccttctctgtgaaagggaaactgatccaacaccagcggatccacaccggtgaaaagccttatgaatgcaacgaatgtggcaaagcttttaggtgcaactctcagttccgtcagcatttaaggattcataccggtgaaaaaccatatgaatgcaatgaatgcggtaaggcatttagtgtgaacggtaagctgatgcgacaccagcgaatccatacgggcgaaaaaccgttcgagtgtaacgaatgtggtcgctgcttcacctcaaaacgcaacctgctcgaccaccacaggatccatacaggcgagaaaccctaccaatgtaaggagtgtggaaaagcgtttagcattaatgccaagctgacccgccaccaaaggattcacactggcgaaaaaccattcaagtgtatggagtgcgaaaaggctttctcctgttctagtaattacatcgttcaccaacgtatccacacgggcgagaaaccctttcagtgcaaagagtgtggcaaggcatttcacgtgaacgcacatctgattcgacatcaaagaagccatactggcgagaaaccttttcgctgtgtcgagtgtggtaagggcttctcattctcgtcagactatattattcaccagacggtgcatacatggaagaagccgtacatgtgctcggtgtgtggaaaagcattcaggttcagtttccagctgtcacagcaccagtccgttcactccgaggggaagtcctag

SEQ ID NO: 115984 - DNA, 1932 bp, Artificial Sequence
  derived and/or modified sequence
atgctggagaactatggaaatgtggccagcctgggcttccccctgctgaagccagctgtgatcagccagctggagggcggcagcgagctgggcggcagcagccccctggccgccggcaccggcctgcagggcctgcagacagacatccagacagacaatgacctgaccaaggagatgtatgagggcaaggaaaatgtgtcctttgagctgcagagggacttcagccaggagacagacttcagcgaggccagcctgctggagaagcagcaggaggtgcacagcgctggcaacatcaagaaggagaagagcaacaccattgatggcaccgtgaaggatgagaccagccctgtggaggagtgcttcttcagccagagcagcaacagctaccagtgccacaccatcactggagagcagcccagcggctgcaccggcctgggcaagagcatcagctttgacaccaagctggtgaagcatgagatcatcaacagcgaggagcggcccttcaagtgtgaggagctggtggagcccttccgctgtgacagccagctgatccagcaccaggagaacaacacagaggagaagccctaccagtgcagtgaatgtgggaaggccttcagcatcaatgagaagctgatctggcaccagaggctgcacagcggggagaagcccttcaagtgtgtggagtgtgggaagagcttctcctacagcagccactacatcacccaccagaccatccacagcggggagaagccctaccagtgcaagatgtgtgggaaggccttctctgtgaatggcagcctgagccgccaccagaggatccacactggagagaagccctaccagtgcaaggaatgtggaaatggcttcagctgcagcagcgcctacatcacccaccagagggtgcacactggagagaagccctatgaatgtaatgactgtgggaaggccttcaacgtgaatgccaagctgatccagcaccagaggatccacactggagagaagccctatgaatgtaatgaatgtgggaagggcttccgctgcagcagccagctgcggcagcaccagagcatccacactggagagaagccctaccagtgcaaggaatgtgggaagggcttcaacaacaacaccaagctgatccagcaccagaggatccacactggagagaagccctatgaatgtacagaatgtgggaaggccttctctgtgaagggcaagctgatccagcaccagaggatccacactggagagaagccctatgaatgtaatgaatgtgggaaggccttccgctgcaacagccagttccggcagcacctgcgcatccacactggagagaagccctatgaatgtaatgaatgtgggaaggccttctctgtgaatggcaagctgatgaggcaccagaggatccacactggagagaagccctttgaatgtaatgaatgtggccgctgcttcaccagcaagaggaacctgctggaccaccaccgcatccacactggagagaagccctaccagtgcaaggaatgtgggaaggccttcagcatcaatgccaagctgaccaggcaccagaggatccacactggagagaagcccttcaagtgcatggagtgtgagaaggccttcagctgcagcagcaactacatcgtgcaccagaggatccacactggagagaagcccttccagtgcaaggaatgtgggaaggccttccacgtgaatgcccacctgatccgccaccagaggagccacactggagagaagcccttccgctgtgtggagtgtgggaagggcttctccttcagcagtgactacatcatccaccagacagtgcacacctggaagaagccctacatgtgcagcgtgtgtgggaaggccttccgcttctccttccagctgagccagcaccagagcgtgcacagcgagggcaagagctag

SEQ ID NO: 115985 - DNA, 1932 bp, Artificial Sequence
  derived and/or modified sequence
atgctggagaactacggcaacgtggccagcctgggcttccccctgttgaaacccgcggtgatatcgcagttggagggcggaagtgagctgggcggtagctctccacttgcggcgggcaccggcttacagggactgcagacagacatccagactgacaacgatctcaccaaagagatgtacgaagggaaagagaacgttagtttcgaactccagagagattttagccaggaaacagacttttcggaagcgtcactgctggagaaacaacaagaggtgcactcggctggaaacatcaaaaaggagaagtcgaacactatcgatggtacggtgaaagacgagaccagccccgtcgaggaatgttttttcagccagtcaagcaatagttaccaatgtcatacgatcaccggggagcagccatccgggtgcaccgggctcggaaagtctatatcctttgacaccaagttggttaaacatgagattataaacagtgaggagcgaccgttcaagtgcgaggaactggttgagccctttagatgtgattctcagttaattcagcaccaggagaataacactgaagaaaagccctaccagtgctctgaatgtggcaaggccttttctatcaacgagaaactgatatggcatcagcgcctgcattcgggcgaaaaaccttttaagtgcgtggaatgtggtaagagcttttcttactcctcacactatattacccaccagaccatccacagcggcgagaagccctatcagtgtaagatgtgtggtaaggcctttagcgtcaacggctcattgtctcgccaccagaggatccacaccggtgagaagccctatcagtgcaaagagtgcggaaatggattctcttgttcaagtgcttacataacacatcagcgggtgcacacaggtgagaaaccctacgagtgcaatgattgtgggaaggccttcaacgtgaacgccaagctaattcagcaccagaggatacacactggcgagaagccatatgaatgtaacgagtgtggcaagggctttcggtgcagctctcaattaaggcaacaccagagcatacacactggcgagaagccatatcagtgtaaggagtgcggtaagggcttcaacaacaatacaaaattaattcagcaccaaagaatccacaccggtgagaagccctatgaatgtacagaatgtggaaaggctttttctgtgaagggcaaactgatccaacaccagaggatccatacgggggaaaagccttatgaatgcaacgaatgcggcaaggctttcagatgcaattctcagttcagacagcacttgcgaattcacactggggagaagccctatgagtgcaatgaatgcggaaaagccttttccgtcaatggcaagctcatgcggcatcagaggatacatacgggagagaagccattcgagtgtaatgaatgcgggagatgctttaccagcaagaggaatctcctcgaccaccaccggatccacactggcgagaaaccgtatcagtgcaaggagtgtggcaaggctttttccattaatgctaagctgacacggcaccaacgaattcatacaggagagaagcccttcaagtgtatggagtgtgagaaagccttttcttgtagttcaaattacatagtgcaccaacggatccacaccggggagaaaccctttcagtgtaaagaatgtggaaaggcattccacgtaaatgcccaccttatcaggcaccagcgatctcataccggggagaagcccttcagatgtgtagaatgcgggaaggggttcagcttttctagtgattatatcattcaccagaccgtgcatacttggaaaaaaccctacatgtgcagcgtctgcggaaaagcatttaggttttctttccagctgagccagcaccagtccgtacattctgaagggaaaagttag

SEQ ID NO: 115986 - DNA, 1932 bp, Artificial Sequence
  derived and/or modified sequence
atgctggagaactacggcaacgtggccagcctgggcttccccctgctgaagcctgcagtgatctcccagctggaagggggcagtgaactcggtgggagttcacctttggccgctggaaccgggcttcagggccttcagaccgacattcagactgataatgaccttaccaaagagatgtacgaaggcaaagaaaacgtaagcttcgagctgcagcgggatttttcgcaagagaccgacttcagtgaagcatctctcctggaaaagcagcaggaggttcactccgcggggaacattaaaaaggagaaatcaaatactatcgacggcacggtgaaggatgaaacctcacctgtggaggaatgcttctttagccagagctccaattcatatcaatgccacaccatcacaggcgaacagccttcaggctgcacgggcctgggcaagtctatctcttttgatactaagcttgtcaagcacgagatcatcaatagcgaagagcgaccctttaaatgtgaagagttggtggaacccttccgatgtgattcacagctcatacagcaccaggagaacaatacggaagaaaagccgtaccagtgtagcgaatgtggcaaggccttctcgattaatgagaagctcatatggcaccaaagactgcacagtggcgagaagcctttcaaatgtgtggaatgtggaaagtctttctcctactcatcccactacatcacccatcagacaatacattccggcgaaaaaccctaccagtgtaaaatgtgtggcaaggctttttccgtgaatggctctttgtcacgacatcaacgcatccatacaggggagaagccataccagtgtaaagaatgcggcaatggttttagttgcagttcagcttatattactcaccaacgagtgcacaccggcgaaaagccgtacgaatgtaatgattgtggtaaggctttcaatgtgaacgccaaactcattcaacaccagagaatccacacaggagagaaaccctatgaatgtaatgagtgcggaaaggggtttcggtgttcatcgcagttgagacaacaccagagtattcacacgggggaaaagccatatcaatgcaaggagtgtggaaagggcttcaacaacaataccaagctgattcagcaccagcgcattcacacaggcgagaaaccatatgagtgtaccgagtgcggcaaagcctttagcgtcaaaggaaagctgattcagcatcagagaattcatactggtgagaagccctacgagtgtaacgagtgcggcaaggccttccggtgtaatagccaattcagacaacacctacgcatccacacaggcgaaaaaccttacgagtgtaacgagtgcggcaaagctttttctgtgaatggaaagctgatgcgccaccaaaggatccataccggggagaagccgttcgagtgcaacgagtgcggacgctgcttcaccagtaagaggaatctgctcgaccatcatcggattcataccggcgagaaaccctaccaatgtaaggagtgcgggaaagcgttcagtatcaacgcaaaactcactcggcaccagcgtattcacaccggcgagaagcccttcaagtgcatggaatgtgagaaagcgttttcttgctcctcaaattacattgtgcaccagcgaatccatactggcgaaaaaccgttccaatgcaaggaatgcgggaaagcctttcacgtgaatgctcatctgatcagacaccaacgctcacacaccggggagaaaccctttaggtgtgtggagtgtggcaaggggttctcattctcaagcgactacatcattcatcagacggttcatacttggaaaaagccctatatgtgttctgtctgtggcaaagcattcaggttctcattccagcttagccagcaccagtcagtgcactctgaggggaagtcctag

SEQ ID NO: 115987 - DNA, 1932 bp, Artificial Sequence
  derived and/or modified sequence
atgctggagaactacggcaacgtggccagcctgggcttccccctgttaaaacctgcggtgatcagtcagttggaggggggcagcgaactgggtggttcttctcctctggctgccggcacaggcttgcagggcctgcagacagacattcagacggacaacgaccttacgaaggaaatgtacgagggtaaggagaatgtatcgtttgagctgcagcgcgactttagtcaagagaccgacttctcagaggctagcctgcttgagaagcagcaggaagtgcattccgcgggaaacattaagaaagagaagtccaacacgatcgatggcacagtgaaggatgaaacctcccccgtagaggagtgtttcttctctcagagttccaattcttatcagtgtcatactataacaggtgagcaaccgagtggttgtacgggtttgggcaaatcgatcagctttgatactaagctggtgaagcacgagattatcaactcagaggagcggccgtttaaatgtgaagagctcgtcgagccctttaggtgcgacagccaactgatccagcaccaagaaaataataccgaggaaaaaccttatcagtgctccgagtgcgggaaagccttcagcataaacgagaagctgatctggcaccagaggttacactctggcgagaagcctttcaagtgcgtcgagtgcggaaagagtttttcctactccagccactacataacacatcagacgattcattctggtgagaaaccatatcagtgtaaaatgtgtggtaaggccttttctgtaaacggctctctgtctcgccaccagcgcatccatacaggtgagaagccctaccagtgtaaggagtgtggcaacggttttagctgctcctcagcatacattacgcaccagagagtgcacactggggaaaagccatacgagtgcaatgattgtggcaaggcctttaacgttaacgccaaactgatacaacatcagagaatacacactggcgaaaagccctacgaatgcaacgagtgtgggaagggtttccgatgcagtagccaactgaggcagcaccagagtatccataccggagaaaaaccttatcagtgtaaggaatgtggtaagggctttaacaataatactaagctgatccaacaccagaggatacacacaggagagaaaccctacgaatgtacggaatgcggcaaagctttcagcgtgaagggaaaactgattcagcatcagaggatccacactggtgaaaaaccatacgagtgcaacgagtgtggcaaggccttcagatgtaattcacaattcaggcagcacctcagaattcataccggtgagaaaccctatgagtgcaacgagtgtgggaaggccttcagtgtgaacggtaagttgatgcgccatcagcggatccataccggcgaaaagccatttgagtgcaacgagtgtggacggtgctttacaagcaaaagaaatctgctggatcaccaccggattcatactggcgaaaaaccctaccagtgtaaagagtgtggcaaggccttttccattaatgcaaaattgaccaggcaccagcgcatccacacaggcgagaaaccattcaagtgtatggagtgtgagaaagctttcagttgttccagcaactacatcgtgcaccagaggatacacaccggcgaaaaaccattccagtgcaaagagtgcggaaaggcatttcatgtgaacgcccatttgatccggcaccagagaagccataccggtgaaaagccgtttcgatgtgtggagtgtggtaaaggattttccttctccagtgattatatcattcaccaaactgtgcacacctggaaaaaaccgtatatgtgttcagtctgtggcaaggctttccgattcagtttccaattatcccagcaccaatctgtgcacagcgagggcaaaagctag

SEQ ID NO: 115988 - DNA, 1932 bp, Artificial Sequence
  derived and/or modified sequence
atgctggagaactacggaaatgtggcgagtttaggcttccccttactgaaaccagctgtgatttcacagctagagggtggctctgagttaggtggatccagccctttggcagccggaacaggcctgcaagggctgcaaactgacattcaaaccgacaacgacttgaccaaggagatgtatgaaggaaaggaaaatgtgtcttttgaactgcagagagacttctctcaggaaactgatttcagcgaggcctcactgctcgagaagcagcaggaggttcattccgctggaaatatcaaaaaggaaaaaagtaataccattgatggcactgtcaaggacgagaccagccccgttgaggagtgcttctttagtcagagctccaactcttaccagtgtcacaccattactggcgagcaaccctccggttgcaccggcctcgggaaatcaatctcttttgacaccaaactcgtgaagcacgagatcatcaatagcgaggaaagaccattcaagtgtgaagagctggtggaacccttcaggtgtgattcccaactgatacagcatcaagagaataacacagaagagaagccgtatcaatgttccgagtgtgggaaggctttctctattaatgagaagctcatatggcaccagcgtctacactctggtgagaaaccgttcaagtgcgtagaatgtggtaagtccttctcatatagctcacattatatcactcaccagaccatccactccggtgaaaaaccctatcagtgcaaaatgtgtggcaaggccttcagcgtgaacggctccttgtcaagacatcagcgaatccacactggagaaaagccctatcaatgcaaagaatgcgggaatggcttcagctgctcatccgcatatataacgcaccaacgcgtacacacgggggagaagccatacgagtgcaacgactgtggcaaggcctttaatgtaaacgccaaattgatccagcaccagaggatacacaccggggagaaaccttatgaatgcaatgaatgcgggaaggggttcaggtgctcaagccagctgagacagcaccagtccatacataccggagaaaaaccatatcagtgcaaagaatgtggaaaaggctttaacaataacaccaagcttattcagcatcaacgaattcatacgggggaaaagccttacgaatgcacggagtgcggcaaagccttctctgtgaagggaaaactcattcaacaccagagaatacataccggggagaagccctatgagtgcaacgagtgcgggaaggctttccgttgcaattcccagtttcgccagcacctgaggattcataccggtgagaagccctacgaatgcaacgaatgcggcaaggccttttctgtaaacggtaaactgatgaggcaccagaggattcataccggagaaaaaccttttgagtgtaatgagtgtgggcgatgctttacctccaaaaggaatctgctggaccaccacagaatacacaccggggagaagccttatcaatgcaaagagtgcggaaaagccttttcaattaacgccaaactcactagacatcagaggatacacactggagaaaaaccctttaagtgcatggaatgcgaaaaggcgttcagttgctcctcaaattacatcgtgcatcagcgtatccatacaggggagaagcccttccagtgtaaggagtgcggaaaggcttttcatgtgaacgcacatctcattagacaccagaggtcccacactggcgagaaaccctttcgctgcgtagaatgcggaaaagggttttccttttcctccgactatatcattcatcaaactgtacatacctggaaaaagccatacatgtgttccgtgtgtggaaaggcttttcgatttagttttcagttgtcacaacatcaatccgtacactcagaagggaagtcttag

SEQ ID NO: 115989 - DNA, 1932 bp, Artificial Sequence
  derived and/or modified sequence
atgcttgaaaactacgggaacgtcgcttcacttggctttccacttttgaagcctgccgtcatctcccagctggagggcggatcagaattgggaggatccagtcctctggctgctggcactggcctacaagggctgcagactgacatccagaccgacaacgaccttaccaaagaaatgtacgagggcaaggaaaacgtgtcttttgagctccagcgagattttagtcaggagacagatttcagcgaggcctccctcctcgagaagcaacaggaagtgcactcagccggaaatatcaaaaaagaaaagtctaacactatcgacggcaccgtcaaggacgagacctctccggttgaggaatgtttcttcagccaaagcagtaactcttaccaatgccacaccattactggcgagcagcccagcgggtgcacggggctgggcaaatcaatcagtttcgacaccaagttggtgaaacatgagattattaattctgaggaaagaccctttaaatgtgaagaactggtagagcccttcagatgtgactctcaacttatccagcaccaggagaataatacggaagagaagccttaccagtgcagcgagtgcgggaaggccttctctatcaacgagaagctgatttggcatcagaggctccattctggtgagaagcctttcaagtgcgtggagtgcggtaaaagcttttcttattcaagtcattatatcacccatcagacaatacatagcggggagaaaccgtatcagtgcaaaatgtgcggtaaggcattttctgtaaatggtagcctctcacggcatcagcgcatacataccggtgaaaagccctatcagtgcaaagaatgtggcaacgggttttcatgtagttcagcatacattacccaccagagagttcacaccggcgagaagccatatgaatgcaatgactgcgggaaggctttcaacgtcaacgccaaactgatccagcatcaaagaattcacaccggggagaagccgtatgagtgtaacgaatgcgggaaaggctttagatgcagttcccagctgaggcagcaccagagcatacacacaggcgaaaagccttatcagtgcaaggaatgcggaaaaggatttaataataacacaaagctaatccagcaccaacggatacacactggcgaaaaaccttacgagtgtaccgaatgcggtaaggccttcagtgtcaaaggcaaactgattcagcaccagagaatccacaccggagagaagccttacgaatgtaacgaatgcggtaaggccttccggtgcaatagccaattccgccaacatctgcgtattcacactggagagaaaccctatgagtgtaatgaatgtggaaaggctttcagcgtgaatgggaagctaatgagacaccagagaatccacactggcgaaaagcctttcgaatgcaacgaatgtggcagatgcttcacttcaaagcggaacttactggaccatcatcggatacatactggcgagaaaccataccagtgcaaggagtgcgggaaggctttctcaatcaatgccaagctaacgcgccaccagcggatccacaccggagagaagccttttaagtgcatggagtgtgagaaagctttttcgtgcagcagcaattatattgtgcaccagcggattcacacgggcgaaaaaccctttcagtgtaaagagtgcggaaaagctttccacgttaacgcccatctgataagacaccagcgcagccacacaggcgagaaacccttcagatgtgtggaatgcggaaagggcttttccttttcctccgactacataattcatcaaacagtgcacacttggaaaaagccttacatgtgttccgtctgcgggaaggcgttccgcttctcttttcagctgagccagcaccagagtgtgcatagtgagggtaaatcctag

SEQ ID NO: 115990 - DNA, 1932 bp, Artificial Sequence
  derived and/or modified sequence
atgctggaaaactacgggaatgtggcatcgcttggcttccctttgctgaagccagccgtgatcagccaactcgagggaggctctgaactgggcggttcgtccccattggccgctgggaccggcctgcaaggactgcagaccgatattcagaccgataatgatctgaccaaagagatgtatgaaggcaaggaaaatgtatcttttgaacttcaacgagacttttcccaggaaactgacttctctgaggcctcactgttagagaagcagcaggaagttcacagtgcaggaaatattaaaaaggaaaaatcaaacactattgacggcaccgtgaaggacgaaactagtcccgtggaagagtgtttcttctcccaaagctcaaatagctaccagtgtcacaccataacgggggagcaaccttctggttgtacaggattaggtaagtccatctctttcgacacaaaattagttaagcatgagatcattaactccgaggaacgtccgttcaaatgtgaagagctggttgaaccctttcgctgcgattctcagctgatccagcatcaggagaataacactgaggagaaaccctatcagtgcagcgagtgtggaaaggccttctcaataaacgaaaagctgatatggcatcagcgccttcacagcggggagaagccctttaaatgtgtggagtgtggaaaaagcttcagctattcttcccactacattacacatcagacaatccacagcggggagaagccctaccaatgcaaaatgtgtgggaaagctttctcagtgaatggtagcctttcacgacatcagaggatccacaccggagagaagccctaccagtgcaaggagtgtgggaacggatttagttgctcatcagcttacataacacaccagcgtgtgcacaccggcgagaaaccatacgagtgcaatgactgtggcaaagcctttaacgtaaacgccaagctgattcaacaccagcgtatccacacgggggaaaagccctatgaatgcaatgagtgtgggaaagggtttaggtgcagcagccagttaaggcagcatcagagtattcatactggcgagaagccctaccagtgtaaagaatgcggaaagggctttaataataacactaagctcatccaacaccaacgtatccatactggagagaagccttacgagtgcactgagtgcggtaaggctttctctgtgaaaggaaaactgatccagcaccaaaggatccataccggagagaagccctatgagtgcaacgagtgtggaaaggccttcaggtgtaactcgcaattcagacaacatttgagaatacacacaggcgagaaaccatacgagtgcaacgaatgcggaaaagcttttagtgtaaacggcaagctgatgcggcatcagcgtatacacaccggggagaagccctttgaatgcaatgagtgcggcagatgcttcacctccaagcgaaacctgctggatcaccatagaatacacacaggagagaagccctaccagtgcaaggaatgcggaaaggcctttagcatcaatgccaaactcactagacatcagagaatccacactggagagaaaccgtttaaatgtatggagtgcgaaaaggcattttcctgcagcagcaactacatcgtgcaccaaagaatccacactggtgaaaaaccattccagtgtaaagagtgcggaaaggccttccacgttaatgcccacttaattagacatcagagaagtcacacaggggagaagccgttccggtgcgtcgagtgcggaaagggattttcattttctagcgactacataatacaccagacggtgcatacatggaagaaaccctacatgtgctccgtgtgtggcaaagctttcaggttttcctttcagctctctcagcaccagtccgttcacagtgaaggaaagagctag

SEQ ID NO: 115991 - DNA, 2674 bp, Artificial Sequence
  derived and/or modified sequence
gcacttccggcagcgccggggagcagtccgctacggagctccagcccttctctgagacggggaccaggggatggcagccatgcacctgacagcctggccccagggcctgagctatggaattggccctagggcagcaggaacctattgtttcagaagtcggtgacctttgaggacgtggctgtgtacttcacccaggcggaatgggatggcctgtcccctgcacagaggaccctgtacagggatgtgatgctggagaattatgggaatgtggcctccctgggatttccacttctcaaacctgctgtgatctcacaactggagggaggaagtgagctggggggctcatctccactggctgcaggaacaggcctccagggcctccagactgatattcagactgacaatgatttgacaaaggaaatgtatgaaggaaaagagaatgtatcatttgaacttcaaagagacttttcccaggaaacagacttttcagaagcctctcttctagagaaacaacaggaagtccactcagcaggaaatataaagaaggagaagagcaacaccattgatggaacagtgaaagatgagacaagccccgtggaggagtgtttttttagtcaaagttcaaactcatatcagtgtcataccatcactggagagcagccctctgggtgtacaggattggggaaatccatcagctttgatacaaaactcgtgaagcatgaaataattaattctgaggaaagacctttcaaatgtgaagaattagtagagccctttaggtgtgactctcaacttattcaacatcaagagaacaacactgaggaaaagccttatcagtgttcggagtgtggcaaagctttcagcattaatgagaaattaatttggcatcagagacttcacagtggggagaaacccttcaaatgtgtggagtgtgggaaaagcttcagctacagttcccattatatcacacatcagacaatccacagtggggagaagccctatcagtgtaagatgtgtgggaaggccttcagtgttaatggaagcctaagtaggcatcagagaatccatacgggagagaagccctatcagtgcaaggaatgtggaaatggcttcagctgtagttctgcatatattacacatcagagagtccacactggagagaaaccttacgagtgtaatgactgtgggaaagcgttcaatgttaatgcaaaattaattcaacatcagagaatccatactggagagaaaccttatgaatgtaatgaatgtggaaaaggcttcaggtgcagctcccagcttaggcagcatcagagcatccacacaggagaaaagccctatcagtgtaaagagtgtggaaaaggcttcaataataatacaaaactcattcagcatcagagaatccacacaggtgagaaaccctatgaatgcactgaatgtggaaaagccttcagtgtcaaagggaagttaatccaacaccagagaattcacacaggcgagaaaccctatgagtgtaatgaatgcgggaaagccttcagatgtaactcccaatttcggcagcatctgagaattcacactggggagaagccctatgagtgtaatgagtgtggaaaggccttcagcgttaatgggaaactaatgcggcatcagagaattcacactggggagaaaccttttgaatgtaatgagtgtgggagatgctttacttctaaaagaaacctacttgatcatcaccgaatccatactggagaaaagccctatcaatgtaaggaatgtgggaaagccttcagtatcaatgccaaactaactaggcatcagaggatacatactggggagaaacctttcaaatgtatggaatgtgagaaagcattcagctgtagttctaactatattgtgcaccagagaatccatacaggagagaaaccctttcagtgtaaggagtgtggaaaagccttccatgttaatgcccatttaattcggcatcagagaagccacactggggagaaacccttcagatgtgtggaatgtggcaaaggcttcagctttagttctgactacattatacatcagacagtccacacttggaagaaaccctatatgtgtagtgtgtgtgggaaagcattcaggtttagcttccagctcagtcagcatcagagtgtccatagtgaaggaaaatcctaataatgagaaagatatagaaaactcttaaggttaatgccaaaatggatcaagtatcatcagattcatccattgaaaaacctccaagagggcatgaatatggcagagtcttcatatggaaacagtttttattctattcagtttaaatcaggaaaggatgaccagttaaagagaaacatccaaaaatagctttgttttgtaccaacaggaattagaaaatataatgaaaagatttcgttcccagcagcatcaagaaaagtagattttctagaaataaacagttatggaggacttgtatggagaaatttaagtcttcactgagggccactttacaaaggaaatttgaataaatggagagagagagaagccttgttgttggataggaaaacccgtactaaagatactctacctacattaatttatttgtttaatttttgacaacaagcatgtattacttttgaaaagatgaaaaataaagatttatttaaaaaaggaaaaa

SEQ ID NO: 115992 - DNA, 3242 bp, Artificial Sequence
  derived and/or modified sequence
cggaggtgagtgcagggctccgggcgctgtgtgccgtgccctgtcccccaggctctgggtccggttgagacgcactcccaccctgggtgctgcagggtctcccgtggcctacgctgccaggaggcccaggctgggagagggagcagggcggcggcccggggtgctcttccgcgctcctcgactccagctttggtctttgtggctcaatagcttgcgcccattggaaggggaaacgcacgttgctgtcccagccacgaggccctgagcatttagcacttggtcgacgggggaagatgtgtcggtgcagctaaaagatggaatatttgcgggcgtgaagcggcccgaggtgataccacaagtcttttgacatgctgaggtctggcaggaacattaacctatgtgcatcccgagtatggaccgtgtgctcccaggctcctgacatagggtcatgaattagggccgagtgggagcgcagagcccctcccagtcacccggcagcagaagcagcccggcttttggaggacattgtctcctggagcagtgtcagtcccaaaagctccagcccttctctgagacggggaccaggggatggcagccatgcacctgacagcctggccccagggacttcacggatcccctgaagctcatccatggacttccatggactacagggcctgagctatggaattggccctagggcagcaggaacctattgtttcagaagtcggtgacctttgaggacgtggctgtgtacttcacccaggcggaatgggatggcctgtcccctgcacagaggaccctgtacagggatgtgatgctggagaattatgggaatgtggcctccctgggatttccacttctcaaacctgctgtgatctcacaactggagggaggaagtgagctggggggctcatctccactggctgcaggaacaggcctccagggcctccagactgatattcagactgacaatgatttgacaaaggaaatgtatgaaggaaaagagaatgtatcatttgaacttcaaagagacttttcccaggaaacagacttttcagaagcctctcttctagagaaacaacaggaagtccactcagcaggaaatataaagaaggagaagagcaacaccattgatggaacagtgaaagatgagacaagccccgtggaggagtgtttttttagtcaaagttcaaactcatatcagtgtcataccatcactggagagcagccctctgggtgtacaggattggggaaatccatcagctttgatacaaaactcgtgaagcatgaaataattaattctgaggaaagacctttcaaatgtgaagaattagtagagccctttaggtgtgactctcaacttattcaacatcaagagaacaacactgaggaaaagccttatcagtgttcggagtgtggcaaagctttcagcattaatgagaaattaatttggcatcagagacttcacagtggggagaaacccttcaaatgtgtggagtgtgggaaaagcttcagctacagttcccattatatcacacatcagacaatccacagtggggagaagccctatcagtgtaagatgtgtgggaaggccttcagtgttaatggaagcctaagtaggcatcagagaatccatacgggagagaagccctatcagtgcaaggaatgtggaaatggcttcagctgtagttctgcatatattacacatcagagagtccacactggagagaaaccttacgagtgtaatgactgtgggaaagcgttcaatgttaatgcaaaattaattcaacatcagagaatccatactggagagaaaccttatgaatgtaatgaatgtggaaaaggcttcaggtgcagctcccagcttaggcagcatcagagcatccacacaggagaaaagccctatcagtgtaaagagtgtggaaaaggcttcaataataatacaaaactcattcagcatcagagaatccacacaggtgagaaaccctatgaatgcactgaatgtggaaaagccttcagtgtcaaagggaagttaatccaacaccagagaattcacacaggcgagaaaccctatgagtgtaatgaatgcgggaaagccttcagatgtaactcccaatttcggcagcatctgagaattcacactggggagaagccctatgagtgtaatgagtgtggaaaggccttcagcgttaatgggaaactaatgcggcatcagagaattcacactggggagaaaccttttgaatgtaatgagtgtgggagatgctttacttctaaaagaaacctacttgatcatcaccgaatccatactggagaaaagccctatcaatgtaaggaatgtgggaaagccttcagtatcaatgccaaactaactaggcatcagaggatacatactggggagaaacctttcaaatgtatggaatgtgagaaagcattcagctgtagttctaactatattgtgcaccagagaatccatacaggagagaaaccctttcagtgtaaggagtgtggaaaagccttccatgttaatgcccatttaattcggcatcagagaagccacactggggagaaacccttcagatgtgtggaatgtggcaaaggcttcagctttagttctgactacattatacatcagacagtccacacttggaagaaaccctatatgtgtagtgtgtgtgggaaagcattcaggtttagcttccagctcagtcagcatcagagtgtccatagtgaaggaaaatcctaataatgagaaagatatagaaaactcttaaggttaatgccaaaatggatcaagtatcatcagattcatccattgaaaaacctccaagagggcatgaatatggcagagtcttcatatggaaacagtttttattctattcagtttaaatcaggaaaggatgaccagttaaagagaaacatccaaaaatagctttgttttgtaccaacaggaattagaaaatataatgaaaagatttcgttcccagcagcatcaagaaaagtagattttctagaaataaacagttatggaggacttgtatggagaaatttaagtcttcactgagggccactttacaaaggaaatttgaataaatggagagagagagaagccttgttgttggataggaaaacccgtactaaagatactctacctacattaatttatttgtttaatttttgacaacaagcatgtattacttttgaaaagatgaaaaataaagatttatttaaaaaaggaaaaa

SEQ ID NO: 115993 - DNA, 3234 bp, Artificial Sequence
  derived and/or modified sequence
cggaggtgagtgcagggctccgggcgctgtgtgccgtgccctgtcccccaggctctgggtccggttgagacgcactcccaccctgggtgctgcagggtctcccgtggcctacgctgccaggaggcccaggctgggagagggagcagggcggcggcccggggtgctcttccgcgctcctcgactccagctttggtctttgtggctcaatagcttgcgcccattggaaggggaaacgcacgttgctgtcccagccacgaggccctgagcatttagcacttggtcgacgggggaagatgtgtcggtgcagctaaaagatggaatatttgcgggcgtgaagcggcccgaggtgataccacaagtcttttgacatgctgaggtctggcaggaacattaacctatgtgcatcccgagtatggaccgtgtgctcccaggctcctgacatagggtcatgaattagggccgagtgggagcgcagagcccctcccagtcacccggcagcagaagcagcccggcttttggaggacattgtctcctggagcagtgtcagtcccaaaagctccagcccttctctgagacggggaccaggggatggcagccatgcacctgacagcctggccccaggtgagctgtggggtccttcagctcttcctctgggcagtttcagattgaaaaacagggcctgagctatggaattggccctagggcagcaggaacctattgtttcagaagtcggtgacctttgaggacgtggctgtgtacttcacccaggcggaatgggatggcctgtcccctgcacagaggaccctgtacagggatgtgatgctggagaattatgggaatgtggcctccctgggatttccacttctcaaacctgctgtgatctcacaactggagggaggaagtgagctggggggctcatctccactggctgcaggaacaggcctccagggcctccagactgatattcagactgacaatgatttgacaaaggaaatgtatgaaggaaaagagaatgtatcatttgaacttcaaagagacttttcccaggaaacagacttttcagaagcctctcttctagagaaacaacaggaagtccactcagcaggaaatataaagaaggagaagagcaacaccattgatggaacagtgaaagatgagacaagccccgtggaggagtgtttttttagtcaaagttcaaactcatatcagtgtcataccatcactggagagcagccctctgggtgtacaggattggggaaatccatcagctttgatacaaaactcgtgaagcatgaaataattaattctgaggaaagacctttcaaatgtgaagaattagtagagccctttaggtgtgactctcaacttattcaacatcaagagaacaacactgaggaaaagccttatcagtgttcggagtgtggcaaagctttcagcattaatgagaaattaatttggcatcagagacttcacagtggggagaaacccttcaaatgtgtggagtgtgggaaaagcttcagctacagttcccattatatcacacatcagacaatccacagtggggagaagccctatcagtgtaagatgtgtgggaaggccttcagtgttaatggaagcctaagtaggcatcagagaatccatacgggagagaagccctatcagtgcaaggaatgtggaaatggcttcagctgtagttctgcatatattacacatcagagagtccacactggagagaaaccttacgagtgtaatgactgtgggaaagcgttcaatgttaatgcaaaattaattcaacatcagagaatccatactggagagaaaccttatgaatgtaatgaatgtggaaaaggcttcaggtgcagctcccagcttaggcagcatcagagcatccacacaggagaaaagccctatcagtgtaaagagtgtggaaaaggcttcaataataatacaaaactcattcagcatcagagaatccacacaggtgagaaaccctatgaatgcactgaatgtggaaaagccttcagtgtcaaagggaagttaatccaacaccagagaattcacacaggcgagaaaccctatgagtgtaatgaatgcgggaaagccttcagatgtaactcccaatttcggcagcatctgagaattcacactggggagaagccctatgagtgtaatgagtgtggaaaggccttcagcgttaatgggaaactaatgcggcatcagagaattcacactggggagaaaccttttgaatgtaatgagtgtgggagatgctttacttctaaaagaaacctacttgatcatcaccgaatccatactggagaaaagccctatcaatgtaaggaatgtgggaaagccttcagtatcaatgccaaactaactaggcatcagaggatacatactggggagaaacctttcaaatgtatggaatgtgagaaagcattcagctgtagttctaactatattgtgcaccagagaatccatacaggagagaaaccctttcagtgtaaggagtgtggaaaagccttccatgttaatgcccatttaattcggcatcagagaagccacactggggagaaacccttcagatgtgtggaatgtggcaaaggcttcagctttagttctgactacattatacatcagacagtccacacttggaagaaaccctatatgtgtagtgtgtgtgggaaagcattcaggtttagcttccagctcagtcagcatcagagtgtccatagtgaaggaaaatcctaataatgagaaagatatagaaaactcttaaggttaatgccaaaatggatcaagtatcatcagattcatccattgaaaaacctccaagagggcatgaatatggcagagtcttcatatggaaacagtttttattctattcagtttaaatcaggaaaggatgaccagttaaagagaaacatccaaaaatagctttgttttgtaccaacaggaattagaaaatataatgaaaagatttcgttcccagcagcatcaagaaaagtagattttctagaaataaacagttatggaggacttgtatggagaaatttaagtcttcactgagggccactttacaaaggaaatttgaataaatggagagagagagaagccttgttgttggataggaaaacccgtactaaagatactctacctacattaatttatttgtttaatttttgacaacaagcatgtattacttttgaaaagatgaaaaataaagatttattt

SEQ ID NO: 115994 - DNA, 2785 bp, Artificial Sequence
  derived and/or modified sequence
cacttccggcagcgccggggagcagtccgctacggagctccagcccttctctgagacggggaccaggggatggcagccatgcacctgacagcctggccccagggacttcacggatcccctgaagctcatccatggacttccatggactacagaagtcggtgacctttgaggacgtggctgtgtacttcacccaggcggaatgggatggcctgtcccctgcacagaggaccctgtacagggatgtgatgctggagaattatgggaatgtggcctccctgggatttccacttctcaaacctgctgtgatctcacaactggagggaggaagtgagctggggggctcatctccactggctgcaggaacaggcctccagggcctccagactgatggagtctcgctctgtcgcccaaactggagtgcagtggcaagaacttggctcaccgcaacttccgtttcccgggttcgagcaattctcctgcctcatcctcccgagtagctggaactacagtagatattcagactgacaatgatttgacaaaggaaatgtatgaaggaaaagagaatgtatcatttgaacttcaaagagacttttcccaggaaacagacttttcagaagcctctcttctagagaaacaacaggaagtccactcagcaggaaatataaagaaggagaagagcaacaccattgatggaacagtgaaagatgagacaagccccgtggaggagtgtttttttagtcaaagttcaaactcatatcagtgtcataccatcactggagagcagccctctgggtgtacaggattggggaaatccatcagctttgatacaaaactcgtgaagcatgaaataattaattctgaggaaagacctttcaaatgtgaagaattagtagagccctttaggtgtgactctcaacttattcaacatcaagagaacaacactgaggaaaagccttatcagtgttcggagtgtggcaaagctttcagcattaatgagaaattaatttggcatcagagacttcacagtggggagaaacccttcaaatgtgtggagtgtgggaaaagcttcagctacagttcccattatatcacacatcagacaatccacagtggggagaagccctatcagtgtaagatgtgtgggaaggccttcagtgttaatggaagcctaagtaggcatcagagaatccatacgggagagaagccctatcagtgcaaggaatgtggaaatggcttcagctgtagttctgcatatattacacatcagagagtccacactggagagaaaccttacgagtgtaatgactgtgggaaagcgttcaatgttaatgcaaaattaattcaacatcagagaatccatactggagagaaaccttatgaatgtaatgaatgtggaaaaggcttcaggtgcagctcccagcttaggcagcatcagagcatccacacaggagaaaagccctatcagtgtaaagagtgtggaaaaggcttcaataataatacaaaactcattcagcatcagagaatccacacaggtgagaaaccctatgaatgcactgaatgtggaaaagccttcagtgtcaaagggaagttaatccaacaccagagaattcacacaggcgagaaaccctatgagtgtaatgaatgcgggaaagccttcagatgtaactcccaatttcggcagcatctgagaattcacactggggagaagccctatgagtgtaatgagtgtggaaaggccttcagcgttaatgggaaactaatgcggcatcagagaattcacactggggagaaaccttttgaatgtaatgagtgtgggagatgctttacttctaaaagaaacctacttgatcatcaccgaatccatactggagaaaagccctatcaatgtaaggaatgtgggaaagccttcagtatcaatgccaaactaactaggcatcagaggatacatactggggagaaacctttcaaatgtatggaatgtgagaaagcattcagctgtagttctaactatattgtgcaccagagaatccatacaggagagaaaccctttcagtgtaaggagtgtggaaaagccttccatgttaatgcccatttaattcggcatcagagaagccacactggggagaaacccttcagatgtgtggaatgtggcaaaggcttcagctttagttctgactacattatacatcagacagtccacacttggaagaaaccctatatgtgtagtgtgtgtgggaaagcattcaggtttagcttccagctcagtcagcatcagagtgtccatagtgaaggaaaatcctaataatgagaaagatatagaaaactcttaaggttaatgccaaaatggatcaagtatcatcagattcatccattgaaaaacctccaagagggcatgaatatggcagagtcttcatatggaaacagtttttattctattcagtttaaatcaggaaaggatgaccagttaaagagaaacatccaaaaatagctttgttttgtaccaacaggaattagaaaatataatgaaaagatttcgttcccagcagcatcaagaaaagtagattttctagaaataaacagttatggaggacttgtatggagaaatttaagtcttcactgagggccactttacaaaggaaatttgaataaatggagagagagagaagccttgttgttggataggaaaacccgtactaaagatactctacctacattaatttatttgtttaatttttgacaacaagcatgtattacttttgaaaagatgaaaaataaagatttattt

SEQ ID NO: 115995 - DNA, 2358 bp, Artificial Sequence
  derived and/or modified sequence
gtgacgcacttccggcagcgccggggagcagtccgctacggagctccagcccttctctgagacggggaccaggggatggcagccatgcacctgacagcctggccccagtagatattcagactgacaatgatttgacaaaggaaatgtatgaaggaaaagagaatgtatcatttgaacttcaaagagacttttcccaggaaacagacttttcagaagcctctcttctagagaaacaacaggaagtccactcagcaggaaatataaagaaggagaagagcaacaccattgatggaacagtgaaagatgagacaagccccgtggaggagtgtttttttagtcaaagttcaaactcatatcagtgtcataccatcactggagagcagccctctgggtgtacaggattggggaaatccatcagctttgatacaaaactcgtgaagcatgaaataattaattctgaggaaagacctttcaaatgtgaagaattagtagagccctttaggtgtgactctcaacttattcaacatcaagagaacaacactgaggaaaagccttatcagtgttcggagtgtggcaaagctttcagcattaatgagaaattaatttggcatcagagacttcacagtggggagaaacccttcaaatgtgtggagtgtgggaaaagcttcagctacagttcccattatatcacacatcagacaatccacagtggggagaagccctatcagtgtaagatgtgtgggaaggccttcagtgttaatggaagcctaagtaggcatcagagaatccatacgggagagaagccctatcagtgcaaggaatgtggaaatggcttcagctgtagttctgcatatattacacatcagagagtccacactggagagaaaccttacgagtgtaatgactgtgggaaagcgttcaatgttaatgcaaaattaattcaacatcagagaatccatactggagagaaaccttatgaatgtaatgaatgtggaaaaggcttcaggtgcagctcccagcttaggcagcatcagagcatccacacaggagaaaagccctatcagtgtaaagagtgtggaaaaggcttcaataataatacaaaactcattcagcatcagagaatccacacaggtgagaaaccctatgaatgcactgaatgtggaaaagccttcagtgtcaaagggaagttaatccaacaccagagaattcacacaggcgagaaaccctatgagtgtaatgaatgcgggaaagccttcagatgtaactcccaatttcggcagcatctgagaattcacactggggagaagccctatgagtgtaatgagtgtggaaaggccttcagcgttaatgggaaactaatgcggcatcagagaattcacactggggagaaaccttttgaatgtaatgagtgtgggagatgctttacttctaaaagaaacctacttgatcatcaccgaatccatactggagaaaagccctatcaatgtaaggaatgtgggaaagccttcagtatcaatgccaaactaactaggcatcagaggatacatactggggagaaacctttcaaatgtatggaatgtgagaaagcattcagctgtagttctaactatattgtgcaccagagaatccatacaggagagaaaccctttcagtgtaaggagtgtggaaaagccttccatgttaatgcccatttaattcggcatcagagaagccacactggggagaaacccttcagatgtgtggaatgtggcaaaggcttcagctttagttctgactacattatacatcagacagtccacacttggaagaaaccctatatgtgtagtgtgtgtgggaaagcattcaggtttagcttccagctcagtcagcatcagagtgtccatagtgaaggaaaatcctaataatgagaaagatatagaaaactcttaaggttaatgccaaaatggatcaagtatcatcagattcatccattgaaaaacctccaagagggcatgaatatggcagagtcttcatatggaaacagtttttattctattcagtttaaatcaggaaaggatgaccagttaaagagaaacatccaaaaatagctttgttttgtaccaacaggaattagaaaatataatgaaaagatttcgttcccagcagcatcaagaaaagtagattttctagaaataaacagttatggaggacttgtatggagaaatttaagtcttcactgagggccactttacaaaggaaatttgaataaatggagagagagagaagccttgttgttggataggaaaacccgtactaaagatactctacctacattaatttatttgtttaatttttgacaacaagcatgtattacttttg

SEQ ID NO: 115996 - DNA, 1248 bp, Artificial Sequence
  derived and/or modified sequence
tgcggcaaggccttcagcatcaacgagaagctgatctggcaccagagactgcacagcggcgagaagcccttcaagtgcgtggagtgcggcaagagcttcagctacagcagccactacatcacccaccagaccatccacagcggcgagaagccctaccagtgcaagatgtgcggcaaggccttcagcgtgaacggcagcctgagcagacaccagagaatccacaccggcgagaagccctaccagtgcaaggagtgcggcaacggcttcagctgcagcagcgcctacatcacccaccagagagtgcacaccggcgagaagccctacgagtgcaacgactgcggcaaggccttcaacgtgaacgccaagctgatccagcaccagagaatccacaccggcgagaagccctacgagtgcaacgagtgcggcaagggcttcagatgcagcagccagctgagacagcaccagagcatccacaccggcgagaagccctaccagtgcaaggagtgcggcaagggcttcaacaacaacaccaagctgatccagcaccagagaatccacaccggcgagaagccctacgagtgcaacgagtgcggcaaggccttcagatgcaacagccagttcagacagcacctgagaatccacaccggcgagaagccctacgagtgcaacgagtgcggcaaggccttcagcgtgaacggcaagctgatgagacaccagagaatccacaccggcgagaagcccttcgagtgcaacgagtgcggcagatgcttcaccagcaagagaaacctgctggaccaccacagaatccacaccggcgagaagccctaccagtgcaaggagtgcggcaaggccttcagcatcaacgccaagctgaccagacaccagagaatccacaccggcgagaagcccttcaagtgcatggagtgcgagaaggccttcagctgcagcagcaactacatcgtgcaccagagaatccacaccggcgagaagcccttccagtgcaaggagtgcggcaaggccttccacgtgaacgcccacctgatcagacaccagagaagccacaccggcgagaagcccttcagatgcgtggagtgcggcaagggcttcagcttcagcagcgactacatcatccaccagaccgtgcacacctggaagaagccctacatgtgcagcgtgtgcggcaaggccttcagattcagcttccagctgagccagcaccagagcgtgcacagcgagggcaagagctag

SEQ ID NO: 115997 - DNA, 1758 bp, Artificial Sequence
  derived and/or modified sequence
atgtacgagggcaaggagaacgtgagcttcgagctgcagagagacttcagccaggagaccgacttcagcgaggccagcctgctggagaagcagcaggaggtgcacagcgccggcaacatcaagaaggagaagagcaacaccatcgacggcaccgtgaaggacgagaccagccccgtggaggagtgcttcttcagccagagcagcaacagctaccagtgccacaccatcaccggcgagcagcccagcggctgcaccggcctgggcaagagcatcagcttcgacaccaagctggtgaagcacgagatcatcaacagcgaggagagacccttcaagtgcgaggagctggtggagcccttcagatgcgacagccagctgatccagcaccaggagaacaacaccgaggagaagccctaccagtgcagcgagtgcggcaaggccttcagcatcaacgagaagctgatctggcaccagagactgcacagcggcgagaagcccttcaagtgcgtggagtgcggcaagagcttcagctacagcagccactacatcacccaccagaccatccacagcggcgagaagccctaccagtgcaagatgtgcggcaaggccttcagcgtgaacggcagcctgagcagacaccagagaatccacaccggcgagaagccctaccagtgcaaggagtgcggcaacggcttcagctgcagcagcgcctacatcacccaccagagagtgcacaccggcgagaagccctacgagtgcaacgactgcggcaaggccttcaacgtgaacgccaagctgatccagcaccagagaatccacaccggcgagaagccctacgagtgcaacgagtgcggcaagggcttcagatgcagcagccagctgagacagcaccagagcatccacaccggcgagaagccctaccagtgcaaggagtgcggcaagggcttcaacaacaacaccaagctgatccagcaccagagaatccacaccggcgagaagccctacgagtgcaccgagtgcggcaaggccttcagcgtgaagggcaagctgatccagcaccagagaatccacaccggcgagaagccctacgagtgcaacgagtgcggcaaggccttcagatgcaacagccagttcagacagcacctgagaatccacaccggcgagaagccctacgagtgcaacgagtgcggcaaggccttcagcgtgaacggcaagctgatgagacaccagagaatccacaccggcgagaagcccttcgagtgcaacgagtgcggcagatgcttcaccagcaagagaaacctgctggaccaccacagaatccacaccggcgagaagccctaccagtgcaaggagtgcggcaaggccttcagcatcaacgccaagctgaccagacaccagagaatccacaccggcgagaagcccttcaagtgcatggagtgcgagaaggccttcagctgcagcagcaactacatcgtgcaccagagaatccacaccggcgagaagcccttccagtgcaaggagtgcggcaaggccttccacgtgaacgcccacctgatcagacaccagagaagccacaccggcgagaagcccttcagatgcgtggagtgcggcaagggcttcagcttcagcagcgactacatcatccaccagaccgtgcacacctggaagaagccctacatgtgcagcgtgtgcggcaaggccttcagattcagcttccagctgagccagcaccagagcgtgcacagcgagggcaagagctag

SEQ ID NO: 115998 - DNA, 1248 bp, Artificial Sequence
  derived and/or modified sequence
tgcgggaaggctttctctattaacgaaaagcttatttggcaccagcggctacattctggagaaaagccatttaagtgtgtagaatgtggtaaatctttcagctacagttcccattacatcacgcaccagacaatacactctggagagaagccctatcagtgcaaaatgtgcgggaaggccttcagcgttaacgggtcgttaagccgccaccagcggatccacaccggtgaaaaaccctatcagtgtaaagaatgtgggaatggcttttcatgttcttccgcctacattacacatcagcgcgtccacacaggcgaaaagccttatgaatgcaatgattgcggcaaagcctttaacgtaaacgctaaattaattcagcaccagaggatccacactggggaaaagccatatgagtgtaacgagtgtggcaaggggtttcgttgctccagtcagctgaggcagcaccagagcatccatacaggggagaagccatatcagtgcaaagagtgtggaaaagggttcaataacaacacaaaactgatccagcatcagcggattcatactggcgaaaagccttatgaatgtaacgagtgcggcaaagcttttcgctgtaacagccagttcagacagcacttaaggattcatacgggagagaaaccttacgagtgcaatgagtgtgggaaagccttctcggtcaacggtaaacttatgcggcaccagcgcatccacacaggggagaagccctttgaatgtaacgaatgcggtcgctgctttacatcaaaaagaaacctgctggaccaccaccgaatccataccggagagaagccctaccagtgtaaggagtgtgggaaagccttttctatcaacgcaaaactcacacgccaccagcgtatccatactggagagaaaccctttaaatgcatggaatgcgaaaaagcttttagctgttccagcaactatatagtgcaccaacgtattcacaccggcgagaaaccattccagtgtaaggaatgcggaaaagcatttcacgtaaacgcccacctgattcgacatcagaggagtcatactggcgaaaaaccgttccggtgtgtagagtgtggcaaaggcttcagttttagctcagattatataatccaccaaaccgtgcacacttggaaaaagccgtacatgtgctcagtgtgtgggaaagcatttcggttttcttttcagctgagccagcaccaatcggtgcacagtgaggggaagtcttag

SEQ ID NO: 115999 - DNA, 1758 bp, Artificial Sequence
  derived and/or modified sequence
atgtacgagggcaaagaaaacgtgagcttcgaacttcaacgcgattttagtcaagaaacagattttagtgaggcctccctactagagaagcagcaagaagttcacagtgcaggcaacatcaaaaaggaaaagtctaataccatcgacggaacagtgaaggacgagacaagccctgtggaggagtgctttttcagccaatcttctaacagttaccagtgtcacactatcaccggagaacaacccagcggctgcactgggcttggcaaatcaatcagttttgacaccaagctcgtgaaacatgagattatcaacagtgaggagcggccattcaaatgcgaggagctggtggagcctttccgttgcgactcccagctcatccaacatcaggagaacaacaccgaggaaaaaccctaccagtgctccgagtgcggcaaggcgttcagcattaatgaaaagctgatttggcatcagaggttacacagtggggaaaaaccatttaagtgcgtggaatgtggcaagtcgttttcctattccagccactacatcactcatcagaccatccactccggtgagaaaccctaccaatgcaagatgtgcggcaaagcttttagtgtgaacggctctctgagccggcaccagcgaatccacaccggtgagaagccgtaccaatgtaaggaatgtgggaacggattctcttgctcctccgcatacattactcaccaaagagtgcacaccggtgagaagccctacgaatgcaatgattgcggcaaggcctttaacgtgaacgctaaactcattcagcatcaaaggatccacacaggggagaaaccatatgaatgtaatgagtgtggaaaggggttccggtgctcttcgcagctgagacagcatcaaagcattcatacaggtgaaaagccctaccagtgcaaggagtgcggcaagggttttaacaacaacacgaagctaatacaacaccagcgtattcacaccggtgagaagccatacgagtgcacggagtgtggcaaggcgttcagtgtaaagggcaaacttattcaacatcagagaatccataccggcgaaaagccatatgaatgtaatgagtgtgggaaggcattcagatgtaattcacaatttaggcaacatctgagaatccacaccggcgagaagccctacgaatgcaatgaatgcggcaaggctttttcagtaaacggaaagttgatgcgccatcaacgtattcacaccggggagaaaccgttcgagtgcaacgagtgcggccggtgttttaccagcaagcgtaacctgctcgaccaccacaggatccataccggggaaaagccctaccagtgcaaggagtgcgggaaggccttcagtataaatgcaaagctcacccgacatcagcgaatccatacaggagagaagccgtttaaatgtatggagtgtgagaaagcgttctcatgttcatctaactatattgtgcatcagcgtatacacacaggggagaagccctttcagtgcaaggagtgtgggaaggcattccatgtgaatgcccaccttatcagacaccaacgctcacataccggagaaaagccttttcgatgtgtggagtgcggcaaagggttttcattttctagtgattacatcatacatcagaccgttcatacctggaagaagccatatatgtgcagcgtgtgcggaaaggcattcagattttctttccagctctcacaacaccagagcgttcacagcgaagggaagtcctag

SEQ ID NO: 116000 - DNA, 1758 bp, Artificial Sequence
  derived and/or modified sequence
atgtatgaaggcaaagagaacgtctcatttgagcttcagagggacttctcgcaagaaactgatttctcggaggcctctctgctggagaaacagcaggaggtgcatagtgccggtaatatcaaaaaagagaagtctaatacgattgatggaacagtgaaggacgagacaagtcccgtagaagagtgttttttttcacaatcctctaattcatatcagtgtcatactattactggagagcagccctcaggatgtacagggctgggaaagtcaatctcctttgatacgaagttggtgaagcatgagatcattaactccgaggagcgacccttcaaatgcgaagaactggttgaaccgttccggtgtgattcacagctcatccagcatcaagagaacaacacagaggagaagccctaccagtgttccgaatgcgggaaagcatttagtattaacgaaaagctgatttggcaccagcggttgcattcaggcgagaagcctttcaaatgcgttgaatgcggaaagagttttagctactcatctcactacatcactcatcagacgattcactctggagaaaaaccttaccagtgcaagatgtgcgggaaggcattttccgtcaacggatctttgtcccggcaccagcgcatccatacaggggagaaaccatatcaatgcaaggagtgcggtaatggtttttcttgttcatccgcctatatcacacatcagcgcgtccacactggcgagaagccatacgagtgtaacgactgtgggaaagcgtttaacgtcaatgctaagctcatccaacatcagcgaattcacaccggcgagaaaccttacgagtgcaatgagtgcggaaaggggtttaggtgttcttcccagctgaggcaacaccagagcatacacactggggagaagccatatcagtgtaaagaatgtggaaaaggatttaacaacaacacaaaactcatacagcaccaaagaatacatacaggcgagaaaccgtacgagtgcactgagtgtgggaaggccttctccgtgaagggaaaactgattcagcaccagcggatccatacaggcgagaagccctatgaatgtaacgagtgtggcaaagcgttccggtgcaactctcaattcagacagcatttgcgcatccacactggtgagaaaccatacgagtgtaatgagtgcggcaaggctttcagcgtgaacgggaaactcatgagacaccagcgtattcacacaggcgaaaaaccatttgagtgcaacgaatgcggaagatgctttacgagcaagagaaacctgctagatcatcaccggattcatacaggggaaaaaccttatcaatgcaaagagtgtggcaaggcgttctcgatcaacgctaagctgacccgtcatcagcgtatccacacaggtgaaaaacccttcaagtgtatggagtgtgagaaagccttctcctgctcttccaactacatcgtgcaccagaggatacacaccggcgagaagccctttcagtgcaaggaatgcggaaaggcctttcacgtgaatgctcacctgattaggcaccagaggtcccacactggcgaaaagccattccggtgtgtggagtgcggaaagggcttcagcttttctagcgactacatcattcaccagacagttcacacatggaagaaaccttacatgtgttctgtgtgcggtaaggctttccgcttcagctttcagctctctcagcaccagtcagttcatagcgagggaaagtcttag

SEQ ID NO: 116001 - DNA, 1248 bp, Artificial Sequence
  derived and/or modified sequence
tgtgggaaggccttcagcatcaatgagaagctgatctggcaccagaggctgcacagcggggagaagcccttcaagtgtgtggagtgtgggaagagcttctcctacagcagccactacatcacccaccagaccatccacagcggggagaagccctaccagtgcaagatgtgtgggaaggccttctctgtgaatggcagcctgagccgccaccagaggatccacactggagagaagccctaccagtgcaaggaatgtggaaatggcttcagctgcagcagcgcctacatcacccaccagagggtgcacactggagagaagccctatgaatgtaatgactgtgggaaggccttcaacgtgaatgccaagctgatccagcaccagaggatccacactggagagaagccctatgaatgtaatgaatgtgggaagggcttccgctgcagcagccagctgcggcagcaccagagcatccacactggagagaagccctaccagtgcaaggaatgtgggaagggcttcaacaacaacaccaagctgatccagcaccagaggatccacactggagagaagccctatgaatgtaatgaatgtgggaaggccttccgctgcaacagccagttccggcagcacctgcgcatccacactggagagaagccctatgaatgtaatgaatgtgggaaggccttctctgtgaatggcaagctgatgaggcaccagaggatccacactggagagaagccctttgaatgtaatgaatgtggccgctgcttcaccagcaagaggaacctgctggaccaccaccgcatccacactggagagaagccctaccagtgcaaggaatgtgggaaggccttcagcatcaatgccaagctgaccaggcaccagaggatccacactggagagaagcccttcaagtgcatggagtgtgagaaggccttcagctgcagcagcaactacatcgtgcaccagaggatccacactggagagaagcccttccagtgcaaggaatgtgggaaggccttccacgtgaatgcccacctgatccgccaccagaggagccacactggagagaagcccttccgctgtgtggagtgtgggaagggcttctccttcagcagtgactacatcatccaccagacagtgcacacctggaagaagccctacatgtgcagcgtgtgtgggaaggccttccgcttctccttccagctgagccagcaccagagcgtgcacagcgagggcaagagctag

SEQ ID NO: 116002 - DNA, 1758 bp, Artificial Sequence
  derived and/or modified sequence
atgtatgagggcaaggaaaatgtgtcctttgagctgcagagggacttcagccaggagacagacttcagcgaggccagcctgctggagaagcagcaggaggtgcacagcgctggcaacatcaagaaggagaagagcaacaccattgatggcaccgtgaaggatgagaccagccctgtggaggagtgcttcttcagccagagcagcaacagctaccagtgccacaccatcactggagagcagcccagcggctgcaccggcctgggcaagagcatcagctttgacaccaagctggtgaagcatgagatcatcaacagcgaggagcggcccttcaagtgtgaggagctggtggagcccttccgctgtgacagccagctgatccagcaccaggagaacaacacagaggagaagccctaccagtgcagtgaatgtgggaaggccttcagcatcaatgagaagctgatctggcaccagaggctgcacagcggggagaagcccttcaagtgtgtggagtgtgggaagagcttctcctacagcagccactacatcacccaccagaccatccacagcggggagaagccctaccagtgcaagatgtgtgggaaggccttctctgtgaatggcagcctgagccgccaccagaggatccacactggagagaagccctaccagtgcaaggaatgtggaaatggcttcagctgcagcagcgcctacatcacccaccagagggtgcacactggagagaagccctatgaatgtaatgactgtgggaaggccttcaacgtgaatgccaagctgatccagcaccagaggatccacactggagagaagccctatgaatgtaatgaatgtgggaagggcttccgctgcagcagccagctgcggcagcaccagagcatccacactggagagaagccctaccagtgcaaggaatgtgggaagggcttcaacaacaacaccaagctgatccagcaccagaggatccacactggagagaagccctatgaatgtacagaatgtgggaaggccttctctgtgaagggcaagctgatccagcaccagaggatccacactggagagaagccctatgaatgtaatgaatgtgggaaggccttccgctgcaacagccagttccggcagcacctgcgcatccacactggagagaagccctatgaatgtaatgaatgtgggaaggccttctctgtgaatggcaagctgatgaggcaccagaggatccacactggagagaagccctttgaatgtaatgaatgtggccgctgcttcaccagcaagaggaacctgctggaccaccaccgcatccacactggagagaagccctaccagtgcaaggaatgtgggaaggccttcagcatcaatgccaagctgaccaggcaccagaggatccacactggagagaagcccttcaagtgcatggagtgtgagaaggccttcagctgcagcagcaactacatcgtgcaccagaggatccacactggagagaagcccttccagtgcaaggaatgtgggaaggccttccacgtgaatgcccacctgatccgccaccagaggagccacactggagagaagcccttccgctgtgtggagtgtgggaagggcttctccttcagcagtgactacatcatccaccagacagtgcacacctggaagaagccctacatgtgcagcgtgtgtgggaaggccttccgcttctccttccagctgagccagcaccagagcgtgcacagcgagggcaagagctag

SEQ ID NO: 116003 - DNA, 1248 bp, Artificial Sequence
  derived and/or modified sequence
tgcggcaaggccttcagcatcaacgagaagctgatctggcaccagcggcttcacagcggggagaagcctttcaagtgtgtggagtgtgggaagtcctttagttactcctcccattacataacccaccagacaattcatagcggcgaaaagccctatcaatgtaagatgtgtggcaaggccttcagtgtgaacggctccctgagtcgacaccagcgcatccatacaggcgagaaaccctatcagtgcaaggagtgcggaaacggattctcgtgctctagcgcttatattacccatcagcgagtccatactggggagaagccttacgagtgtaatgactgcggtaaagccttcaatgtaaacgctaaactcattcagcaccagcgaatacacaccggcgaaaaaccatatgagtgtaatgaatgcggcaaagggttccgatgcagctcccaattgagacagcaccaaagcatccatacaggggaaaagccttaccagtgtaaggagtgtggtaagggcttcaacaataatacaaaactcattcagcaccagaggatacatactggagagaaaccttacgagtgcaatgagtgcggcaaggcatttagatgcaattcacaatttcgccagcacctcagaattcacaccggagaaaaaccctacgaatgcaacgaatgcgggaaagcattttcagttaacggaaaactgatgagacatcagcgaatacacacaggcgagaaaccattcgaatgcaacgagtgcgggcgctgtttcacctctaaaagaaacttattggaccatcaccgaattcataccggtgagaaaccttatcaatgcaaggagtgcggaaaagcgttttctattaacgccaagttgaccagacaccagcgcattcataccggcgaaaagcctttcaagtgcatggagtgcgagaaagctttcagctgcagctcaaattatattgttcaccaacggatccacaccggagagaagccatttcagtgcaaagagtgtggaaaagctttccacgtcaatgcgcacttgattcgccatcagcgttcccacacaggggagaaacccttccggtgtgttgagtgtggcaagggcttcagtttttcttcagactatataattcaccagacagttcacacttggaagaaaccttacatgtgtagtgtgtgtggaaaggcattcagattctcgttccagctctcacagcaccagtcagttcatagtgaggggaagtcttag

SEQ ID NO: 116004 - DNA, 1758 bp, Artificial Sequence
  derived and/or modified sequence
atgtacgagggcaaggagaacgtgagcttcgagctgcagcgggacttctctcaggaaacagacttttccgaggcctcacttctggagaagcaacaagaggtgcattccgcgggtaatatcaagaaggagaaatccaataccatcgatgggacggtgaaagatgagacatcaccggtggaagagtgcttttttagccagagctctaatagttaccagtgccacacgataacaggtgaacagcccagtggatgcaccgggttggggaagtctatcagctttgatactaagcttgtcaagcatgagattataaattctgaagagaggccattcaagtgcgaagaactggttgagccctttagatgcgattctcagctgatccagcatcaagaaaataacacagaggagaaaccataccaatgcagtgaatgcggcaaagccttcagtatcaatgaaaaacttatctggcaccagcgcctccattccggcgagaaacctttcaagtgcgtggaatgcggaaaatctttctcttactctagtcactacattacacaccagactattcactctggcgagaagccatatcagtgcaagatgtgtggaaaagccttttcggtcaacgggagtctctctcgtcaccagcgcatccacacgggggaaaaaccatatcaatgcaaggagtgcggcaatggatttagctgcagcagcgcctatatcactcaccaacgtgtgcacactggcgaaaagccctatgaatgtaatgattgtgggaaagctttcaatgtaaacgctaagctgattcaacaccaacgaattcacacaggcgaaaaaccatacgaatgtaatgaatgcgggaaaggttttaggtgctccagccagctgcgccagcatcagagcatccatacaggcgagaaaccataccagtgcaaggagtgtggtaaagggttcaataacaacacaaaattgatccagcaccagcgcattcacacaggagaaaagccatacgagtgcacggagtgtggaaaggcattcagtgtgaagggaaagctgatacaacaccagaggatccatacaggtgagaaaccatatgaatgcaatgaatgcgggaaagcctttcgctgcaacagccagtttcgccagcacctgcggattcacactggcgagaaaccatacgaatgcaatgagtgtggcaaggccttttctgtgaacggaaagcttatgcgccaccagcggatccatactggcgagaaacccttcgagtgtaatgagtgcggccgatgtttcacatccaaaaggaacctgttagatcatcatcgcatccatactggagaaaaaccttaccagtgtaaggaatgcggcaaggctttctcaatcaatgccaaactgactagacaccagcggatccataccggtgagaagccctttaaatgcatggaatgcgaaaaagcgttttcttgcagctccaactatatcgtgcaccagaggattcacaccggagagaagcccttccagtgtaaggagtgtgggaaagccttccacgtcaatgctcacttgattaggcatcagcgcagtcacacaggcgagaagcccttcaggtgcgtggaatgcgggaaggggttctccttcagctccgactatattattcatcagaccgtgcatacttggaagaaaccatatatgtgttccgtttgcggaaaagcctttcgcttctcattccaactctctcagcatcagtctgtgcactcagaaggaaagtcatag

SEQ ID NO: 116005 - DNA, 1758 bp, Artificial Sequence
  derived and/or modified sequence
atgtacgagggcaaggagaacgtgagcttcgagctgcagcgggactttagtcaagagacggacttttcggaagcaagcctgttagagaagcagcaggaagtacatagtgccggcaatattaagaaggaaaagtccaatacgatcgacggcactgttaaagacgagacctcgcctgtggaggaatgcttcttctcgcagagcagcaactcttaccaatgccacacaatcactggcgaacaaccttcgggatgtacaggcctgggcaagtcaatcagtttcgacaccaagctggtcaagcacgaaatcatcaatagcgaggagagaccatttaagtgtgaggagctcgtcgagcctttcagatgtgactcccaattaattcaacaccaggaaaacaacaccgaggaaaagccttaccagtgtagcgaatgcgggaaagcattttcaattaacgaaaagctgatttggcaccagagactacattctggagagaagccattcaaatgtgtagagtgcgggaagtctttttcctattctagtcactatattacgcaccagacaattcattcgggtgagaaaccctatcagtgcaaaatgtgcggcaaagccttcagcgtgaatggctccctgtcccggcatcagcgcatccacaccggcgagaagccatatcaatgtaaggagtgtggcaacgggtttagctgctccagcgcctatatcacccatcagagggtgcatacaggtgagaagccatacgaatgtaacgactgtggaaaagccttcaatgtgaacgccaagctgatccagcaccaaagaatccacaccggagaaaaaccctacgaatgcaatgagtgcgggaagggatttagatgctccagtcaactcaggcagcaccagagcatacataccggagagaagccttaccagtgcaaggagtgtggaaaaggattcaacaacaacaccaagctcatccagcaccagagaatccacaccggcgagaagccgtacgagtgtactgaatgcggcaaagcattttctgtgaaaggcaaacttatccagcatcaacgaatccacaccggcgaaaagccttacgagtgcaacgagtgcgggaaagccttccgctgcaattctcaatttcggcaacacctgcgcatacacaccggcgaaaaaccgtatgaatgcaacgagtgcggtaaggccttttccgtcaacggaaaactaatgagacatcagcgcatacatacaggggagaagccatttgaatgcaacgaatgcggccgttgttttactagcaaacgaaacttactggaccaccatcgcattcacaccggcgagaagccttatcagtgtaaggagtgcgggaaagctttcagtatcaacgcaaaactgacgcgtcaccagcgcatccatactggagagaaaccattcaagtgcatggaatgcgagaaggctttttcatgttctagcaattatattgtccatcagcgaattcataccggtgaaaagccctttcagtgcaaggagtgtggcaaggccttccacgtaaacgcacacttgatccgacatcaaagatcccatacaggggagaagccatttagatgcgtggagtgtgggaaaggattctcttttagtagcgattatatcattcaccagactgtgcatacttggaaaaagccttacatgtgctctgtatgtgggaaggccttccggtttagcttccaactcagtcaacatcagtctgttcattctgaagggaagagttag

SEQ ID NO: 116006 - DNA, 1248 bp, Artificial Sequence
  derived and/or modified sequence
tgcggcaaggccttttcaataaatgagaagctgatctggcaccagcggttgcacagcggagagaaaccttttaaatgcgtagagtgcggcaagtctttctcctactcatctcattacatcacccatcaaaccatacactctggcgagaagccttatcaatgcaaaatgtgcgggaaagcatttagcgtaaacggatcccttagcagacaccagcgtattcacactggtgaaaaaccataccagtgtaaagagtgcggtaatgggttttcttgctctagtgcttatataacgcaccagcgtgtgcacaccggagaaaagccatacgagtgcaatgattgtgggaaggcctttaatgttaacgcaaaactcatccagcaccagcgaattcacacaggcgaaaagccatatgaatgtaacgagtgcggcaagggctttaggtgttcatcgcagctgcgacagcatcagtctattcatactggcgagaaaccataccagtgcaaggaatgcgggaagggattcaataacaacacaaaactgatccagcatcaaaggattcatactggcgaaaagccgtatgaatgcaatgagtgtggtaaggcctttcgctgtaacagccagtttaggcagcatctacgcattcacacaggagagaaaccttatgagtgcaacgagtgtggaaaggccttctccgtcaatggaaagctgatgagacatcagcggattcatacgggagagaaacccttcgaatgcaatgaatgcggaaggtgctttacaagcaagcggaacctgcttgaccaccaccgcattcacacaggggagaaaccctaccaatgtaaggaatgcggaaaggccttttctattaatgccaagctcacacgacaccagcggatccatacaggggagaagccttttaagtgtatggagtgcgagaaagcctttagttgcagctcgaattacatagtgcatcagagaattcacacgggagagaaacctttccagtgcaaagaatgcggtaaggcctttcatgtcaacgcccatctgattaggcatcagcgtagtcataccggcgaaaaaccgtttagatgcgtggaatgtggaaagggtttcagcttcagctccgattacatcattcaccagaccgtgcatacatggaaaaagccctatatgtgttcagtatgcgggaaagcgtttagattttcattccagctgtcccagcatcagtcagtccactcagaaggaaaatcatag

SEQ ID NO: 116007 - DNA, 1758 bp, Artificial Sequence
  derived and/or modified sequence
atgtacgaaggcaaagagaacgttagtttcgagcttcagcgcgatttctcccaggagactgatttctctgaggcgtcgcttctcgaaaaacaacaggaagtccattcggctggaaacataaaaaaagagaaatccaatactatcgatgggactgtaaaagatgaaacctcaccggtcgaagaatgttttttttctcagtcttccaactcataccagtgccacaccatcaccggtgagcaaccatcaggctgcacaggtcttgggaaatcaatctcgttcgacaccaagctcgtgaagcacgaaatcatcaatagcgaggagcgaccatttaagtgcgaggagctagtggaaccctttaggtgtgactctcagttgattcaacaccaggaaaacaacactgaggagaaaccttatcaatgctcagagtgcgggaaggcttttagtataaatgaaaaacttatatggcatcagcggttacacagcggggaaaagcctttcaagtgtgtggaatgtggtaagtctttctcctactcctctcactacataacccatcagactatccactccggcgagaaaccttaccagtgtaaaatgtgcgggaaggcgttttcagtgaacggctctcttagtaggcatcaacggattcacaccggtgaaaagccttaccagtgcaaggaatgtggcaacgggttctcctgcagtagtgcgtatatcactcaccagcgagtgcacacgggcgagaaaccctacgagtgcaacgactgcggcaaagcttttaatgtcaacgcgaagctgattcagcaccagcgaattcacactggagagaaaccttatgaatgcaatgagtgtggaaagggctttcggtgcagctctcagctgaggcagcaccagagtatccacacaggcgagaagccttatcaatgcaaggaatgtgggaaaggattcaacaacaacacaaaactgattcaacatcaacgcattcacactggagagaagccgtacgaatgtaccgaatgcggcaaagccttcagcgttaagggaaagctgatacagcaccagagaattcacactggagagaagccctacgagtgtaacgagtgtgggaaagcttttcgatgcaactctcagttccgccagcatctcagaattcacacaggcgagaaaccatacgagtgtaacgaatgtggaaaagccttcagcgtcaacggaaaacttatgaggcatcaaaggattcacactggtgaaaagccttttgagtgtaacgagtgcggtcgttgttttacaagcaagcggaatctgctggaccaccatcggatccatacaggagagaagccctaccagtgtaaggagtgcggcaaggctttttcaatcaacgctaagcttacccggcaccagaggatacacactggcgagaaaccttttaagtgtatggagtgtgagaaagcctttagctgttctagcaattacatcgtacaccagcggatccatacgggtgaaaaaccctttcagtgtaaagagtgcggaaaggctttccacgtgaacgcacacctaatcagacaccagcgaagccacacaggggaaaagccctttcgctgcgtcgagtgcggcaaggggttcagttttagtagtgattacatcattcaccagactgtgcatacatggaagaagccatacatgtgctccgtgtgcggcaaagccttccggtttagttttcagctatcccagcatcagtctgttcactctgagggtaaaagctag

SEQ ID NO: 116008 - DNA, 1758 bp, Artificial Sequence
  derived and/or modified sequence
atgtatgaaggcaaggaaaatgtgtcttttgagttgcagagagatttctctcaagaaacagacttctccgaggcaagtcttcttgaaaagcaacaggaggtgcattctgctggcaatattaagaaagagaagtccaatacaatagatggcacggtcaaagatgaaactagtccagtcgaagagtgcttttttagccagtccagcaatagctatcaatgccacaccattacaggagagcagccaagtggatgcacagggctcgggaaatcaatcagctttgataccaaactcgtgaagcatgaaattattaattcggaggaaaggcccttcaagtgcgaggagttggtggagccctttcgctgtgattcacaactgattcagcaccaagagaataatacggaagaaaagccgtaccagtgcagtgagtgcggaaaggcattcagcattaacgagaagctgatctggcatcaacggctccacagcggggagaagcctttcaaatgcgttgaatgcggaaagtctttctcttattccagccattacattacccatcagactattcactcgggtgaaaaaccgtatcagtgcaagatgtgcggcaaggcttttagtgtcaatggctcgctaagccgccaccagaggatccacactggcgaaaagccttaccagtgtaaagaatgtgggaatggattttcgtgttcttccgcatacatcactcaccagagggtccatactggcgagaaaccgtacgaatgcaatgactgtgggaaggcattcaatgtgaatgctaagttgattcaacaccagcgcattcacacaggtgaaaagccgtatgaatgtaatgaatgcgggaagggttttcgttgcagctctcagctgaggcaacaccaaagcattcacacgggagagaagccatatcagtgcaaggagtgtggcaagggcttcaataacaacactaaactgattcagcatcaaaggattcacacaggggaaaagccttacgagtgtacggaatgcgggaaagctttctcggtcaaggggaaactcatccagcaccagcggattcataccggggagaagccttatgaatgcaacgagtgtggaaaagccttccgctgcaactctcaattccgccaacacctgagaattcacacaggtgagaagccatacgaatgtaatgaatgtggcaaagccttcagcgtcaatggcaaactcatgcggcaccagcgtatccatacaggcgagaagccgttcgagtgcaatgaatgcggaaggtgcttcacctctaagcgcaatctgcttgatcaccatcggattcacacaggagagaaaccttaccagtgcaaggagtgcggaaaggcattcagcataaatgcaaaactgacccgccaccagcggatccatacaggcgagaagccctttaagtgtatggaatgcgagaaagccttctcttgtagcagtaattacatcgtacatcagagaatacacactggagaaaagcctttccagtgcaaggaatgcggcaaggcctttcacgtgaacgcacacctgatcaggcatcaacgttcccatacaggagaaaagccatttcgctgcgtcgagtgtggaaagggcttctccttctcctccgattacattattcatcagacagtgcacacttggaaaaagccatacatgtgctccgtttgtggcaaagcgttcaggtttagcttccagttgtctcagcaccagagtgtgcatagtgaagggaaaagctag

SEQ ID NO: 116009 - DNA, 1248 bp, Artificial Sequence
  derived and/or modified sequence
tgtggcaaagctttcagcattaatgagaaattaatttggcatcagagacttcacagtggggagaaacccttcaaatgtgtggagtgtgggaaaagcttcagctacagttcccattatatcacacatcagacaatccacagtggggagaagccctatcagtgtaagatgtgtgggaaggccttcagtgttaatggaagcctaagtaggcatcagagaatccatacgggagagaagccctatcagtgcaaggaatgtggaaatggcttcagctgtagttctgcatatattacacatcagagagtccacactggagagaaaccttacgagtgtaatgactgtgggaaagcgttcaatgttaatgcaaaattaattcaacatcagagaatccatactggagagaaaccttatgaatgtaatgaatgtggaaaaggcttcaggtgcagctcccagcttaggcagcatcagagcatccacacaggagaaaagccctatcagtgtaaagagtgtggaaaaggcttcaataataatacaaaactcattcagcatcagagaatccacacaggcgagaaaccctatgagtgtaatgaatgcgggaaagccttcagatgtaactcccaatttcggcagcatctgagaattcacactggggagaagccctatgagtgtaatgagtgtggaaaggccttcagcgttaatgggaaactaatgcggcatcagagaattcacactggggagaaaccttttgaatgtaatgagtgtgggagatgctttacttctaaaagaaacctacttgatcatcaccgaatccatactggagaaaagccctatcaatgtaaggaatgtgggaaagccttcagtatcaatgccaaactaactaggcatcagaggatacatactggggagaaacctttcaaatgtatggaatgtgagaaagcattcagctgtagttctaactatattgtgcaccagagaatccatacaggagagaaaccctttcagtgtaaggagtgtggaaaagccttccatgttaatgcccatttaattcggcatcagagaagccacactggggagaaacccttcagatgtgtggaatgtggcaaaggcttcagctttagttctgactacattatacatcagacagtccacacttggaagaaaccctatatgtgtagtgtgtgtgggaaagcattcaggtttagcttccagctcagtcagcatcagagtgtccatagtgaaggaaaatcctaa

SEQ ID NO: 116010 - DNA, 621 bp, Artificial Sequence
  derived and/or modified sequence
atgcagaagctggagctgaagaccgactgcagagtgctgggcctgagagagatcctgaagacctacgccgccgacgtgagactggaccccgacaccgcctacagcagactgatcgtgagcgaggacagaaagagagtgcactacggcgacaccaaccagaagctgcccgacaaccccgagagattctacagatacaacatcgtgctgggcagccagtgcatcagcagcggcagacactactgggaggtggaggtgggcgacagaagcgagtggggcctgggcgtgtgcaagcagaacgtggacagaaaggaggtggtgtacctgagcccccactacggcttctgggtgatcagactgagaaagggcaacgagtacagagccggcaccgacgagtaccccatcctgagcctgcccgtgccccccagaagagtgggcatcttcgtggactacgaggcccacgacatcagcttctacaacgtgaccgactgcggcagccacatcttcaccttccccagataccccttccccggcagactgctgccctacttcagcccctgctacagcatcggcaccaacaacaccgcccccctggccatctgcagcctggacggcgaggactag

SEQ ID NO: 116011 - DNA, 621 bp, Artificial Sequence
  derived and/or modified sequence
atgcagaaactagagctgaaaaccgattgccgggtgctgggattgcgcgaaatcctgaaaacttacgccgcagacgttagactggatcccgatacagcatactctcggctcatcgtgtccgaggaccgtaagagggtccactatggagacaccaatcagaagctgccggataacccagaaagattttacaggtacaatattgtgctgggatcccaatgcatcagttccggtcggcactattgggaggtagaggtcggagacaggtcagagtgggggcttggagtctgtaagcagaatgtcgatagaaaggaggtggtatacctttctcctcattatgggttctgggttataagactgcggaaagggaacgaatacagggccggtaccgatgaatacccaatcctctccttgcctgtgccacctagacgagtgggcatattcgttgactatgaagcacatgatatatccttttataacgttacggactgcggcagccacatcttcacctttccaagatatccgttccctggacgactcctgccctatttctcaccctgctactccatcggaaccaacaacacagcgccattggccatatgctcccttgacggcgaagattag

SEQ ID NO: 116012 - DNA, 621 bp, Artificial Sequence
  derived and/or modified sequence
atgcagaagctggagctgaagacagactgccgggtgctgggcctgcgggagatcctgaagacctatgctgctgatgtgcggctggaccctgacacagcctacagccgcctcatcgtgtctgaggacaggaagagggtgcactacggggacaccaaccagaagctgcctgacaaccctgagcgcttctaccgctacaacatcgtgctgggcagccagtgcatcagcagcggccgccactactgggaggtggaggtgggggacagaagtgagtggggcctgggcgtgtgcaagcagaatgtggacaggaaggaggtggtgtacctgagcccccactacggcttctgggtgatccggctgaggaaaggaaatgagtacagagctggaacagatgagtaccccatcctgagcctgcctgtgcccccccggcgggtgggcatctttgtggactatgaggcccatgacatctccttctacaacgtgacagactgtggcagccacatcttcaccttcccccgctaccccttccctggccgcctgctgccctacttcagcccctgctacagcatcggcaccaacaacacagcccccctggccatctgcagcctggatggagaagattag

SEQ ID NO: 116013 - DNA, 621 bp, Artificial Sequence
  derived and/or modified sequence
atgcagaagctggagctgaagaccgactgccgggtgctgggcctgcgcgagatcctgaagacatatgctgcagatgtgagactggatcccgataccgcctacagccgtcttattgtttccgaagacaggaagagggtgcattacggggataccaaccagaaacttcccgacaaccctgagagattctaccgatataacattgttctgggctcgcagtgcataagttctggtagacattattgggaggttgaggttggcgaccggtcagagtggggactgggcgtctgtaagcaaaacgtggacagaaaggaagtagtttatcttagcccacactatggcttttgggttatccgcctccgtaaaggaaacgagtaccgcgctggtacggatgagtatccgatcctcagtctcccagttcccccccggagagtgggcatctttgtcgattacgaagctcacgatatttccttctacaatgtgacggactgtggcagtcacatcttcacgtttccgagatatccgttccccggtagactgctcccttatttctccccttgttacagtatcggaacgaacaatacagctccactcgccatttgtagcctggatggcgaggattag

SEQ ID NO: 116014 - DNA, 621 bp, Artificial Sequence
  derived and/or modified sequence
atgcagaagctggagttaaaaaccgattgtagagtcctggggttaagagaaatcctgaagacctatgcagctgacgtgcgccttgatcccgacaccgcgtatagcaggcttatagtttcagaggaccgtaaacgcgtacactatggagataccaaccaaaagctgccggacaaccccgaacgtttctataggtacaacatcgtgctgggaagtcagtgcatttcttctggtaggcactattgggaggtcgaggtgggggatcggtcggaatggggcttgggagtgtgcaaacaaaatgtcgataggaaggaggtggtgtatttgtccccacactatggtttttgggtgatacgactgcgaaagggcaatgagtacagagccggtacagatgaatatcctatcctttcactgccggttcctcctcgtcgtgtagggatcttcgttgattatgaggcacatgacatttccttttacaatgttacagactgcggctcccatatattcacctttccgagataccctttccccggtagattactgccatatttcagcccatgctatagcattggcacgaacaatacggcgccactggcaatatgttctctggacggcgaagactag

SEQ ID NO: 116015 - DNA, 1269 bp, Artificial Sequence
  derived and/or modified sequence
aagtgctgagctgccgggaacggcagcttctgacgctgggccattggacgctgcggaaccaggcttcttcactttgagtttccgccgcgaagcgccagtccgggccgaggagggagtgggaacttcatgaggccctcgaacatctgaagaaagagcaagaagaggcctggaagcttgaagttggtgaaaggaaacgaactgccacctggaagatacaggtggaaacccgaaaacagagtattgtatgggagtttgaaaaataccagcgattactagagaaaaagcagccaccacatcggcagctgggggcagaggtagcagcagctctggccagcctacagcgggaggcagcggagaccatgcagaaactggagttgaagacagattgccgtgtgctggggctaagagagatcctgaagacttatgcagctgatgtgcgcttggatccagatactgcttactcccgtctcatcgtgtctgaggacagaaaacgtgtgcactatggagacaccaaccagaaactgccagacaatcctgagagattttaccgctataatatcgtcctgggaagccagtgcatctcctcaggccggcactactgggaggtggaggtgggagacaggtctgagtggggcctgggagtatgtaagcaaaatgtagaccggaaggaggtggtctacttatccccccactatggattctgggtgataaggctgaggaagggaaatgagtaccgagcaggcaccgatgagtacccaatcctgtccttgccggtccctcctcgccgggtgggaatcttcgtggattatgaggcccatgacatttctttctacaatgtgactgactgtggctcccacatcttcactttcccccgctatcccttccctgggcgcctcctgccctattttagtccttgctacagcattggaaccaacaacactgctcctctggccatctgctccctggatggggaggactaagaaagctaccaccctaaccagagaggcttggaattgggcctggcccccatggggcttggaggaccgagccactgacaggtatcccctgaaactgagctgagcccagtatccaaggattcctctgtctgatcctttggtctttgctaccaggctgaagtctgtcatgaaaccacttattttaaaaagcagaggcccagtcaaatgagcattgcatcccatgagggaagcacgacagggctgatggtgaggatcagagcagttctaaggtgactcgttggggtaaggatca

SEQ ID NO: 116016 - protein, 347 aa, Artificial Sequence
  derived and/or modified sequence
MENLMTSSTLPPLFADEDGSKESNDLATTGLNHPEVPYSSGATSSTNNPEFVEDLSQGQLLQSESSNAAEGNEQRHEDEQRSKRGGWSKGRKRKKPLRDSNAPKSPLTGYVRFMNERREQLRAKRPEVPFPEITRMLGNEWSKLPPEEKQRYLDEADRDKERYMKELEQYQKTEAYKVFSRKTQDRQKGKSHRQDAARQATHDHEKETEVKERSVFDIPIFTEEFLNHSKAREAELRQLRKSNMEFEERNAALQKHVESMRTAVEKLEVDVIQERSRNTVLQQHLETLRQVLTSSFASMPLPGSGETPTVDTIDSYMNRLHSIILANPQDNENFIATVREVVNRLDR

SEQ ID NO: 116017 - protein, 156 aa, Artificial Sequence
  derived and/or modified sequence
MENLMTSSTLPPLFADEDGSKESNDLATTGLNHPEVPYSSGATSSTNNPEFVEDLSQGQLLQSESSNAAEGNEQRHEDEQRSKRGGWSKGRKRKKPLRDSNAPKSPLTGYVRFMNERREQLRAKRPEVPFPEITRMLGNEWSKLPPEEKQRYLDEA

SEQ ID NO: 116018 - protein, 100 aa, Artificial Sequence
  derived and/or modified sequence
MENLMTSSTLPPLFADEDGSKESNDLATTGLNHPEVPYSSGATSSTNNPEFVEDLSQGQLLQSESSNAAEGNEQRHEDEQRSKRGGWSKGRKRKKPLRDS

SEQ ID NO: 116019 - protein, 162 aa, Artificial Sequence
  derived and/or modified sequence
MENLMTSSTLPPLFADEDGSKESNDLATTGLNHPEVPYSSGATSSTNNPEFVEDLSQGQLLQSESSNAAEGNEQRHEDEQRSKRGGWSKGRKRKKPLRDSNAPKSPLTGYVRFMNERREQLRAKRPEVPFPEITRMLGNEWSKLPPEEKQRYLDEADRDKER

SEQ ID NO: 116020 - DNA, 3898 bp, Artificial Sequence
  derived and/or modified sequence
cgagtgcgtgaagtgaaggcgattgagaggggctgagggaattgtcctctgtggaagggactttcttttggccctaggccccttcctgcccctgtcgtcagcagagtctctacaaggaagataacggactgtaaaattctataaagcaaagctacacatcacttgacaccatacaccatcttggttacataatgaagagagatggaaaacttgatgactagctccaccctaccgcccctttttgcagatgaagacggttccaaggagagtaatgatctggctaccactgggttaaatcacccagaggttccatacagtagtggcgccacatcatccaccaacaatccagaatttgtggaggatctctctcaaggtcagttgcttcagagtgagtcttcaaatgcagcagaaggcaatgaacagaggcatgaagatgagcaacgaagtaaacgaggaggttggtccaaaggaagaaagaggaagaaacctcttcgagacagcaatgcacccaaatccccccttacaggatatgttcggttcatgaatgagcgtcgagaacaacttcgagcaaagagaccagaagtcccatttccagaaatcacaaggatgttaggcaatgaatggagtaaactgcctcctgaggaaaaacagcgctaccttgatgaagcagacagagataaggagcgttacatgaaggaactggaacagtatcagaaaacagaggcctacaaggtcttcagtaggaaaacccaggaccgtcagaaaggcaaatctcataggcaagatgcagcccggcaggccactcatgatcatgagaaagaaacagaggtaaaggaacggtctgtttttgacatccctatatttacagaggaattcttgaaccatagcaaagctcgggaagcagagctccgccagcttcgcaaatccaacatggagtttgaggagaggaatgcagccctgcaaaagcacgtggagagcatgcgcacagcagtggagaagctggaggtggatgtgatccaggagcggagccgcaacacagtcttacagcagcacctggagaccctgcggcaggtgctgaccagcagctttgccagcatgcccttgcctggaagtggagagacacctacagtggacaccattgactcatatatgaacagactgcacagtattattttagctaatccccaagacaatgaaaacttcatagctacagttcgagaagttgtgaacagactcgatcgttagggaatggtcttagaactccaagatgttccataagtgtttttacttgtgaggaatgagaagccatccatggaaatttgaactgagtgggggcagagaaagagtgcagatccctttgcttgtgaaagaattatcagtgagtgaaaggccatcaccccaggaagccaaatgagggagcagcaacatgtatatgagcttcctatggaattgtccttatgtgaagctttgaaggtgtacagccactctcccgggtcttcaggttcctaccatttccatttctgttaaagtggatctgcatatcttcagcttactaggtgacccggatgctgacatctgctgctgcagaaaggaagacttttcattgtaatttcgcttagacccttttatcagtggagctccagttttcttacctagctgtcacttttttaaatgcctctgggggttatttttgctttccttggcccccaccaatttatacatctccattttctgacctctggactaactggttgctcagcaaggttctgaaggagagtttcttgcattggacaggcccagtcttctcccatcattgccctgctgtgactccaaagaaaggagcttcttgctgacagtgccctgtggagcaaggctgtgtttcctaccccacacggtgctcagtgggtgccagccctcagtgtggctttgtgattgctgccctaaaggagaatgctctttccttcctcactggtactgcctgctgttttctaagcattgctcctgcacagacatggagtcccagccccagcaaggctcttctgttcccatctgttgacaatgtcttgtggagcatttttgctgaggaaaaggtcacttgtaaacagaggagaaagggaaagagtacaaagccctaagtttattgtaagtgaaaactgagggaattcctgtcttctttaggagtaatgattcatagatctagataggtggaaatatcattcaaaatagtcacttgagctcacaaaaaaagcaaggaagaattctcatgtcctttgtcttccttctgtagccattaactgctgaatccatgtgaggaagacaggcttcccttccttccccctccttagtgattttttctttaacagcataagtaaagaggactttctggttcatttttgtttgttttgttttgttttgttttgtttacagatgaggtcttgctgtgttgcccaggctggagtgcggtggctattcacagatgctatcatagcacactacagcctccaactcttgggctcaagcatcacgcctagcagtttctggttcctttaacagcaaaaggaaagagaggttctgattcttacctcagggttttttggttgttcattgtttttgtttttgtttttgttttgacactgcagagcacaaggctaaaggttacagctgagatctttggaaccaaaggcagagcaagcagagcccgttgtctgggccccacaccactgcaggcaggtggatagaagtgcggcccctctcatagtatgcccataagtcagggcatagggcagaactacctgtcatgttgctacaccatcctgtcttctcagcatctccttgcctgttttctttattagtccaaaggaaaacaacagcaacaaaatctgtttttaaaatgtcttatatgaacatatatcaaatatccatgcgctgaaacccacataccatcacttggcaattttttagaataagaccccattattatctattgctataaacctagccagttctcttgctcttctgtattttcctatttccctgccatcatctgctatttctgccacttctcttagactccttgtctgcaaagcccaagctagaactcactgtctatggcagaaggacatccagagcccattctggagttttgttttttccttctgccagatgctttgtgtcctgtcttccttcctcctcatatttctgtttctcatttgtgttcagttttgtgcagcattgctagcactgcttttgtgaccagaaaaggccataacatggtccaggatcatcattcttctgactctagatgggacacttgacagtgacttgaaacatttgcatattcaggaatgcatgagatttcaagagagcctacagtatgaaatcattttcacaaaataagcagcttgcttctgaaatgctgtctttcccagtagctactcacctgcctctggtggctgggattcagatgccacaaaactgtcagtatctatagaccaggtctgtgccacctcctctctcctctgtgctcagtgaggaggcagtaaatgaagttacaggctagcacaatacctaattcatgtttcccagtacacctgtagatattactgtacttttatgttctcaagaaataagttgttgcctattcagtgttacagatttctttgtttctttttaattaaaatacaagaagcagctgaggaaagggagacaaggtattttatttctgactgattttagaaaaaacttgtgtacatgtgtttggaactgttgaaatgccaagttttctgtataagtgtttttgtaattaaactttcagattttctttgttttttaagaagttgatgtgcttgtttgacatttgtctcattaaaacttttctacgttgaaaaaaaaaaaaaaa

SEQ ID NO: 116021 - DNA, 1044 bp, Artificial Sequence
  derived and/or modified sequence
atggagaatctgatgactagtagcacactgccgccgctgtttgcagacgaggacgggtccaaagagtctaatgacctcgccaccaccggactgaaccaccctgaagttccttacagttccggcgctacgtcgtccacaaacaatccagagttcgtagaggacctgtctcaggggcagctgctgcaatccgaaagttcgaacgcggctgagggaaacgagcagcgccatgaagacgagcagcgttcaaagaggggcggatggtccaaaggacggaaacggaagaaacctctccgagacagcaatgctcctaagagcccattgaccgggtacgtacgcttcatgaatgagcgtagggaacagctcagagctaagcgcccggaggtgcctttccccgagatcactcggatgttagggaatgagtggagcaaattacctcctgaagaaaaacagaggtaccttgacgaggctgacagggataaggagaggtacatgaaggaattggaacagtaccagaaaactgaggcctataaagtctttagtcgaaaaacacaagatcgtcagaaagggaagagccacaggcaagacgctgctcgccaggcgactcatgaccacgagaaggagaccgaggtaaaagagcggtccgtgttcgacatccccatctttaccgaggaatttctgaaccatagcaaagcaagggaggcggagctcaggcagctgagaaaaagcaatatggagttcgaggaaaggaacgccgctctacagaagcacgtagaatccatgcgcacagccgttgagaagctagaggtcgacgtcatacaagagcggtctagaaacacggtgctgcaacagcaccttgagactctccgacaagtccttacctcatcctttgcatccatgcccctccctgggagcggggagacccctacggtagatactatcgactcctacatgaacaggctgcactcaatcatcctcgccaatccacaggacaatgaaaacttcatcgccacagtcagagaagtggtgaatcgtctcgatcgctag

SEQ ID NO: 116022 - DNA, 1044 bp, Artificial Sequence
  derived and/or modified sequence
atggagaatctgatgactagttctaccctcccccctctgtttgcagacgaggatggctccaaagagagcaatgacttagccaccactgggctcaaccaccccgaagtgccatacagttcaggagctacatcctctacgaataaccctgagttcgttgaagatttgagccagggccagctgctgcagagcgagagtagtaacgccgcagaaggaaatgagcagcgacacgaagatgagcagaggtccaagagaggaggctggtcaaaagggcgcaagcgaaaaaagcccctgagggatagtaacgctccaaagtcacctctgacaggttacgtgaggttcatgaatgagagaagggagcagctccgagctaaacgtcccgaggttccatttccggaaattacaaggatgctcggtaatgaatggtcaaagctaccacccgaggagaaacagaggtacttagatgaagccgatagggacaaggaacgctacatgaaagaactcgagcagtaccagaagaccgaagcctataaggtgttctcgcgcaagactcaggacaggcagaaagggaagtcccatagacaagacgccgccagacaggctacgcacgaccatgagaaggagactgaggtgaaggagcgtagcgtttttgatatcccgatcttcacagaagaatttctcaaccatagcaaagctagagaggccgaactccgacaactgagaaagtctaacatggagttcgaggaacgcaatgccgcactgcaaaagcacgttgaaagcatgcgaaccgctgtagaaaagttagaggtagacgtcatccaggagcgctctcggaacaccgtgctgcagcaacacctcgaaaccctgcgacaagtcctcacatccagtttcgccagcatgcccctaccaggttcaggggagacacccacggtcgacactattgattcctatatgaatagactgcattctataatcctggctaacccacaggataatgaaaactttatcgcgacggtacgagaggtggtgaacagacttgacaggtag

SEQ ID NO: 116023 - DNA, 471 bp, Artificial Sequence
  derived and/or modified sequence
atggagaatctgatgacaagttcaaccctgcctccgctgttcgctgatgaagacggatctaaagaatctaacgacctcgcgactacaggcctcaaccacccggaggtgccttacagtagtggagccacctcctctaccaacaaccctgaatttgtggaggacctgagtcagggccagctgctccagtccgagtcttccaatgctgcagaaggtaacgaacagcggcacgaagatgagcagaggtcaaaacgaggcggatggtcaaaaggccgcaaaaggaaaaagccactgcgtgatagcaatgcccctaagagcccgctcacgggttatgtgaggtttatgaacgagcggcgagagcagctccgggccaagagacctgaagtcccatttccagaaataaccagaatgctgggaaacgagtggagtaagctgccgcccgaagagaaacagaggtaccttgacgaagcgtag

SEQ ID NO: 116024 - DNA, 303 bp, Artificial Sequence
  derived and/or modified sequence
atggagaacctgatgacctctagtaccctgccccccttattcgctgacgaggacgggtccaaagagagcaatgatctggccaccactggcttgaaccatcctgaggtcccctactctagcggtgccacaagctccaccaataaccctgaattcgtggaagacctatcccaaggccagctgctacagtcggagtccagcaatgccgctgaggggaacgaacagcggcacgaggatgagcaaagatcaaaacgtggaggctggtccaaagggagaaaacggaagaagccccttagagacagctag

SEQ ID NO: 116025 - DNA, 489 bp, Artificial Sequence
  derived and/or modified sequence
atggagaacctgatgacatcgtccactctcccacctttatttgccgacgaagacggcagtaaagagtccaacgacttggctaccacagggctcaatcaccctgaagtgccatacagtagcggtgctacaagttctaccaacaacccagaattcgtcgaggatcttagccagggccaactgctgcagagcgagagctcaaatgccgcagaaggcaacgaacagcggcacgaagatgagcagcggagcaaacgcggtggttggtcgaaagggagaaagcgcaagaaacctctgcgtgactctaatgcaccaaagtcccctctaaccgggtatgtgcgattcatgaacgagaggagggagcagttgagggccaagagacccgaggtccctttccccgagataactcgcatgttgggaaacgagtggtctaaattgccacctgaagagaaacagcgctatcttgatgaagcagacagggacaaggaaaggtag

SEQ ID NO: 116026 - DNA, 4046 bp, Artificial Sequence
  derived and/or modified sequence
aaacctccacgaaaataaggctcaccttgcgtaaccacgtagtccttcgccgcattggggcaaaataatcccttcatttttgtgaaggtaccgtggaaaatatttcatttttcttctcaccggagcaattgtaaatgctatgcggtaagaggagttacctgtggaaaggtggttaagagattaggtaaagaaaaggaaaggacaccaaaataaagtgctgcggaagaatttttgtccagctgtgagacgacgagtgcgtgaagtgaaggcgattgagaggggctgagggaattgtcctctgtggaagggactttcttttggccctaggccccttcctgcccctgtcgtcagcagagagatggaaaacttgatgactagctccaccctaccgcccctttttgcagatgaagacggttccaaggagagtaatgatctggctaccactgggttaaatcacccagaggttccatacagtagtggcgccacatcatccaccaacaatccagaatttgtggaggatctctctcaaggtcagttgcttcagagtgagtcttcaaatgcagcagaaggcaatgaacagaggcatgaagatgagcaacgaagtaaacgaggaggttggtccaaaggaagaaagaggaagaaacctcttcgagacagcaatgcacccaaatccccccttacaggatatgttcggttcatgaatgagcgtcgagaacaacttcgagcaaagagaccagaagtcccatttccagaaatcacaaggatgttaggcaatgaatggagtaaactgcctcctgaggaaaaacagcgctaccttgatgaagcagacagagataaggagcgttacatgaaggaactggaacagtatcagaaaacagaggcctacaaggtcttcagtaggaaaacccaggaccgtcagaaaggcaaatctcataggcaagatgcagcccggcaggccactcatgatcatgagaaagaaacagaggtaaaggaacggtctgtttttgacatccctatatttacagaggaattcttgaaccatagcaaagctcgggaagcagagctccgccagcttcgcaaatccaacatggagtttgaggagaggaatgcagccctgcaaaagcacgtggagagcatgcgcacagcagtggagaagctggaggtggatgtgatccaggagcggagccgcaacacagtcttacagcagcacctggagaccctgcggcaggtgctgaccagcagctttgccagcatgcccttgcctggaagtggagagacacctacagtggacaccattgactcatatatgaacagactgcacagtattattttagctaatccccaagacaatgaaaacttcatagctacagttcgagaagttgtgaacagactcgatcgttagggaatggtcttagaactccaagatgttccataagtgtttttacttgtgaggaatgagaagccatccatggaaatttgaactgagtgggggcagagaaagagtgcagatccctttgcttgtgaaagaattatcagtgagtgaaaggccatcaccccaggaagccaaatgagggagcagcaacatgtatatgagcttcctatggaattgtccttatgtgaagctttgaaggtgtacagccactctcccgggtcttcaggttcctaccatttccatttctgttaaagtggatctgcatatcttcagcttactaggtgacccggatgctgacatctgctgctgcagaaaggaagacttttcattgtaatttcgcttagacccttttatcagtggagctccagttttcttacctagctgtcacttttttaaatgcctctgggggttatttttgctttccttggcccccaccaatttatacatctccattttctgacctctggactaactggttgctcagcaaggttctgaaggagagtttcttgcattggacaggcccagtcttctcccatcattgccctgctgtgactccaaagaaaggagcttcttgctgacagtgccctgtggagcaaggctgtgtttcctaccccacacggtgctcagtgggtgccagccctcagtgtggctttgtgattgctgccctaaaggagaatgctctttccttcctcactggtactgcctgctgttttctaagcattgctcctgcacagacatggagtcccagccccagcaaggctcttctgttcccatctgttgacaatgtcttgtggagcatttttgctgaggaaaaggtcacttgtaaacagaggagaaagggaaagagtacaaagccctaagtttattgtaagtgaaaactgagggaattcctgtcttctttaggagtaatgattcatagatctagataggtggaaatatcattcaaaatagtcacttgagctcacaaaaaaagcaaggaagaattctcatgtcctttgtcttccttctgtagccattaactgctgaatccatgtgaggaagacaggcttcccttccttccccctccttagtgattttttctttaacagcataagtaaagaggactttctggttcatttttgtttgttttgttttgttttgttttgtttacagatgaggtcttcctgtgttgcccaggctggagtgcggtggctattcacagatgctatcatagcacactacagcctacaactcttgggctcaagcatcacgcctagcagtttctggttcctttaacagcaaaaggaaagagaggttctgattcttacctcagggttttttggttgttcattgtttttgtttttgtttttgttttgacactgcagagcacaaggctaaaggttacagctgagatctttggaaccaaaggcagagcaagcagagcccgttgtctgggccccacaccactgcaggcaggtggatagaagtgcggcccctctcatagtatgcccataagtcagggcatagggcagaactacctgtcatgttgctacaccatcctgtcttctcagcatctccttgcctgttttctttattagtccaaaggaaaacaacagcaacaaaatctgtttttaaaatgtcttatatgaacatatatcaaatatccatgcgctgaaacccacataccatcacttggcaattttttagaataagaccccattattatctattgctataaacctagccagttctcttgctcttctgtattttcctatttccctgccatcatctgctatttctgccacttctcttagactccttgtctgcaaagcccaagctagaactcactgtctatggcagaaggacatccagagcccattctggagttttgttttttccttctgccagatgctttgtgtcctgtcttccttcctcctcatatttctgtttctcatttgtgttcagttttgtgcagcattgctagcactgcttttgtgaccagaaaaggccataacatggtccaggatcatcattcttctgactctagatgggacacttgacagtgacttgaaacatttgcatattcaggaatgcatgagatttcaagagagcctacagtatgaaatcattttcacaaaataagcagcttgcttctgaaatgctgtctttcccagtagctactcacctgcctctggtggctgggattcagatgccacaaaactgtcagtatctatagaccaggtctgtgccacctcctctctcctctgtgctcagtgaggaggcagtaaatgaagttacaggctagcacaatacctaactcatgtttcccagtacacctgtagatattactgtacttttatgttctcaagaaataagttgttgcctattcagtgttacagatttctttgtttctttttaattaaaatacaagaagcagctgaggaaagggagacaaggtattttatttctgactgattttagaaaaaacttgtgtacatgtgtttggaactgttgaaatgccaagttttctgtataagtgtttttgtaattaaactttcagattttctttgttttttaagaagttgatgtgcttgtttgacatttgtctcattaaaacttttctacgttgaattca

SEQ ID NO: 116027 - DNA, 4112 bp, Artificial Sequence
  derived and/or modified sequence
accttgcgtaaccacgtagtccttcgccgcattggggcaaaataatcccttcatttttgtgaaggtaccgtggaaaatatttcatttttcttctcaccggagcaattgtaaatgctatgcggtaagaggagttacctgtggaaaggtggttaagagattaggtaaagaaaaggaaaggacaccaaaataaagtgctgcggaagaatttttgtccagctgtgagacgacgagtgcgtgaagtgaaggcgattgagaggggctgagggaattgtcctctgtggaagggactttcttttggccctaggccccttcctgcccctgtcgtcagcagagtctctacaaggaagataacggactgtaaaattctataaagcaaagctacacatcacttgacaccatacaccatcttggttacataatgaagagagatggaaaacttgatgactagctccaccctaccgcccctttttgcagatgaagacggttccaaggagagtaatgatctggctaccactgggttaaatcacccagaggttccatacagtagtggcgccacatcatccaccaacaatccagaatttgtggaggatctctctcaaggtcagttgcttcagagtgagtcttcaaatgcagcagaaggcaatgaacagaggcatgaagatgagcaacgaagtaaacgaggaggttggtccaaaggaagaaagaggaagaaacctcttcgagacagcaatgcacccaaatccccccttacaggatatgttcggttcatgaatgagcgtcgagaacaacttcgagcaaagagaccagaagtcccatttccagaaatcacaaggatgttaggcaatgaatggagtaaactgcctcctgaggaaaaacagcgctaccttgatgaagcagacagagataaggagcgttacatgaaggaactggaacagtatcagaaaacagaggcctacaaggtcttcagtaggaaaacccaggaccgtcagaaaggcaaatctcataggcaagatgcagcccggcaggccactcatgatcatgagaaagaaacagaggtaaaggaacggtctgtttttgacatccctatatttacagaggaattcttgaaccatagcaaagctcgggaagcagagctccgccagcttcgcaaatccaacatggagtttgaggagaggaatgcagccctgcaaaagcacgtggagagcatgcgcacagcagtggagaagctggaggtggatgtgatccaggagcggagccgcaacacagtcttacagcagcacctggagaccctgcggcaggtgctgaccagcagctttgccagcatgcccttgcctggaagtggagagacacctacagtggacaccattgactcatatatgaacagactgcacagtattattttagctaatccccaagacaatgaaaacttcatagctacagttcgagaagttgtgaacagactcgatcgttagggaatggtcttagaactccaagatgttccataagtgtttttacttgtgaggaatgagaagccatccatggaaatttgaactgagtgggggcagagaaagagtgcagatccctttgcttgtgaaagaattatcagtgagtgaaaggccatcaccccaggaagccaaatgagggagcagcaacatgtatatgagcttcctatggaattgtccttatgtgaagctttgaaggtgtacagccactctcccgggtcttcaggttcctaccatttccatttctgttaaagtggatctgcatatcttcagcttactaggtgacccggatgctgacatctgctgctgcagaaaggaagacttttcattgtaatttcgcttagacccttttatcagtggagctccagttttcttacctagctgtcacttttttaaatgcctctgggggttatttttgctttccttggcccccaccaatttatacatctccattttctgacctctggactaactggttgctcagcaaggttctgaaggagagtttcttgcattggacaggcccagtcttctcccatcattgccctgctgtgactccaaagaaaggagcttcttgctgacagtgccctgtggagcaaggctgtgtttcctaccccacacggtgctcagtgggtgccagccctcagtgtggctttgtgattgctgccctaaaggagaatgctctttccttcctcactggtactgcctgctgttttctaagcattgctcctgcacagacatggagtcccagccccagcaaggctcttctgttcccatctgttgacaatgtcttgtggagcatttttgctgaggaaaaggtcacttgtaaacagaggagaaagggaaagagtacaaagccctaagtttattgtaagtgaaaactgagggaattcctgtcttctttaggagtaatgattcatagatctagataggtggaaatatcattcaaaatagtcacttgagctcacaaaaaaagcaaggaagaattctcatgtcctttgtcttccttctgtagccattaactgctgaatccatgtgaggaagacaggcttcccttccttccccctccttagtgattttttctttaacagcataagtaaagaggactttctggttcatttttgtttgttttgttttgttttgttttgtttacagatgaggtcttcctgtgttgcccaggctggagtgcggtggctattcacagatgctatcatagcacactacagcctacaactcttgggctcaagcatcacgcctagcagtttctggttcctttaacagcaaaaggaaagagaggttctgattcttacctcagggttttttggttgttcattgtttttgtttttgtttttgttttgacactgcagagcacaaggctaaaggttacagctgagatctttggaaccaaaggcagagcaagcagagcccgttgtctgggccccacaccactgcaggcaggtggatagaagtgcggcccctctcatagtatgcccataagtcagggcatagggcagaactacctgtcatgttgctacaccatcctgtcttctcagcatctccttgcctgttttctttattagtccaaaggaaaacaacagcaacaaaatctgtttttaaaatgtcttatatgaacatatatcaaatatccatgcgctgaaacccacataccatcacttggcaattttttagaataagaccccattattatctattgctataaacctagccagttctcttgctcttctgtattttcctatttccctgccatcatctgctatttctgccacttctcttagactccttgtctgcaaagcccaagctagaactcactgtctatggcagaaggacatccagagcccattctggagttttgttttttccttctgccagatgctttgtgtcctgtcttccttcctcctcatatttctgtttctcatttgtgttcagttttgtgcagcattgctagcactgcttttgtgaccagaaaaggccataacatggtccaggatcatcattcttctgactctagatgggacacttgacagtgacttgaaacatttgcatattcaggaatgcatgagatttcaagagagcctacagtatgaaatcattttcacaaaataagcagcttgcttctgaaatgctgtctttcccagtagctactcacctgcctctggtggctgggattcagatgccacaaaactgtcagtatctatagaccaggtctgtgccacctcctctctcctctgtgctcagtgaggaggcagtaaatgaagttacaggctagcacaatacctaactcatgtttcccagtacacctgtagatattactgtacttttatgttctcaagaaataagttgttgcctattcagtgttacagatttctttgtttctttttaattaaaatacaagaagcagctgaggaaagggagacaaggtattttatttctgactgattttagaaaaaacttgtgtacatgtgtttggaactgttgaaatgccaagttttctgtataagtgtttttgtaattaaactttcagattttctttgttttttaagaagttgatgtgcttgtttgacatttgtctcattaaaacttttctacgttgaa

SEQ ID NO: 116028 - DNA, 558 bp, Artificial Sequence
  derived and/or modified sequence
aagcaaggcgagcttgggggtggccccagtcgagatgcccttcaccccttgaagatcacccctcttttggtggtggtggtactgagagatggaaaacttgatgactagctccaccctaccgcccctttttgcagatgaagacggttccaaggagagtaatgatctggctaccactgggttaaatcacccagaggttccatacagtagtggcgccacatcatccaccaacaatccagaatttgtggaggatctctctcaaggtcagttgcttcagagtgagtcttcaaatgcagcagaaggcaatgaacagaggcatgaagatgagcaacgaagtaaacgaggaggttggtccaaaggaagaaagaggaagaaacctcttcgagacagcaatgcacccaaatccccccttacaggatatgttcggttcatgaatgagcgtcgagaacaacttcgagcaaagagaccagaagtcccatttccagaaatcacaaggatgttaggcaatgaatggagtaaactgcctcctgaggaaaaacagcgctaccttgatgaagcaga

SEQ ID NO: 116029 - DNA, 631 bp, Artificial Sequence
  derived and/or modified sequence
gacaaggggcggggctgccgagaccttgggcccgcgtgagggaaaatttgggttcgattaagccgcagaggaaaagaccaggggagtctgggcccatttgggcgtcggggcccgctaggtcagccgtcatcgaatacagaatatgttttcgaggacgctaatatgtagtcatgaccaatttcagttcttctactttctgcgggccttcgcaataaaaaaaaaaaaactacatctcccagaaacctccacgaaaataaggctcaccttgcgtaaccacgtagtccttcgccgcattggggcaaaataatcccttcatttttgtgaagagagatggaaaacttgatgactagctccaccctaccgcccctttttgcagatgaagacggttccaaggagagtaatgatctggctaccactgggttaaatcacccagaggttccatacagtagtggcgccacatcatccaccaacaatccagaatttgtggaggatctctctcaaggtcagttgcttcagagtgagtcttcaaatgcagcagaaggcaatgaacagaggcatgaagatgagcaacgaagtaaacgaggaggttggtccaaaggaagaaagaggaagaaacctcttcgagacagca

SEQ ID NO: 116030 - DNA, 559 bp, Artificial Sequence
  derived and/or modified sequence
aaggttaaaaggcccatttaccatacagtttaaattgatgtgtccaagtcaagaaaataaatatttagagagatggaaaacttgatgactagctccaccctaccgcccctttttgcagatgaagacggttccaaggagagtaatgatctggctaccactgggttaaatcacccagaggttccatacagtagtggcgccacatcatccaccaacaatccagaatttgtggaggatctctctcaaggtcagttgcttcagagtgagtcttcaaatgcagcagaaggcaatgaacagaggcatgaagatgagcaacgaagtaaacgaggaggttggtccaaaggaagaaagaggaagaaacctcttcgagacagcaatgcacccaaatccccccttacaggatatgttcggttcatgaatgagcgtcgagaacaacttcgagcaaagagaccagaagtcccatttccagaaatcacaaggatgttaggcaatgaatggagtaaactgcctcctgaggaaaaacagcgctaccttgatgaagcagacagagataaggagcgtt

SEQ ID NO: 116031 - DNA, 1044 bp, Artificial Sequence
  derived and/or modified sequence
atggagaacctgatgaccagcagcaccctgccccccctgtttgctgatgaagatggcagcaaggagagcaatgacctggccaccaccggcctgaaccaccctgaggtgccctacagcagcggggccaccagcagcaccaacaaccctgagtttgtggaggacctgagccagggccagctgctgcagagcgagagcagcaatgctgctgagggcaatgagcagagacatgaagatgagcagaggagcaagagaggaggctggagcaaaggaaggaagaggaagaagcccctgcgggacagcaatgcccccaagagccccctgaccggctacgtgcgcttcatgaatgaaagaagagagcagctgcgggccaagaggcctgaggtgcccttccctgagatcaccaggatgctgggcaatgagtggagcaagctgcccccagaggagaagcagcgctacctggatgaggccgaccgggacaaggagcgctacatgaaggagctggagcagtaccagaagacagaggcctacaaggtgttcagcaggaagacccaggaccggcagaagggcaagagccaccggcaggatgctgcccggcaggccacccatgaccacgagaaggagacagaggtgaaggagaggtctgtgtttgacatccccatcttcacagaggagttcctgaaccacagcaaggcccgggaggccgagctgcggcagctgaggaagagcaacatggagtttgaggagagaaatgctgccctgcagaagcacgtggagagcatgaggacagctgtggagaagctggaggtggatgtgatccaggagaggagcaggaacacagtgctgcagcagcacctggagaccctgcggcaggtgctgaccagcagctttgcctccatgcccctgcccggcagcggggagacccccaccgtggacaccatcgacagctacatgaaccggctgcacagcatcatcctggccaacccccaggacaatgaaaacttcatcgccaccgtgcgggaggtggtgaaccggctggacagatag

SEQ ID NO: 116032 - DNA, 471 bp, Artificial Sequence
  derived and/or modified sequence
atggagaacctgatgaccagcagcaccctgccccccctgtttgctgatgaagatggcagcaaggagagcaatgacctggccaccaccggcctgaaccaccctgaggtgccctacagcagcggggccaccagcagcaccaacaaccctgagtttgtggaggacctgagccagggccagctgctgcagagcgagagcagcaatgctgctgagggcaatgagcagagacatgaagatgagcagaggagcaagagaggaggctggagcaaaggaaggaagaggaagaagcccctgcgggacagcaatgcccccaagagccccctgaccggctacgtgcgcttcatgaatgaaagaagagagcagctgcgggccaagaggcctgaggtgcccttccctgagatcaccaggatgctgggcaatgagtggagcaagctgcccccagaggagaagcagcgctacctggatgaggcctag

SEQ ID NO: 116033 - DNA, 303 bp, Artificial Sequence
  derived and/or modified sequence
atggagaacctgatgaccagcagcaccctgccccccctgtttgctgatgaagatggcagcaaggagagcaatgacctggccaccaccggcctgaaccaccctgaggtgccctacagcagcggggccaccagcagcaccaacaaccctgagtttgtggaggacctgagccagggccagctgctgcagagcgagagcagcaatgctgctgagggcaatgagcagagacatgaagatgagcagaggagcaagagaggaggctggagcaaaggaaggaagaggaagaagcccctgcgggacagctag

SEQ ID NO: 116034 - DNA, 489 bp, Artificial Sequence
  derived and/or modified sequence
atggagaacctgatgaccagcagcaccctgccccccctgtttgctgatgaagatggcagcaaggagagcaatgacctggccaccaccggcctgaaccaccctgaggtgccctacagcagcggggccaccagcagcaccaacaaccctgagtttgtggaggacctgagccagggccagctgctgcagagcgagagcagcaatgctgctgagggcaatgagcagagacatgaagatgagcagaggagcaagagaggaggctggagcaaaggaaggaagaggaagaagcccctgcgggacagcaatgcccccaagagccccctgaccggctacgtgcgcttcatgaatgaaagaagagagcagctgcgggccaagaggcctgaggtgcccttccctgagatcaccaggatgctgggcaatgagtggagcaagctgcccccagaggagaagcagcgctacctggatgaggccgaccgggacaaggagaggtag

SEQ ID NO: 116035 - DNA, 1044 bp, Artificial Sequence
  derived and/or modified sequence
atggagaacctgatgaccagcagcaccctgccccccctgttcgccgacgaggatggatcaaaagaatctaatgaccttgccactacaggcttaaatcaccccgaggttccttactcatctggcgccacatcatcaaccaacaacccagagtttgtagaagacctcagccagggccagctcctgcagtctgagagttccaacgccgccgaagggaatgagcagcgtcatgaagatgagcagcgctctaagcgcggtgggtggtcaaagggccggaaacgtaagaagcctctacgcgactcaaacgctcccaagtcacctcttactggatacgttcggttcatgaacgagcgacgagagcagctgcgagctaaaaggccggaggtcccctttcctgagattaccaggatgctcgggaacgagtggtcaaagctcccccctgaggaaaaacagaggtatcttgatgaagccgatcgagacaaggaacgatatatgaaagaactcgagcagtatcaaaaaacggaggcatacaaggtcttctcccgaaaaacacaggaccgtcaaaaaggcaagtcacaccgacaggatgccgcccggcaggccacccacgaccacgagaaggagactgaagtgaaggagcggagcgtctttgacatcccgatctttaccgaggagtttcttaatcactcaaaggctcgcgaggctgaattgcggcagctccggaagagcaacatggagttcgaagaacggaatgccgcccttcagaaacatgtggagagcatgcgcacagctgtggagaaactcgaagtggatgtcatccaggaacggtcccggaacaccgtgcttcagcagcaccttgagaccctgcggcaagtcttgacctctagcttcgcctctatgcccctgcctggctcaggggagacccctaccgtggatactatagactcctacatgaataggttgcattcaataattctagctaacccgcaggacaacgaaaacttcattgccaccgtgagggaggtcgtgaacaggctggatcgctag

SEQ ID NO: 116036 - DNA, 1044 bp, Artificial Sequence
  derived and/or modified sequence
atggagaacctgatgaccagcagcaccctgccccccctgttcgccgatgaggatggcagcaaggagtctaacgacctcgcaacaactggactgaaccatcccgaagtgccctattcctctggggcaacatcttctacaaataacccagagtttgtggaagacctaagccagggccagctactgcagagcgagtctagcaacgcggccgagggtaacgagcagagacacgaggacgagcagagatctaagcggggcgggtggtccaaagggcgcaagagaaagaaacctttaagggattcaaacgcgcctaaatcccccctgactgggtatgttaggttcatgaatgagcgaagagaacaattacgagccaagaggcccgaggtcccttttcctgaaatcactcgaatgttggggaatgaatggtctaagctgccccctgaagagaagcaaaggtatctcgatgaggccgacagggataaagagagatatatgaaggagcttgagcagtatcagaagacagaggcctacaaggtgttctctcgaaagacccaggatcggcaaaagggtaaatcacataggcaggacgccgctcgacaggctacccacgatcacgagaaagagaccgaggttaaggagcgttcggtttttgacatccctattttcaccgaggagttcctcaaccacagcaaggcccgggaggctgaactcagacagctgaggaagtccaatatggagttcgaggaaagaaatgccgccctgcagaaacatgtggagtctatgcgtacagctgtagagaaacttgaagtcgacgtcatccaggagcgttcacgcaatacagtgctccagcagcatctggaaacacttaggcaggtattgacttcctccttcgcgtcaatgcctttgccaggcagcggcgagacccctaccgtggacacaattgattcctacatgaatcgcctgcactcaattattctggccaacccacaggacaacgaaaatttcattgcaaccgtgcgagaggtagtgaaccgtttagaccgttag

SEQ ID NO: 116037 - DNA, 471 bp, Artificial Sequence
  derived and/or modified sequence
atggagaacctgatgaccagcagcaccctgccccccctgttcgccgacgaagacgggtcaaaggagtcaaatgacctcgctaccaccggattgaaccaccctgaagtgccctatagcagcggcgccacgtctagcaccaataaccctgagtttgtggaggatcttagtcagggacagttgctgcaatccgaaagtagtaacgcggctgagggcaatgaacaacgccacgaagacgagcagcgttcaaaacggggaggatggagcaagggacgcaaacgcaagaaaccattgcgggactccaatgcgcccaagagtccactgaccgggtacgtgaggtttatgaatgaacgcagagagcaactacgagccaagcgaccagaggtgccatttcccgagattacccgcatgctaggaaatgagtggagcaagctgccgcctgaagaaaagcaaagatacttggacgaggcttag

SEQ ID NO: 116038 - DNA, 303 bp, Artificial Sequence
  derived and/or modified sequence
atggagaacctgatgaccagcagcaccctgccccccctgttcgccgatgaggatggcagtaaagagagcaatgacctggcaaccaccgggctgaaccacccagaagtaccatattcctctggcgccacttccagtactaacaacccggagttcgtggaagatctgtcacagggacagctgctgcagtccgagagctcaaacgctgcagagggcaatgaacagcgccacgaagacgagcagcgatctaaacgcggtggctggtcaaaagggcggaaacggaaaaagcccctcagagactcttag

SEQ ID NO: 116039 - DNA, 489 bp, Artificial Sequence
  derived and/or modified sequence
atggagaacctgatgaccagcagcaccctgccccccctgttcgccgacgaagacggatccaaggagagcaacgatttggcaactaccggactgaatcatcccgaggtgccttattcttccggcgctacgtcttcaactaacaaccccgagttcgttgaagatctctcacagggccaacttctgcaaagcgaatcatccaatgccgctgagggcaatgagcagagacacgaggacgagcaacggtcaaaacgtgggggttggtcaaaggggcggaaaagaaaaaagccactgagagactcaaatgcccctaaaagcccactgactggctacgttcgctttatgaatgaacggcgcgagcaactgagagccaaacgccccgaagttccatttcctgagatcactaggatgctgggcaacgaatggtccaagttaccacctgaggaaaaacagaggtacctggacgaggctgatagggacaaggaaagatag

SEQ ID NO: 116040 - DNA, 1044 bp, Artificial Sequence
  derived and/or modified sequence
atggagaacctgatgacctcctcaacgctgccccctctgtttgctgatgaagacggcagcaaagaatcaaacgacctggcaaccaccggactaaaccaccccgaggtcccttactcttcaggcgcaacttctagtaccaataatcccgaattcgtcgaggatctcagtcagggacagctgctgcagtccgagtcctctaacgcagctgagggcaacgagcaacggcacgaagatgaacagcggtccaaacggggaggctggagcaagggtaggaaacgcaagaagcctcttcgtgatagtaacgcccctaagtcgcccctgacaggttatgtgaggttcatgaatgagcgcagggagcagcttcgtgccaagcgccctgaagtccccttccctgagatcacacggatgctgggcaacgaatggtctaagctcccccctgaagaaaagcagcgatacctcgatgaggctgatagggataaggagcggtatatgaaggaactggagcagtatcaaaagacagaggcttataaggtgttctctcgcaaaacacaggataggcagaaggggaaatcacatagacaggatgccgctaggcaggcaacccatgaccacgagaaggagactgaagtgaaggagagatccgtgttcgatattccaatttttaccgaggaatttttgaatcacagcaaagccagggaagctgaactgagacagctccgaaagagtaacatggaatttgaggaaagaaacgcagctcttcagaagcacgtcgaaagcatgcgtaccgctgttgagaaactggaggtggacgttattcaggaacgctccagaaacactgtacttcaacagcaccttgaaacgctgagacaagttctgacttcctccttcgccagcatgcctttacctggctcgggagaaactcctaccgtggacacaatcgattcttacatgaatagacttcactccattatcttagccaatccccaggataacgaaaatttcattgctaccgtgagggaagtcgtcaatagattggaccggtag

SEQ ID NO: 116041 - DNA, 1044 bp, Artificial Sequence
  derived and/or modified sequence
atggagaacctgatgacaagttccacattgcccccactgtttgccgatgaggatgggtccaaagaaagcaatgacctggctactactggtcttaatcaccccgaagtcccctattcatccggggctacgtcttcaaccaataaccccgagtttgtggaggatctttcccagggccagctgctgcagtccgaatcctccaatgctgcagagggcaacgagcagaggcacgaggacgaacagaggagtaaacgcggtggatggtccaaggggagaaaacgcaagaagcctctgcgcgattccaatgcaccaaagtcacccctgaccggttatgtcaggtttatgaatgagcgaagggagcagctacgcgcaaaacgccctgaggtgcccttccccgagattaccagaatgctgggtaacgagtggtccaaactgcccccagaagagaaacaacgatatctggatgaggctgaccgcgacaaagagcggtacatgaaagaactggagcagtaccaaaagaccgaagcctacaaagtgttctcccggaaaacccaggatagacagaaggggaagagtcaccgccaggacgctgctcgccaggctacccacgaccacgagaaggaaacagaagtgaaagagcgctctgtgtttgatatacccattttcactgaggagttcttaaaccactctaaggctcgtgaagccgaacttcgccagttgcggaaatccaacatggaatttgaggagcggaatgctgctctgcagaaacatgtggagagtatgcggacagccgtggagaagctcgaagtggacgtgatccaagaacgaagcagaaacacagtgctccagcagcacctggagaccttgagacaggtgctaactagctcctttgcatctatgccactccccggatccggggaaacgccaaccgtggacaccattgattcttatatgaatcggttgcattccataattttggccaacccacaagacaacgagaactttatcgccacagtgagagaagtggttaacaggctagaccgctag

SEQ ID NO: 116042 - DNA, 471 bp, Artificial Sequence
  derived and/or modified sequence
atggaaaacctgatgactagcagcaccctccctcccctttttgccgacgaagatggatcgaaagaatctaacgatctcgctaccaccggattaaatcacccagaggtgccgtacagctccggtgcgaccagtagcaccaacaacccggaatttgtcgaggacctgtcgcagggacaattgctccagagcgaaagtagcaatgcagctgaaggcaacgaacagaggcatgaggacgagcaaagaagcaagcgcggtggctggtccaagggcaggaaaagaaaaaaacccctcagagactctaatgcacccaaatctcctctgacaggatacgtgaggtttatgaatgagcgtcgggagcagctccgggctaaaagaccagaggtcccgttccctgagattacccgcatgctcggcaatgagtggtcgaagcttcctcccgaggaaaagcaacgctacctcgacgaagcttag

SEQ ID NO: 116043 - DNA, 303 bp, Artificial Sequence
  derived and/or modified sequence
atggagaatttaatgacgtcctctactctccctcccctctttgcggatgaggatggttccaaggagtctaacgatcttgccacaacgggactcaaccatccagaggtcccctactcctccggtgcgaccagctccacaaacaaccccgaattcgtggaagatctatcccaaggacaactgctgcagtctgaatcctcaaacgcagctgaaggaaacgagcaacgacacgaagacgaacagaggagcaagcggggaggatggagcaaaggtagaaagagaaagaagccactgagggacagctag

SEQ ID NO: 116044 - DNA, 489 bp, Artificial Sequence
  derived and/or modified sequence
atggaaaatctgatgacatctagcacccttccccctctgttcgccgacgaggacggctccaaggagtcaaatgacttagcgacgactggtctgaatcatcccgaggtgccatatagcagcggcgcaaccagcagtacaaataatccggaattcgttgaagacctgtcacaaggccagctcctgcagagcgagagctccaacgcagccgaaggcaacgaacaacggcacgaagatgagcagcgcagcaagagaggtggctggtctaagggtagaaagcgtaagaaaccgctacgcgattcgaacgcgcctaagtccccgcttacgggctacgttcgattcatgaacgagaggcgggaacagcttcgcgctaagaggccagaagtacctttccctgagattacccggatgctgggcaatgagtggtctaagctcccacctgaggagaaacagagatacctcgacgaagcagatcgagacaaggagagatag

SEQ ID NO: 116045 - DNA, 1044 bp, Artificial Sequence
  derived and/or modified sequence
atggagaacctgatgaccagcagcaccctgccccccctgttcgccgacgaggacggcagcaaggagagcaacgacctggccaccaccggcctgaaccaccccgaggtgccctacagcagcggcgccaccagcagcaccaacaaccccgagttcgtggaggacctgagccagggccagctgctgcagagcgagagcagcaacgccgccgagggcaacgagcagagacacgaggacgagcagagaagcaagagaggcggctggagcaagggcagaaagagaaagaagcccctgagagacagcaacgcccccaagagccccctgaccggctacgtgagattcatgaacgagagaagagagcagctgagagccaagagacccgaggtgcccttccccgagatcaccagaatgctgggcaacgagtggagcaagctgccccccgaggagaagcagagatacctggacgaggccgacagagacaaggagagatacatgaaggagctggagcagtaccagaagaccgaggcctacaaggtgttcagcagaaagacccaggacagacagaagggcaagagccacagacaggacgccgccagacaggccacccacgaccacgagaaggagaccgaggtgaaggagagaagcgtgttcgacatccccatcttcaccgaggagttcctgaaccacagcaaggccagagaggccgagctgagacagctgagaaagagcaacatggagttcgaggagagaaacgccgccctgcagaagcacgtggagagcatgagaaccgccgtggagaagctggaggtggacgtgatccaggagagaagcagaaacaccgtgctgcagcagcacctggagaccctgagacaggtgctgaccagcagcttcgccagcatgcccctgcccggcagcggcgagacccccaccgtggacaccatcgacagctacatgaacagactgcacagcatcatcctggccaacccccaggacaacgagaacttcatcgccaccgtgagagaggtggtgaacagactggacagatag

SEQ ID NO: 116046 - DNA, 471 bp, Artificial Sequence
  derived and/or modified sequence
atggagaacctgatgaccagcagcaccctgccccccctgttcgccgacgaggacggcagcaaggagagcaacgacctggccaccaccggcctgaaccaccccgaggtgccctacagcagcggcgccaccagcagcaccaacaaccccgagttcgtggaggacctgagccagggccagctgctgcagagcgagagcagcaacgccgccgagggcaacgagcagagacacgaggacgagcagagaagcaagagaggcggctggagcaagggcagaaagagaaagaagcccctgagagacagcaacgcccccaagagccccctgaccggctacgtgagattcatgaacgagagaagagagcagctgagagccaagagacccgaggtgcccttccccgagatcaccagaatgctgggcaacgagtggagcaagctgccccccgaggagaagcagagatacctggacgaggcctag

SEQ ID NO: 116047 - DNA, 303 bp, Artificial Sequence
  derived and/or modified sequence
atggagaacctgatgaccagcagcaccctgccccccctgttcgccgacgaggacggcagcaaggagagcaacgacctggccaccaccggcctgaaccaccccgaggtgccctacagcagcggcgccaccagcagcaccaacaaccccgagttcgtggaggacctgagccagggccagctgctgcagagcgagagcagcaacgccgccgagggcaacgagcagagacacgaggacgagcagagaagcaagagaggcggctggagcaagggcagaaagagaaagaagcccctgagagacagctag

SEQ ID NO: 116048 - DNA, 489 bp, Artificial Sequence
  derived and/or modified sequence
atggagaacctgatgaccagcagcaccctgccccccctgttcgccgacgaggacggcagcaaggagagcaacgacctggccaccaccggcctgaaccaccccgaggtgccctacagcagcggcgccaccagcagcaccaacaaccccgagttcgtggaggacctgagccagggccagctgctgcagagcgagagcagcaacgccgccgagggcaacgagcagagacacgaggacgagcagagaagcaagagaggcggctggagcaagggcagaaagagaaagaagcccctgagagacagcaacgcccccaagagccccctgaccggctacgtgagattcatgaacgagagaagagagcagctgagagccaagagacccgaggtgcccttccccgagatcaccagaatgctgggcaacgagtggagcaagctgccccccgaggagaagcagagatacctggacgaggccgacagagacaaggagagatag

SEQ ID NO: 116049 - protein, 84 aa, Artificial Sequence
  derived and/or modified sequence
MRKVVLITGASSGIGLALCKRLLAEDDELHLCLACRNMSKAEAVCAALLASHPTAEVTIVQVDVSNLQSVFRASKELKQRYISC

SEQ ID NO: 116050 - DNA, 336 bp, Artificial Sequence
  derived and/or modified sequence
atgagaaaagtggtgcttattactggcgcttcttcgggaattggccttgcgctgtgtaagcgcctgctcgcagaagatgacgaactccacttgtgtttggcttgccgcaacatgtctaaggccgaggccgtctgtgcagccttactcgcttcacatccaaccgcagaggttacaatcgtccaggttgacgtgagcaacctgcagagcgtgtttagagcctctaaggagcttaagcagcggtttcaaagactcgactgcatctacctcaatgctgggattatgccaaacccccagctgaatattaaggcccttttcttcggtctgttcagctcttag

SEQ ID NO: 116051 - DNA, 255 bp, Artificial Sequence
  derived and/or modified sequence
atgaggaaagtcgtcctgatcacaggggcaagtagtgggattggccttgctctctgtaaacgtcttctagctgaggacgatgagcttcacctgtgcttggcgtgtaggaacatgagcaaggctgaggcagtttgcgccgcacttcttgcatcgcatcctaccgctgaggttacaatcgtccaagtggacgtgtctaacctccagtcagttttcagagcaagcaaggaactcaaacagcggtatataagctgttag

SEQ ID NO: 116052 - DNA, 666 bp, Artificial Sequence
  derived and/or modified sequence
gagtgcgcgaagatgcgaaaggtggttttgatcaccggggctagcagtggcattggcctggccctctgcaagcggctgctggcggaagatgatgagcttcatctgtgtttggcgtgcaggaacatgagcaaggcagaagctgtctgtgctgctctgctggcctctcaccccactgctgaggtcaccattgtccaggtggatgtcagcaacctgcagtcggtcttccgggcctccaaggaacttaagcaaaggtttcagagattagactgtatatatctaaatgctgggatcatgcctaatccacaactaaatatcaaagcacttttctttggcctcttttcaagctgaaggcctgctgacccagggtgataagatcactgctgatggacttcaggaggtgtttgagaccaatgtctttggccattttatcctggtaaagaagctgtgggcttaataagctaatatttcgtgtgatagtttctgtaaagctctgggcacagggcattattatagttgagcagccagttaactgatttaatctcatgtttgagttttcttgattgcatttgccttgtttattgtgagcatggaatacttctggaagctttcctagtagatttttctttaataaatgtactaatagtttttgatttacagaattactgc

SEQ ID NO: 116053 - DNA, 507 bp, Artificial Sequence
  derived and/or modified sequence
gaggcggcccgaaatcgtaggacttccgaaagcagcggcggtgtttgcttcactgcttggaagtgtgagtgcgcgaagatgcgaaaggtggttttgatcaccggggctagcagtggcattggcctggccctctgcaagcggctgctggcggaagatgatgagcttcatctgtgtttggcgtgcaggaacatgagcaaggcagaagctgtctgtgctgctctgctggcctctcaccccactgctgaggtcaccattgtccaggtggatgtcagcaacctgcagtcggtcttccgggcctccaaggaacttaagcaaaggtatatctcttgctgatggattttttttctcatgtgattgtgcagcataacacttaataaaataagagaggaaagaaaaacctgaaaagaaacaggtgcggtgtaagcagttatgttgaggaagtctgtatagggtgacccattgtgtctcagtaccacgttttctttctttttttttttttttttaaag

SEQ ID NO: 116054 - DNA, 336 bp, Artificial Sequence
  derived and/or modified sequence
atgaggaaggtggtgctgatcaccggggccagcagcggcatcggcctggccctgtgcaagaggctgctggctgaagatgatgagctgcacctgtgcctggcctgcaggaacatgagcaaggccgaggccgtgtgtgccgccctgctggccagccaccccacagctgaggtgaccatcgtgcaggtggatgtgagcaacctgcagagcgtcttccgggccagcaaggagctgaagcagcgcttccagaggctggactgcatctacctgaatgccggcatcatgcccaacccccagctgaacatcaaggccctcttcttcggcctcttcagcagctag

SEQ ID NO: 116055 - DNA, 255 bp, Artificial Sequence
  derived and/or modified sequence
atgaggaaggtggtgctgatcaccggggccagcagcggcatcggcctggccctgtgcaagaggctgctggctgaagatgatgagctgcacctgtgcctggcctgcaggaacatgagcaaggccgaggccgtgtgtgccgccctgctggccagccaccccacagctgaggtgaccatcgtgcaggtggatgtgagcaacctgcagagcgtcttccgggccagcaaggagctgaagcagcgctacatcagctgctag

SEQ ID NO: 116056 - DNA, 336 bp, Artificial Sequence
  derived and/or modified sequence
atgcggaaggtggtgctgatcaccggcgccagcagcggcatcggccttgctttgtgcaaaaggctgctggctgaagacgatgaactgcacctttgcttagcctgccggaacatgtccaaagcagaggccgtctgtgctgcactcttagcatctcaccccacagccgaggtaaccatagtacaggtggacgtgagcaacctgcagtctgtgtttagggccagtaaggagttaaagcagaggttccagaggctggactgtatctatttgaatgccggcatcatgccgaatcctcagttaaacattaaggccctcttcttcggattgttttctagttag

SEQ ID NO: 116057 - DNA, 255 bp, Artificial Sequence
  derived and/or modified sequence
atgcggaaggtggtgctgatcaccggcgccagcagcggcatcggccttgctttatgtaaaaggttattagccgaggatgatgaacttcacctttgcctcgcctgtcggaacatgtccaaggcagaagcagtttgcgcagccctgctggcttcccatcccacagccgaggtgaccattgttcaggtggatgtgtctaacctgcagtccgtgtttcgtgcatcgaaggaattgaagcagcgttacattagctgctag

SEQ ID NO: 116058 - DNA, 336 bp, Artificial Sequence
  derived and/or modified sequence
atgcgcaaggtggtgttaatcactggtgcttccagcggcataggcctggccctgtgcaaacgtctgcttgcagaggacgacgagctacacctgtgtctggcttgccgcaatatgagtaaggccgaggccgtctgtgctgcactgctagccagtcatcccactgcggaagttacaattgtgcaggttgacgtaagtaatctgcaatcagtgttcagggcgtcgaaggagttgaaacagagatttcaacgattggactgcatctacctgaatgcgggaatcatgccaaacccccagctgaatattaaagccctctttttcggcctgttctcaagctag

SEQ ID NO: 116059 - DNA, 255 bp, Artificial Sequence
  derived and/or modified sequence
atgaggaaggtggtcctgatcacaggtgcctcttccggaattggactagcactgtgtaagcgcctcctggcagaagacgacgagcttcatttatgcttagcctgtaggaatatgtctaaggccgaagccgtatgcgcagccctgctggcttctcacccaaccgcagaagtgactatcgttcaggtcgatgtgtccaacctgcagagcgttttcagggccagtaaagagctgaagcagaggtacattagctgctag

SEQ ID NO: 116060 - DNA, 336 bp, Artificial Sequence
  derived and/or modified sequence
atgagaaaggtggtgctgatcaccggcgccagcagcggcatcggcctggccctgtgcaagagactgctggccgaggacgacgagctgcacctgtgcctggcctgcagaaacatgagcaaggccgaggccgtgtgcgccgccctgctggccagccaccccaccgccgaggtgaccatcgtgcaggtggacgtgagcaacctgcagagcgtgttcagagccagcaaggagctgaagcagagattccagagactggactgcatctacctgaacgccggcatcatgcccaacccccagctgaacatcaaggccctgttcttcggcctgttcagcagctag

SEQ ID NO: 116061 - DNA, 255 bp, Artificial Sequence
  derived and/or modified sequence
atgagaaaggtggtgctgatcaccggcgccagcagcggcatcggcctggccctgtgcaagagactgctggccgaggacgacgagctgcacctgtgcctggcctgcagaaacatgagcaaggccgaggccgtgtgcgccgccctgctggccagccaccccaccgccgaggtgaccatcgtgcaggtggacgtgagcaacctgcagagcgtgttcagagccagcaaggagctgaagcagagatacatcagctgctag

SEQ ID NO: 116062 - DNA, 678 bp, Artificial Sequence
  derived and/or modified sequence
atgcggcgctacaggacagccttcacgagggagcaaatcgcaagactcgaaaaggagttctatagggagaactatgtaagtagacctcggcgctgtgaactcgcggccgccctgaatctgccggagacaaccatcaaggtctggttccagaaccggcgcatgaaagataagcgtcagcggctggccatgacatggccgcaccctgcggaccccgccttctacacgtacatgatgagccatgcagcagcagctggcgggctgccttaccccttccctagccacctgcccctcccctactacagccccgtcggcctgggtgccgcgtccgccgcctctgccgccgctagccccttttctggaagcctacgccctcttgatacttttagggttcttagtcaaccttatcccagaccggagctcttatgtgctttccgtcatccacctttgtacccgggtcccgcccacggactcggagccagcgccggcggcccttgttcatgcctggcctgtcattcgggccctgcaaatggacttgctccacgggccgcagcagcttctgactttacctgtgcctctacatccagatccgactcattcctgacttttgctcctagcgtgctcagtaaagcaagctcagtagctctcgaccaacgcgaagaggttccacttactaggtag

SEQ ID NO: 116063 - DNA, 678 bp, Artificial Sequence
  derived and/or modified sequence
atgaggcgctacagaacagccttcacccgggagcagatcgcccggctggagaaggagttctacagagaaaattatgtgtcccggccccggcgctgtgagctggccgccgccctgaacctgcctgagaccaccatcaaggtgtggttccagaacagaaggatgaaggacaagaggcagaggctggccatgacctggccccaccctgctgaccctgccttctacacctacatgatgagccatgctgctgctgctgggggcctgccctaccccttccccagccacctgcccctgccctactacagccctgtgggcctgggcgccgccagcgctgccagcgctgctgccagccccttcagcggcagcctgcggcccctggacaccttccgggtgctgagccagccctaccccaggcctgagctgctgtgtgccttccgccacccccccctgtacccaggccctgcccacggcctgggcgccagcgctgggggcccctgcagctgcctggcctgccacagcggccctgccaacggcctggcccccagggctgctgctgccagtgacttcacctgtgccagcaccagcagaagtgacagcttcctgacctttgcccccagcgtgctgagcaaggccagctctgtggccctggaccagcgggaggaggtgcccctgaccaggtag

SEQ ID NO: 116064 - DNA, 678 bp, Artificial Sequence
  derived and/or modified sequence
atgcggcggtaccggaccgccttcacccgggagcagatcgcccggctcgagaaagagttctaccgcgaaaactacgtgtctcggccgaggagatgtgaactcgcggcagccttaaacctccccgagactaccattaaggtgtggttccaaaaccggcgaatgaaggataaaagacaacgtctcgctatgacatggccccatcctgctgatccggctttctacacatacatgatgtctcatgctgctgccgctggcggacttccctatccctttcctagtcatctccccttgccatattattccccggtgggccttggtgcggccagcgcagcttcagccgccgcctctccgttcagtggcagccttcggccgctcgacacctttcgggtattaagccagccttaccccaggcctgagctcctatgcgctttcagacacccgccattatatcctggacccgcacacggcctgggggctagtgcgggtggtccttgttcctgcctcgcctgccactctggccctgcgaatggcctggctcctcgagctgcagccgctagtgatttcacatgtgcatccacatcccggtccgatagctttctgacttttgcacccagcgttttgtccaaggcaagcagcgtcgctcttgaccagcgagaggaggtgcccttgactcgatag

SEQ ID NO: 116065 - DNA, 678 bp, Artificial Sequence
  derived and/or modified sequence
atgaggcggtaccggacagcatttactcgggaacagattgcacgtctcgagaaggagttctacagggagaattatgtgtccagaccccgtcgatgcgagctcgctgctgcccttaatctgccagaaacaactatcaaggtgtggttccagaaccgtcggatgaaagacaagcgacagcggctcgccatgacgtggccccaccccgctgacccagccttttacacctacatgatgtcacatgccgctgccgctggcggacttccctatccattcccatcacatctcccgctgccctactatagtccagttggactcggagccgcttccgcggcatcagctgcggcaagtcccttctctgggtcacttcgacccctcgatacattcagagtgcttagtcagccatatcctcggcctgaactgctctgtgcctttcgccacccccctttataccctggacctgcacacgggctgggagctagcgccggtggcccttgcagttgccttgcttgccactcaggcccagcaaacggtctcgctccaagagcagctgctgccagtgattttacatgcgcctcgacctccaggagtgactcatttctgacctttgcacctagtgtgttgagtaaggcctcctccgtggcgcttgatcagcgggaggaggtccctctgactcgctag

SEQ ID NO: 116066 - DNA, 678 bp, Artificial Sequence
  derived and/or modified sequence
atgagaagatacagaaccgccttcaccagagagcagatcgccagactggagaaggagttctacagagagaactacgtgagcagacccagaagatgcgagctggccgccgccctgaacctgcccgagaccaccatcaaggtgtggttccagaacagaagaatgaaggacaagagacagagactggccatgacctggccccaccccgccgaccccgccttctacacctacatgatgagccacgccgccgccgccggcggcctgccctaccccttccccagccacctgcccctgccctactacagccccgtgggcctgggcgccgccagcgccgccagcgccgccgccagccccttcagcggcagcctgagacccctggacaccttcagagtgctgagccagccctaccccagacccgagctgctgtgcgccttcagacacccccccctgtaccccggccccgcccacggcctgggcgccagcgccggcggcccctgcagctgcctggcctgccacagcggccccgccaacggcctggcccccagagccgccgccgccagcgacttcacctgcgccagcaccagcagaagcgacagcttcctgaccttcgcccccagcgtgctgagcaaggccagcagcgtggccctggaccagagagaggaggtgcccctgaccagatag

SEQ ID NO: 116067 - protein, 530 aa, Artificial Sequence
  derived and/or modified sequence
MEGPLTPPPLQGGGAAAVPEPGARQHPGHETAAQRYSARLLQAGYEPESDFLILPGFIDFIADEVDLTSALTRKITLKTPLISSPMDTVTEADMAIAMALMGGIGFIHHNCTPEFQANEVRKVKKFEQGFITDPVVLSPSHTVGDVLEAKMRHGFSGIPITETGTMGSKLVGIVTSRDIDFLAEKDHTTLLSEVMTPRIELVVAPAGVTLKEANEILQRSKKGKLPIVNDCDELVAIIARTDLKKNRDYPLASKDSQKQLLCGAAVGTREDDKYRLDLLTQAGVDVIVLDSSQGNSVYQIAMVHYIKQKYPHLQVIGGNVVTAAQAKNLIDAGVDGLRVGMGCGSICITQEVMACGRPQGTAVYKVAEYARRFGVPIIADGGIQTVGHVVKALALGASTVMMGSLLAATTEAPGEYFFSDGVRLKKYRGMGSLDAMEKSSSSQKRYFSEGDKVKIAQGVSGSIQDKGSIQKFVPYLIAGIQHGCQDIGARSLSVLRSMMYSGELKFEKRTMSAQIEGGVHGLHSYEKRLY

SEQ ID NO: 116068 - DNA, 1593 bp, Artificial Sequence
  derived and/or modified sequence
atggaaggccctctgacacctccgcccctccaaggagggggtgccgctgccgtgccagaacctggcgctagacagcatcccggccacgagacagcagcccagcgatactctgcacgactgctgcaggccggctacgagcccgagagcgattttctaattctgccaggattcattgactttatcgcggacgaagtggatctgaccagtgccttaacaagaaagatcacattaaagactcctcttatctctagccccatggatacggttaccgaagccgatatggccattgccatggcccttatgggcggcatcggcttcatccaccacaactgtacgccggaatttcaagcgaacgaagtcagaaaagtgaagaaatttgaacagggtttcataaccgatcctgtggtgctctccccatctcacactgtgggcgatgttctggaggcgaaaatgcggcatggcttttctggaatcccgattaccgagacaggaactatggggagcaagctggtgggtatcgtcacaagccgggacattgattttcttgctgaaaaggatcacaccaccctattatctgaggtcatgactccccgcatcgagttggtcgtggcccctgctggggtcactttgaaggaggcaaacgaaatacttcagcggtccaaaaagggaaagttgcctatcgtgaacgactgcgatgagctggtcgctatcatcgctcgtaccgacctcaaaaagaatcgcgattaccccctggcgtctaaagattcgcagaaacagctgctctgcggcgccgccgttgggacccgggaggatgataaatatcgcctggatctgctgacccaggcaggagtagacgttatcgtgctggattcctctcaggggaactcagtgtaccaaattgccatggtccattatatcaagcagaaatatccgcacttacaggtgatcggtggaaacgtggtgacggccgctcaggcaaaaaacctgatcgacgctggggtagacggcctgagggtgggaatgggttgcggatccatttgcattactcaggaagtaatggcttgtggtcgccctcagggcaccgccgtttacaaagtggctgaatatgctcgacggttcggtgtccctatcatcgccgacggcggcatccaaacagtggggcatgtcgttaaagcactggcattgggagctagcaccgttatgatggggagtctacttgcagccacaacggaggcaccaggagaatatttctttagtgacggcgtgagattgaaaaagtaccgaggaatggggtccctggatgcgatggaaaagtctagcagcagtcaaaagagatacttctcggagggagacaaggtaaagatcgcgcaaggagtgagcggcagcatccaggacaagggctccatccaaaaattcgtgccatacctgatagcaggtatccaacacgggtgtcaagatatcggagcaaggagcctgtccgtgcttaggagcatgatgtactctggcgagctcaagtttgaaaagcggaccatgagcgcgcagatcgaagggggagttcacggactacacagctacgaaaagaggttgtattag

SEQ ID NO: 116069 - DNA, 2324 bp, Artificial Sequence
  derived and/or modified sequence
tccgcatggaggggccactcactccaccaccgctgcagggaggcggagccgccgctgttccggagcccggagcccggcaacacccgggacacgagacggcggcgcagcggtacagcgcccgactgctgcaggccggctacgagcccgagagcgacttcctgattctcccaggattcatagacttcatagctgatgaggtggacctgacctcagccctgacccggaagatcacgctgaagacgccactgatctcctcccccatggacactgtgacagaggctgacatggccattgccatggctctgatgggaggtattggtttcattcaccacaactgcaccccagagttccaggccaacgaggtgcggaaggtcaagaagtttgaacagggcttcatcacggaccctgtggtgctgagcccctcgcacactgtgggcgatgtgctggaggccaagatgcggcatggcttctctggcatccccatcactgagacgggcaccatgggcagcaagctggtgggcatcgtcacctcccgagacatcgactttcttgctgagaaggaccacaccaccctcctcagtgaggtgatgacgccaaggattgaactggtggtggctccagcaggtgtgacgttgaaagaggcaaatgagatcctgcagcgtagcaagaaagggaagctgcctatcgtcaatgattgcgatgagctggtggccatcatcgcccgcaccgacctgaagaagaaccgagactaccctctggcctccaaggattcccagaagcagctgctctgtggggcagctgtgggcacccgtgaggatgacaaataccgtctggacctgctcacccaggcgggcgtcgacgtcatagtcttggactcgtcccaagggaattcggtgtatcagatcgccatggtgcattacatcaaacagaagtacccccacctccaggtgattggggggaacgtggtgacagcagcccaggccaagaacctgattgatgctggtgtggacgggctgcgcgtgggcatgggctgcggctccatctgcatcacccaggaagtgatggcctgtggtcggccccagggcactgctgtgtacaaggtggctgagtatgcccggcgctttggtgtgcccatcatagccgatggcggcatccagaccgtgggacacgtggtcaaggccctggcccttggagcctccacagtgatgatgggctccctgctggccgccactacggaggcccctggcgagtacttcttctcagacggggtgcggctcaagaagtaccggggcatgggctcactggatgccatggagaagagcagcagcagccagaaacgatacttcagcgagggggataaagtgaagatcgcgcagggtgtctcgggctccatccaggacaaaggatccattcagaagttcgtgccctacctcatagcaggcatccaacacggctgccaggatatcggggcccgcagcctgtctgtccttcggtccatgatgtactcaggagagctcaagtttgagaagcggaccatgtcggcccagattgagggtggtgtccatggcctgcactcttacgaaaagcggctgtactgaggacagcggtggaggccgaggtggtggaggggatgcaccccagtgtccacttttgggcacagcctccctccataactgagtggtccacagatttgcactacgggttctccagctcctttccaggcagagaggaggggaggtcctgaggggactgctgcccctcactcggcatcccctgcagagtcaggactgctcccggggccaggctgccctgggagcccccctccgagcccagccagccaggctctcaggccctgcgcctgcctcaggtctttcttgctgcagcctgctccagcctggcccccaccccaggggcaggcggcccctcctggcttctcctgtagggcacctccctgcccctagcctcccaggaaatggtgctctcctggccctgcctctggcccttcccgggccgctgcccctcagccatgtggcacttctgagctcctgacctaggccaaggggaggtctctgcccccttccccggccctgggctacccttgggtcctgctcctcaggccgctcccctgtccctggccatgggtaggagactgccctggtcatggccgcctgcctgtcattcctgactcaccaccgtccccaggtgaaccattcctcccttctcctcagctgcagtcgaaggctttaactttgcacacttgggatcacagttgcgtcattgtgtattaaatacttggaataaatcaagcaggtctcaacgcctcc

SEQ ID NO: 116070 - DNA, 1593 bp, Artificial Sequence
  derived and/or modified sequence
atggagggccccctgaccccaccacccctgcagggcggcggcgctgctgctgtgcctgagcccggggcccggcagcaccctggccatgaaacagctgcccagcgctacagcgcccggctgctgcaggccggctatgagcctgagagtgacttcctgatcctgcccggcttcatcgacttcatcgcagatgaggtggacctgaccagcgccctgaccaggaagatcaccctgaagacccccctcatcagcagccccatggacacagtgacagaggccgacatggccatcgccatggccctgatgggcggcatcggcttcatccaccacaactgcaccccagagttccaggccaatgaggtgaggaaggtgaagaagtttgagcagggcttcatcacagatcctgtggtgctgagccccagccacacagtgggagatgtgctggaggccaagatgagacatggcttcagcggcatccccatcacagaaacaggcaccatgggcagcaagctggtgggcatcgtgaccagccgggacatcgacttcctggccgagaaggaccacaccaccctgctgtctgaggtgatgaccccaagaattgagctggtggtggccccagctggggtgaccctgaaggaggccaatgagatcctgcagaggagcaagaagggcaagctgcccatcgtgaatgactgtgatgagctggtggccatcatcgccaggacagacctgaagaagaacagagactaccccctggccagcaaggacagccagaagcagctgctgtgtggggctgctgtgggcacccgggaggatgacaagtaccgcctggacctgctgacccaggccggcgtggatgtgattgtgctggacagcagccagggcaacagcgtgtaccagatcgccatggtgcactacatcaagcagaagtacccccacctgcaggtgattggaggaaatgtggtgacagctgcccaggccaagaacctgattgatgctggggtggatggcctgcgggtgggcatgggctgcggcagcatctgcatcacccaggaggtgatggcctgtggccggccccagggcacagctgtgtacaaggtggccgagtatgccaggagatttggagtgcccatcatcgcagatggcggcatccagacagtgggccacgtggtgaaggccctggccctgggcgccagcacagtgatgatgggcagcctgctggccgccaccacagaggcccctggagagtacttcttcagtgatggagtgcggctgaagaagtaccggggcatgggcagcctggatgccatggagaagagcagcagcagccagaagcgctacttcagcgagggggacaaggtgaagatcgcccagggcgtgtctggcagcatccaggacaagggcagcatccagaagtttgtgccctacctgattgctggcatccagcacggctgccaggacattggagcccggagcctgtctgtgctgcgctccatgatgtacagcggggagctgaagtttgagaagaggaccatgtctgcccagattgaaggaggagtgcacggcctgcacagctatgagaagaggctgtactag

SEQ ID NO: 116071 - DNA, 1593 bp, Artificial Sequence
  derived and/or modified sequence
atggagggccccctgacccccccccccctgcagggcggcggcgccgccgctgttcctgagcccggcgcccggcagcacccgggccatgaaacagcagctcagaggtattccgcacggctgttgcaggctgggtatgagcctgaatccgattttcttattttgccggggttcattgattttatcgctgacgaagtggacctgacgtctgcgctgactaggaagataactctcaagactcccctcattagcagtcccatggatacagttacagaagctgacatggctatcgccatggccctgatgggtggcattggctttatccaccacaattgtacaccagaattccaggccaatgaggtccgaaaggtcaagaagttcgaacagggcttcattaccgacccggttgttctaagcccatctcacacggtgggggacgtcctggaagctaaaatgcgccacggattctctgggataccaattactgagaccgggacaatgggaagcaaactcgttgggatcgtgacttctcgggatatcgattttctggctgaaaaggaccatacgaccctcctcagtgaggtgatgacgccacggattgagttggtggtggccccagccggtgtgaccttgaaggaggccaacgagattctgcagagaagtaaaaaagggaaactccccatcgtcaacgattgcgatgagctggtggcgatcattgccagaacagacttaaagaagaatcgcgactatcctcttgcctccaaggacagccaaaaacagttactctgcggcgcggccgtaggaacacgcgaggatgacaaatatcgcctggacttgttgacacaggccggcgtggacgtcatagtcctcgactcctcccagggcaactccgtgtatcagattgccatggtgcactatatcaaacagaagtatccacacctgcaggtgatcggcggcaatgtggtgactgcggcccaagccaagaatcttatcgacgctggagtggatggcttaagagtgggcatgggttgcggttcgatctgtataacacaagaagtgatggcatgcggccggccccagggcaccgccgtgtacaaagttgctgaatatgcaaggaggttcggcgtaccaatcattgccgacggtggcattcagacagtggggcatgtagttaaagcgctggcattaggagctagcaccgttatgatggggtctttgttagcagccactaccgaagctccgggggaatattttttttctgacggagtgaggttgaagaaatataggggcatgggaagcttggatgccatggagaaatctagctcctcccaaaaacggtacttttctgagggtgacaaagtcaagatcgcccagggggtatctggatcaatccaagataaagggagtatccagaaattcgtgccataccttatcgccggaattcagcatggctgtcaggacattggagctagaagcttgagtgtgcttaggtctatgatgtactcaggcgaattgaaatttgaaaaacggacgatgagtgcccaaatagaaggtggcgttcatggcctgcattcttacgagaaacgcttgtactag

SEQ ID NO: 116072 - DNA, 1593 bp, Artificial Sequence
  derived and/or modified sequence
atggagggacccctgaccccgcctccgttgcaagggggaggcgcagctgcagtgcctgagcccggtgccagacaacacccaggtcacgaaacagcagcacagcggtatagcgctaggctcctgcaggccggatacgagcccgaaagtgacttccttatcttgcctggcttcatagactttatcgccgacgaagtagatctgacatccgccctgacaagaaagatcaccctgaagactcccctgatctcttcacccatggataccgtaaccgaggctgacatggccattgcgatggccctgatgggcggtatcggcttcatccaccacaattgcacaccagagtttcaggccaacgaagtacgaaaggtcaagaagttcgaacagggcttcatcacggatcctgtggtgctgagtccttcccacaccgttggggacgtgcttgaggccaaaatgcggcatggcttcagcgggattccaattacggagacagggacgatgggttcgaagctggtcggcatcgtgactagccgagacatcgatttcctggccgaaaaggatcacaccacactgttgtcggaggttatgacacccagaattgagttggtcgtggcccctgccggtgtgactctcaaggaagctaatgagattctgcagagatcaaagaaaggcaaacttcccatagtcaacgactgtgacgaactggtcgctatcatagcgcgtaccgacctgaaaaaaaatagggactaccccctcgcttctaaggattcacaaaagcagttgctgtgcggagcggcagtgggaacccgggaggacgataaatatagacttgacctcttgacccaggctggagtagatgtgatcgttttggattcctcgcaaggcaattccgtgtatcagattgccatggtgcactacattaagcaaaagtacccacatcttcaggtcatcggcggaaacgtagtaactgcagcccaagccaaaaacctgatcgacgccggagtcgatggactgagggttgggatgggctgcggctcaatttgcataactcaggaggttatggcctgcggtcggcctcagggcaccgctgtttacaaagtggctgagtatgcacgacgattcggggtgcccatcatcgctgacggtggcatacaaacagtgggacatgtggttaaggccctcgccttaggcgcttctacagtgatgatgggctccctcctggccgcaacaactgaggcccctggggagtatttcttttccgacggcgttcgattgaagaaatatagaggcatggggtcattggatgcgatggaaaagtctagctcctcacagaagaggtacttcagtgagggcgacaaggtgaagatcgcacagggtgttagcggaagtatccaggataagggttccatacagaaatttgtcccttacctgatcgcgggaatccaacacggttgccaggacatcggggcacgttctctctcagtcctccgaagcatgatgtattcaggagaactgaagtttgagaaaagaacaatgtctgcgcaaatagagggtggagtacacggtctgcatagctacgagaagcgcctctattag

SEQ ID NO: 116073 - DNA, 1593 bp, Artificial Sequence
  derived and/or modified sequence
atggagggccccctgacccccccccccctgcagggcggcggcgccgccgccgtgcccgagcccggcgccagacagcaccccggccacgagaccgccgcccagagatacagcgccagactgctgcaggccggctacgagcccgagagcgacttcctgatcctgcccggcttcatcgacttcatcgccgacgaggtggacctgaccagcgccctgaccagaaagatcaccctgaagacccccctgatcagcagccccatggacaccgtgaccgaggccgacatggccatcgccatggccctgatgggcggcatcggcttcatccaccacaactgcacccccgagttccaggccaacgaggtgagaaaggtgaagaagttcgagcagggcttcatcaccgaccccgtggtgctgagccccagccacaccgtgggcgacgtgctggaggccaagatgagacacggcttcagcggcatccccatcaccgagaccggcaccatgggcagcaagctggtgggcatcgtgaccagcagagacatcgacttcctggccgagaaggaccacaccaccctgctgagcgaggtgatgacccccagaatcgagctggtggtggcccccgccggcgtgaccctgaaggaggccaacgagatcctgcagagaagcaagaagggcaagctgcccatcgtgaacgactgcgacgagctggtggccatcatcgccagaaccgacctgaagaagaacagagactaccccctggccagcaaggacagccagaagcagctgctgtgcggcgccgccgtgggcaccagagaggacgacaagtacagactggacctgctgacccaggccggcgtggacgtgatcgtgctggacagcagccagggcaacagcgtgtaccagatcgccatggtgcactacatcaagcagaagtacccccacctgcaggtgatcggcggcaacgtggtgaccgccgcccaggccaagaacctgatcgacgccggcgtggacggcctgagagtgggcatgggctgcggcagcatctgcatcacccaggaggtgatggcctgcggcagaccccagggcaccgccgtgtacaaggtggccgagtacgccagaagattcggcgtgcccatcatcgccgacggcggcatccagaccgtgggccacgtggtgaaggccctggccctgggcgccagcaccgtgatgatgggcagcctgctggccgccaccaccgaggcccccggcgagtacttcttcagcgacggcgtgagactgaagaagtacagaggcatgggcagcctggacgccatggagaagagcagcagcagccagaagagatacttcagcgagggcgacaaggtgaagatcgcccagggcgtgagcggcagcatccaggacaagggcagcatccagaagttcgtgccctacctgatcgccggcatccagcacggctgccaggacatcggcgccagaagcctgagcgtgctgagaagcatgatgtacagcggcgagctgaagttcgagaagagaaccatgagcgcccagatcgagggcggcgtgcacggcctgcacagctacgagaagagactgtactag

SEQ ID NO: 116074 - DNA, 234 bp, Artificial Sequence
  derived and/or modified sequence
atgagaaccctgctgccccccgccctgctgacctgctggctgctggcccccgtgaacagcatccaccccgagtgcagattccacctggagatccaggaggaggagaccaagtgcgccgagctgctgagaagccagaccgagaagcacaagggccacaccaagggcttcatcctgatccacgccggcggcctgaagagaatcctggacccccacacctaccccctggccccctag

SEQ ID NO: 116075 - DNA, 234 bp, Artificial Sequence
  derived and/or modified sequence
atgaggacattgctcccacccgcactgctaacctgctggttgctcgctccggtgaactcgatacaccccgagtgtagatttcatctcgagattcaggaggaagagactaagtgcgctgaattgctcaggtcacagacagaaaaacacaaggggcacaccaaagggtttattttgatccacgccggtgggttaaagagaattctggacccccacacatatcctctagcgccctag

SEQ ID NO: 116076 - DNA, 234 bp, Artificial Sequence
  derived and/or modified sequence
atgaggaccctgctgcccccagccctgctgacctgctggctgctggcccctgtgaacagcatccaccctgagtgccgcttccacctggagatccaggaggaggagaccaagtgtgccgagctgctgcggagccagacagagaagcacaagggccacaccaagggcttcatcctgattcatgctgggggcctgaagaggatcctggacccccacacctaccccctggccccctag

SEQ ID NO: 116077 - DNA, 234 bp, Artificial Sequence
  derived and/or modified sequence
atgcggaccctgctgccccccgccctgctgacctgctggctgctggccccagtgaactcgatccatccggagtgcaggtttcatcttgagatccaggaagaggagaccaagtgtgctgagcttctgcgcagccagactgaaaagcataagggccatacgaaagggtttattctaattcacgctgggggcttgaagcgaatcctcgatccccatacgtaccccctggctccttag

SEQ ID NO: 116078 - DNA, 234 bp, Artificial Sequence
  derived and/or modified sequence
atgcgcacactgttaccaccggcactactgacctgttggcttctggcccctgttaacagtatccatcctgagtgtagattccatctggagatccaggaagaggagactaagtgcgccgaactgttgcgctcacagactgaaaagcacaaaggccatacaaagggtttcattcttatacacgccggaggcctcaagcgtatactcgatcctcacacatatcccctggccccatag

SEQ ID NO: 116079 - DNA, 717 bp, Artificial Sequence
  derived and/or modified sequence
ccatgctggaggcggcggaaccgcggggacctaggacggaggcggcgggcgctgggcggcccccggcacgctgagctcgggatgcggacgctgctgcctcccgcgctgctgacctgctggctgctcgcccccgtgaacagcattcacccagaatgccgatttcatctggaaatacaggaggaagaaacaaaatgtgcagagcttctgaggtctcaaacagaaaaacacaaaggccatacaaagggattcatcctcattcacgccggaggtttaaagaggatcctggacccacatacctacccattggctccatgaccagtgcttttataattacaaaatcattgagaaattaagtcacaggaagcctcgtgtgtggtatacactggtgataaagcaagtcccatgcagtctgagatggcaagggaccttctagggaaagggcagtgacccagaagcccgactgctcggctggctcccgcactccgtcctgtggtcagagtgtgtttcctcccctctgtgaacctggtctcctccccagtgtgaggacaggggctctcgccttcttcagggagttgctgggaggacaaaatggagtatatgtaaaagtcatttcctagataagggggagcatgtcgtaagagtctcttgaaatttaattgatgtttatgtcattgacattgaaataatgagaaaataaatccaaatccagagctcaaa

SEQ ID NO: 116080 - protein, 718 aa, Artificial Sequence
  derived and/or modified sequence
MEDLGENTMVLSTLRSLNNFISQRVEGGSGLDISTSAPGSLQMQYQQSMQLEERAEQIRSKSHLIQVEREKMQMELSHKRARVELERAASTSARNYEREVDRNQELLTRIRQLQEREAGAEEKMQEQLERNRQCQQNLDAASKRLREKEDSLAQAGETINALKGRISELQWSVMDQEMRVKRLESEKQELQEQLDLQHKKCQEANQKIQELQASQEARADHEQQIKDLEQKLSLQEQDAAIVKNMKSELVRLPRLERELKQLREESAHLREMRETNGLLQEELEGLQRKLGRQEKMQETLVGLELENERLLAKLQSWERLDQTMGLSIRTPEDLSRFVVELQQRELALKDKNSAVTSSARGLEKARQQLQEELRQVSGQLLEERKKRETHEALARRLQKRVLLLTKERDGMRAILGSYDSELTPAEYSPQLTRRMREAEDMVQKVHSHSAEMEAQLSQALEELGGQKQRADMLEMELKMLKSQSSSAEQSFLFSREEADTLRLKVEELEGERSRLEEEKRMLEAQLERRALQGDYDQSRTKVLHMSLNPTSVARQRLREDHSQLQAECERLRGLLRAMERGGTVPADLEAAAASLPSSKEVAELKKQVESAELKNQRLKEVFQTKIQEFRKACYTLTGYQIDITTENQYRLTSLYAEHPGDCLIFKATSPSGSKMQLLETEFSHTVGELIEVHLRRQDSIPAFLSSLTLELFSRQTVA

SEQ ID NO: 116081 - DNA, 2157 bp, Artificial Sequence
  derived and/or modified sequence
atggaggacctgggcgagaatacaatggtactcagcacactgagatcactcaataacttcatctcccagagggtcgaagggggaagcggccttgatatttcaacgtccgcccccggaagccttcaaatgcagtatcaacagtccatgcagctggaggaacgcgccgaacagatcaggagcaagtctcacctaatacaggtcgagcgggaaaagatgcagatggagctgagccacaaacgggcacgtgtggaactggaaagagcggctagtacttcagctagaaattacgaaagggaggtggataggaaccaggaacttctgacgcgcatcaggcagttgcaggagcgtgaggctggagctgaagagaaaatgcaggagcagctggaaaggaataggcaatgtcagcagaatttggatgccgctagcaagcgattgagagagaaagaggactccctggcccaggccggcgaaacaattaacgcgctgaagggaaggattagcgaactgcagtggtctgtcatggatcaggagatgagagtgaagagactggagtctgaaaaacaagaactccaggagcagttggacctccagcacaagaaatgtcaggaggctaaccagaagatacaggaactccaggcttctcaggaggcacgggccgatcacgagcaacagatcaaggacttagagcagaagctgtcactgcaagaacaggacgccgcaatagtaaagaatatgaaatctgaactggtgcgcttgccccggttggaaagagagctcaaacagctgagagaggagtcagcccacctgcgggaaatgcgggaaactaacggtctgctccaggaggaactggagggactgcaacgtaagttaggaagacaagagaaaatgcaggaaacgctcgtcggattggaacttgagaacgagaggctcctggctaagctgcagtcttgggaaagacttgatcagactatggggctgtctatccgcacgccagaggatctgtcccggtttgtcgttgaattacagcagagggagctggcactcaaagacaaaaactctgcggtgacatccagtgcccgcggactcgagaaggctaggcagcagctgcaggaggagctccgccaggtctccgggcagctgctggaggaacgcaagaagagggagactcacgaggccctcgcaagacgtttacagaaaagagttctgctgctcacaaaagagcgtgacggaatgcgggccattctgggaagctatgacagcgagctcacaccagcggagtattctccacagttgactagaagaatgagagaagctgaagacatggtgcagaaggtgcattcccattccgctgagatggaggctcagctaagccaggctttggaggaactgggcggccagaaacagcgggcagatatgttggagatggagctcaaaatgcttaaaagccaatccagctcagctgagcagagctttctgttctctcgcgaagaagcagataccctgcgattaaaggtggaagagctggagggcgaaaggtcgcgattggaggaagagaagagaatgttagaggcccaactggaaagacgcgctctacagggagactatgatcagagccgaactaaagtacttcacatgtcactgaaccccacctccgtcgctaggcagcgtctccgggaagaccattctcagctgcaggccgaatgcgagagactgcgcgggctcctgagggctatggagaggggaggcaccgtgcccgccgacctcgaagctgcagctgcgagtcttccttcatccaaggaggtcgccgagttgaaaaagcaggttgaatcagcagaattgaagaatcagcggctcaaagaggtatttcagaccaagatccaagaattcagaaaggcgtgctatacactgacgggctatcagattgatatcactacagaaaaccagtaccggctgactagcctgtacgccgagcaccctggggactgtctgatcttcaaggcgacatctccctctggaagcaagatgcagctgctggagaccgaatttagccacacagtcggcgaacttatcgaggtgcatctgcggcgtcaggactctatccctgcttttcttagcagcctgactctggagcttttcagccggcagaccgtcgcatag

SEQ ID NO: 116082 - DNA, 2157 bp, Artificial Sequence
  derived and/or modified sequence
atggaggatttgggagaaaatactatggttctctccacactgaggtccctgaacaacttcatatcacagcgggttgagggtggaagcggccttgacatctccactagcgctcccggctctctccagatgcaatatcagcagtcaatgcagctggaggaacgcgctgagcagataagatcaaagtcccacctcatccaagtggagagagagaaaatgcagatggaactgagccacaaacgggcaagagtcgagttggagagagcagctagcacctcggcacgaaactacgaacgcgaggtagacaggaaccaggagttacttacacggatcagacagctgcaggaaagagaggccggtgcagaagaaaaaatgcaggagcagctggagagaaacagacagtgtcagcagaacctagatgccgcgtccaagcggctcagggaaaaggaggattctcttgctcaagctggggagaccattaacgcgctcaagggccgcattagtgagctccagtggagtgttatggaccaggaaatgagagttaagcgattggagagcgagaagcaggaattgcaggaacaattggatcttcagcataaaaagtgtcaggaagcgaaccagaagatccaggaactgcaggcaagccaggaggcacgcgcagaccacgagcagcagattaaagacctggagcagaaattaagtctccaggagcaagatgcagccatcgtgaaaaacatgaaaagtgagctggttcgactgccccgccttgagcgcgaactgaaacagcttcgtgaagagtctgctcatctgcgcgaaatgcgtgagacgaatggtttactgcaggaggaacttgaaggactgcagcgaaagctcgggaggcaggagaagatgcaagagacattggttggactggaacttgagaacgaacggcttctggctaagttgcagtcttgggaacggcttgatcagacaatggggctaagcatacggacccctgaagacttaagccgctttgttgtcgagctgcagcagagagaactggccctaaaggataaaaactccgccgtaacctcatcagctaggggtctggagaaggcccggcagcagttgcaggaggaactacgccaagtcagcggacaactgctcgaagaaagaaaaaagcgggaaacccacgaggcactcgcacggcggctgcagaagcgggtcttactcctgaccaaggagcgggacggcatgagggccatactgggttcttacgattcggagctgacacccgcagaatatagtccacagctgacccgccgcatgcgggaggcagaagatatggtgcagaaggtgcacagccacagcgctgagatggaggctcaactttcccaagccttagaagagctgggcgggcagaagcagcgggctgatatgctggaaatggaacttaagatgctcaaatcccaatctagctcagcagaacagagcttcctattcagtagggaagaggcagatacattgaggttgaaagtggaggagctggaaggggagcgatcacgactggaggaagaaaaacgtatgctcgaggcccaattggagcgacgtgccttgcaaggcgactatgatcagtccaggacaaaggtgcttcacatgtcactgaacccaaccagcgtggctaggcagcgcctccgcgaggaccattctcagttgcaagcagagtgtgagcgcttgagggggttacttcgagccatggagcggggtggcaccgtgcctgctgatttggaggcggcggccgccagcctcccctcgtccaaagaggttgctgaactcaagaagcaggtcgagtctgcagagctaaaaaatcagaggctgaaggaggtcttccagacaaagattcaggagtttcggaaagcatgctacaccctcactggataccagatcgacattaccactgagaatcagtacaggttgacctccctgtatgctgagcatcccggcgattgcctgattttcaaggccactagtccatcaggctctaagatgcaacttctggagaccgaatttagccacacagtgggcgaactgattgaggtccacttgcggcgccaggatagtatcccagcctttctgagttctctcactctcgaactcttcagcagacagacagtggcctag

SEQ ID NO: 116083 - DNA, 2157 bp, Artificial Sequence
  derived and/or modified sequence
atggaggacctcggcgagaatactatggttctttcgaccctcagatctctgaataattttatcagtcagcgggtggaaggtggtagtggccttgacatcagtacctcggcccccggatccctgcagatgcaatatcagcaatccatgcagctggaggaacgtgccgagcaaattagatccaagtctcacctcatccaggtcgaaagggagaagatgcagatggaactttctcacaaaagagccagggtggaactagagcgtgccgcctccacctccgctaggaactacgaacgagaagtggaccgaaatcaggaactgctcacacggattcgccagcttcaggaacgggaggcaggtgctgaggaaaaaatgcaagaacaactggaaaggaatagacagtgtcagcagaatctagatgccgcctctaaacggctgcgggagaaagaggattccctcgctcaggccggtgaaacaatcaatgctctcaagggccgaatcagtgagttacagtggtcagtgatggatcaggagatgagagtgaagcgtctggaatctgagaagcaggaactgcaggagcagctggacctgcaacacaaaaagtgccaagaggctaatcagaaaatccaggagctacaggccagtcaagaagcccgggccgatcacgaacagcagatcaaagacttggagcagaagctgagccttcaggagcaggacgccgccatcgtaaaaaacatgaaatctgagctcgttcgactgccgcgactagaacgtgagttgaaacagcttcgggaggagtcagcccatctcagagaaatgcgggaaactaacggtctgcttcaggaagaactcgagggcctacagcgtaagttggggagacaggaaaaaatgcaggagacactggtgggcctggaactggagaacgaaagacttctggctaaattacagagctgggaacgactggatcaaacaatgggcctcagcatccggaccccagaggacctatcccgttttgtggtggagctgcagcagcgggagctggccctgaaagataaaaattctgccgtgacatcgtcagcacgtggcctggagaaggcccggcagcagctgcaggaggaactgaggcaggtcagcggtcagctgctagaggagcgaaaaaaacgcgagacccacgaggcgctggcgcgcaggctccagaagcgtgtgctattgctcacaaaagagagggacggaatgagagccattctgggcagctatgatagcgagctgacacccgccgaatacagtcctcaattgactcgccgaatgcgagaggctgaggatatggtccaaaaggtccattctcactctgcagagatggaagctcagctgtcacaggccctggaggagttgggaggacaaaaacagcgggctgatatgctggagatggagctgaagatgctaaagtcccagtcttctagtgccgagcagagttttctcttctcccgggaggaagcggacacattacgactcaaggtggaggaactggaaggcgaaaggtcaaggttggaagaggagaagaggatgctggaggctcaactcgagcggagagcactccagggggattacgaccaatccaggactaaggtattgcatatgtctctgaacccaacctccgtcgctcggcagcgactgagagaagatcattcacagcttcaggctgaatgcgagcgtctccgcggcctgcttagagctatggagcgaggtggcaccgtgcccgcagatctggaagccgcggctgcttccctgccatcctcaaaggaggtggccgagctcaagaaacaagtggaatcagccgagctgaaaaaccagaggctaaaagaagtctttcaaaccaagatccaggagtttcgcaaggcttgctacacactcacaggctatcagatagatataacgacggagaatcagtaccgactgaccagcctgtatgcagaacatcccggtgattgtctcatcttcaaggccacctctccatccgggagcaagatgcagctcctcgagacagagttcagtcatacagtaggggaactgattgaggttcacctgcggagacaggatagtattcccgccttcctctctagcctgactttagagctgttctcccgacaaacagtcgcctag

SEQ ID NO: 116084 - DNA, 2157 bp, Artificial Sequence
  derived and/or modified sequence
atggaggacctgggggagaacaccatggtgctgagcaccctgcggagcctgaacaacttcatcagccagagggtggagggcggcagcggcctggacatcagcaccagcgcccctggcagcctgcagatgcagtaccagcagagcatgcagctggaggagagagctgagcagatccgcagcaagagccacctgatccaggtggagcgggagaagatgcagatggagctgagccacaagagggcccgggtggagctggagcgggccgccagcaccagcgccaggaactatgaaagagaggtggacaggaaccaggagctgctgacccgcatccggcagctgcaggagcgggaggccggggctgaggagaagatgcaggagcagctggagaggaaccggcagtgccagcagaacctggatgctgccagcaagaggctgcgggagaaggaggacagcctggcccaggccggggagaccatcaatgccctgaagggccgcatcagcgagctgcagtggagcgtgatggaccaggagatgagggtgaagaggctggagagcgagaagcaggagctgcaggagcagctggacctgcagcacaagaagtgccaggaggccaaccagaagatccaggagctgcaggccagccaggaggcccgggctgaccacgagcagcagatcaaggacctggagcagaagctgagcctgcaggagcaggatgctgccatcgtgaagaacatgaagtctgagctggtgcggctgccccggctggagcgggagctgaagcagctgcgggaggagagcgcccacctgcgggagatgagggagaccaacggcctgctgcaggaggagctggagggcctgcagaggaagctgggccggcaggagaagatgcaggagaccctggtgggcctggagctggagaatgaaaggctgctggccaagctgcagagctgggagcggctggaccagaccatgggcctgagcatccgcaccccagaggacctgagcagatttgtggtggagctgcagcagcgggagctggccctgaaggacaagaacagcgctgtgaccagcagcgcccggggcctggagaaggcccggcagcagctgcaggaggagctgcggcaggtgtctggccagctgctggaggagaggaagaagcgggagacccatgaggccctggcccggcggctgcagaagagggtgctgctgctgaccaaggagagagatggcatgagggccatcctgggcagctatgacagcgagctgaccccagctgagtacagcccccagctgaccaggaggatgagggaggccgaggacatggtgcagaaggtgcacagccacagcgctgagatggaggcccagctgagccaggccctggaggagctgggcggccagaagcagagagctgacatgctggagatggagctgaagatgctgaagagccagagcagcagcgctgagcagagcttcctgttcagccgggaggaggccgacaccctgcggctgaaggtggaggagctggagggggagaggagccggctggaggaggagaagaggatgctggaggcccagctggagcggcgggccctgcagggcgactatgaccagagcaggaccaaggtgctgcacatgagcctgaaccccacctctgtggcccggcagaggctgcgggaggaccacagccagctgcaggctgaatgtgagcggctgcggggcctgctgcgggccatggagcggggcggcaccgtgcctgctgacctggaggccgccgccgccagcctgcccagcagcaaggaggtggccgagctgaagaagcaggtggagagcgctgagctgaagaaccagaggctgaaggaggtgttccagaccaagatccaggagttcaggaaggcctgctacaccctgaccggctaccagattgacatcaccacagagaaccagtaccgcctgaccagcctgtatgcagagcaccctggggactgcctgatcttcaaggccaccagccccagcggcagcaagatgcagctgctggagacagagttcagccacacagtgggggagctgattgaggtgcacctgcggcggcaggacagcatcccagccttcctgagcagcctgaccctggagctgttcagccggcagacagtggcctag

SEQ ID NO: 116085 - DNA, 2500 bp, Artificial Sequence
  derived and/or modified sequence
gtcgcgataaatgggcgccggcggagcggagggagatccgagcggcggcggcaagctggctgcgagcggctgaggaaagcaaccatggaagacctgggggaaaacaccatggttttatccaccctgagatctttgaacaacttcatctctcagcgtgtggagggaggctctggactggatatttctacctcggccccaggttctctgcagatgcagtaccagcagagcatgcagctggaggaaagagcagagcagatccgttcgaagtcccacctcatccaggtggagcgggagaaaatgcagatggagctgagtcacaagagggctcgagtggagctggagagagcagccagcaccagtgccaggaactacgagcgtgaggtcgaccgcaaccaggagctcctgacgcgcatccggcagcttcaggagcgggaggccggggcggaggagaagatgcaggagcagctggagcgcaacaggcagtgtcagcagaacttggatgctgccagcaagaggctgcgtgagaaagaggacagtctggcccaggctggcgagaccatcaacgcactgaaggggaggatctcggaactgcagtggagcgtgatggaccaggagatgcgggtgaagcgcctggagtcggagaagcaggagctgcaggagcagctggacctgcaacacaaaaaatgccaggaagccaatcagaaaatccaggaactccaggccagccaagaagcaagagcagaccacgagcagcagattaaggatctggagcagaagctgtccctgcaagagcaggatgcagcgattgtgaagaacatgaagtctgagctggtacggctccctaggctggaacgggagctgaagcagctgcgggaggagagcgcgcacctgcgggagatgagagagaccaacgggctgctccaggaagagctggaagggctgcagaggaagctggggcgccaggagaagatgcaggagacgctggttggcttggagctggagaacgagaggctgctggccaagctgcaaagctgggagagactggaccagaccatgggcctgagcatcaggactccagaagacctttccagattcgtggttgagctgcagcagagggagcttgccttgaaggacaagaacagcgccgtcaccagcagcgcccgggggctggagaaggccaggcagcagctgcaggaggagctccggcaggtcagcggccagctgttggaggagaggaagaagcgcgagacccacgaggcgctggcccggaggctccagaaacgggtcctgctgctcaccaaggagcgggacggtatgcgggccatcctggggtcctacgacagcgagctgaccccggccgagtactcaccccagctgacgcggcgcatgcgggaggctgaggatatggtgcagaaggtgcacagccacagcgccgagatggaggctcagctgtcgcaggccctggaggagctgggaggccagaaacaaagagcagacatgctggagatggagctgaagatgctgaagtctcagtccagctctgccgaacagagcttcctgttctccagggaggaggcggacacgctcaggttgaaggtcgaggagctggaaggcgagcggagtcggctggaggaggaaaagaggatgctggaggcacagctggagcggcgagctctgcagggtgactatgaccagagcaggaccaaagtgctgcacatgagcctgaaccccaccagtgtggccaggcagcgcctgcgcgaggaccacagccagctgcaggcggagtgcgagcgactgcgcgggctcctgcgcgccatggagagaggaggcaccgtcccagccgaccttgaggctgccgccgcgagtctgccatcgtccaaggaggtggcagagctgaagaagcaggtggagagtgccgagctgaagaaccagcggctcaaggaggttttccagaccaagatccaggagttccgcaaggcctgctacacgctcaccggctaccagatcgacatcaccacggagaaccagtaccggctgacctcgctgtacgccgagcacccaggcgactgcctcatcttcaaggccaccagcccctcgggttccaagatgcagctactggagacagagttctcacacaccgtgggcgagctcatcgaggtgcacctgcggcgccaggacagcatccctgccttcctcagctcgctcaccctcgagctcttcagccgccagaccgtggcgtagcctgcaggctcgggggcatagccggagccactctgcttggcctgacctgcaggtcccctgccccgccagccacaggctgggtgcacgtcctgcctctccagccccacagggcagcagcatgactgacagacacgctgggacctacgtcgggcttcctgctggggcggccagcaccctctccacgtgcagaccccatgcgtcccggagcctggtgtgtgggcgtcggccaccagcctgggttcctcaccttgtgaaataa

SEQ ID NO: 116086 - DNA, 2762 bp, Artificial Sequence
  derived and/or modified sequence
gcaggtctcgcgagagcgcaggcgcaagtgtcgcgataaatgggcgccggcggagcggagggagatccgagcggcggcggcaagctggctgcgagcggctgaggagctgggatacactcttcctctcctctcctcaacagcagcactccaagctcgccggcctttggtctccaggacttgtcccagcagcccctcgaactgagaattacaccatcggacccctggctctgaggccttcagacttggactgtgtcacactgccaggcttccagggctccaacttgcagacggcctgttgtgggacagtctctgtaatcgcgaaagcaaccatggaagacctgggggaaaacaccatggttttatccaccctgagatctttgaacaacttcatctctcagcgtgtggagggaggctctggactggatatttctacctcggccccaggttctctgcagatgcagtaccagcagagcatgcagctggaggaaagagcagagcagatccgttcgaagtcccacctcatccaggtggagcgggagaaaatgcagatggagctgagtcacaagagggctcgagtggagctggagagagcagccagcaccagtgccaggaactacgagcgtgaggtcgaccgcaaccaggagctcctgacgcgcatccggcagcttcaggagcgggaggccggggcggaggagaagatgcaggagcagctggagcgcaacaggcagtgtcagcagaacttggatgctgccagcaagaggctgcgtgagaaagaggacagtctggcccaggctggcgagaccatcaacgcactgaaggggaggatctcggaactgcagtggagcgtgatggaccaggagatgcgggtgaagcgcctggagtcggagaagcaggagctgcaggagcagctggacctgcaacacaaaaaatgccaggaagccaatcagaaaatccaggaactccaggccagccaagaagcaagagcagaccacgagcagcagattaaggatctggagcagaagctgtccctgcaagagcaggatgcagcgattgtgaagaacatgaagtctgagctggtacggctccctaggctggaacgggagctgaagcagctgcgggaggagagcgcgcacctgcgggagatgagagagaccaacgggctgctccaggaagagctggaagggctgcagaggaagctggggcgccaggagaagatgcaggagacgctggttggcttggagctggagaacgagaggctgctggccaagctgcaaagctgggagagactggaccagaccatgggcctgagcatcaggactccagaagacctttccagattcgtggttgagctgcagcagagggagcttgccttgaaggacaagaacagcgccgtcaccagcagcgcccgggggctggagaaggccaggcagcagctgcaggaggagctccggcaggtcagcggccagctgttggaggagaggaagaagcgcgagacccacgaggcgctggcccggaggctccagaaacgggtcctgctgctcaccaaggagcgggacggtatgcgggccatcctggggtcctacgacagcgagctgaccccggccgagtactcaccccagctgacgcggcgcatgcgggaggctgaggatatggtgcagaaggtgcacagccacagcgccgagatggaggctcagctgtcgcaggccctggaggagctgggaggccagaaacaaagagcagacatgctggagatggagctgaagatgctgaagtctcagtccagctctgccgaacagagcttcctgttctccagggaggaggcggacacgctcaggttgaaggtcgaggagctggaaggcgagcggagtcggctggaggaggaaaagaggatgctggaggcacagctggagcggcgagctctgcagggtgactatgaccagagcaggaccaaagtgctgcacatgagcctgaaccccaccagtgtggccaggcagcgcctgcgcgaggaccacagccagctgcaggcggagtgcgagcgactgcgcgggctcctgcgcgccatggagagaggaggcaccgtcccagccgaccttgaggctgccgccgcgagtctgccatcgtccaaggaggtggcagagctgaagaagcaggtggagagtgccgagctgaagaaccagcggctcaaggaggttttccagaccaagatccaggagttccgcaaggcctgctacacgctcaccggctaccagatcgacatcaccacggagaaccagtaccggctgacctcgctgtacgccgagcacccaggcgactgcctcatcttcaaggccaccagcccctcgggttccaagatgcagctactggagacagagttctcacacaccgtgggcgagctcatcgaggtgcacctgcggcgccaggacagcatccctgccttcctcagctcgctcaccctcgagctcttcagccgccagaccgtggcgtagcctgcaggctcgggggcatagccggagccactctgcttggcctgacctgcaggtcccctgccccgccagccacaggctgggtgcacgtcctgcctctccagccccacagggcagcagcatgactgacagacacgctgggacctacgtcgggcttcctgctggggcggccagcaccctctccacgtgcagaccccatgcgtcccggagcctggtgtgtgggcgtcggccaccagcctgggttcctcaccttgtgaaataaaatcttctcccctagac

SEQ ID NO: 116087 - DNA, 2991 bp, Artificial Sequence
  derived and/or modified sequence
gcaaaattttgggaagagtcaacggtgcaagtttgtccgaggaggctgccgtgggcgcggctattccacacattacggcgcgaggcgaaagccttagtggaagcgcgtcctgcgcaaagccggggggcccccgactgcgccttggctcagccttcggttccgagtcctttccgtgcggagtctcccaggggtggcggctccgggtgcggacgcggagtccccaggatcagccggtgcgcagactcggttctttacggcccgattgccacgcaggtctcgcgagagcgcaggcgcaagtgtcgcgataaatgggcgccggcggagcggagggagatccgagcggcggcggcaagctggctgcgagcggctgagcactccaagctcgccggcctttggtctccaggacttgtcccagcagcccctcgaactgagaattacaccatcggacccctggctctgaggccttcagacttggactgtgtcacactgccaggcttccagggctccaacttgcagacggcctgttgtgggacagtctctgtaatcgcgaaagcaaccatggaagacctgggggaaaacaccatggttttatccaccctgagatctttgaacaacttcatctctcagcgtgtggagggaggctctggactggatatttctacctcggccccaggttctctgcagatgcagtaccagcagagcatgcagctggaggaaagagcagagcagatccgttcgaagtcccacctcatccaggtggagcgggagaaaatgcagatggagctgagtcacaagagggctcgagtggagctggagagagcagccagcaccagtgccaggaactacgagcgtgaggtcgaccgcaaccaggagctcctgacgcgcatccggcagcttcaggagcgggaggccggggcggaggagaagatgcaggagcagctggagcgcaacaggcagtgtcagcagaacttggatgctgccagcaagaggctgcgtgagaaagaggacagtctggcccaggctggcgagaccatcaacgcactgaaggggaggatctcggaactgcagtggagcgtgatggaccaggagatgcgggtgaagcgcctggagtcggagaagcaggagctgcaggagcagctggacctgcaacacaaaaaatgccaggaagccaatcagaaaatccaggaactccaggccagccaagaagcaagagcagaccacgagcagcagattaaggatctggagcagaagctgtccctgcaagagcaggatgcagcgattgtgaagaacatgaagtctgagctggtacggctccctaggctggaacgggagctgaagcagctgcgggaggagagcgcgcacctgcgggagatgagagagaccaacgggctgctccaggaagagctggaagggctgcagaggaagctggggcgccaggagaagatgcaggagacgctggttggcttggagctggagaacgagaggctgctggccaagctgcaaagctgggagagactggaccagaccatgggcctgagcatcaggactccagaagacctttccagattcgtggttgagctgcagcagagggagcttgccttgaaggacaagaacagcgccgtcaccagcagcgcccgggggctggagaaggccaggcagcagctgcaggaggagctccggcaggtcagcggccagctgttggaggagaggaagaagcgcgagacccacgaggcgctggcccggaggctccagaaacgggtcctgctgctcaccaaggagcgggacggtatgcgggccatcctggggtcctacgacagcgagctgaccccggccgagtactcaccccagctgacgcggcgcatgcgggaggctgaggatatggtgcagaaggtgcacagccacagcgccgagatggaggctcagctgtcgcaggccctggaggagctgggaggccagaaacaaagagcagacatgctggagatggagctgaagatgctgaagtctcagtccagctctgccgaacagagcttcctgttctccagggaggaggcggacacgctcaggttgaaggtcgaggagctggaaggcgagcggagtcggctggaggaggaaaagaggatgctggaggcacagctggagcggcgagctctgcagggtgactatgaccagagcaggaccaaagtgctgcacatgagcctgaaccccaccagtgtggccaggcagcgcctgcgcgaggaccacagccagctgcaggcggagtgcgagcgactgcgcgggctcctgcgcgccatggagagaggaggcaccgtcccagccgaccttgaggctgccgccgcgagtctgccatcgtccaaggaggtggcagagctgaagaagcaggtggagagtgccgagctgaagaaccagcggctcaaggaggttttccagaccaagatccaggagttccgcaaggcctgctacacgctcaccggctaccagatcgacatcaccacggagaaccagtaccggctgacctcgctgtacgccgagcacccaggcgactgcctcatcttcaaggccaccagcccctcgggttccaagatgcagctactggagacagagttctcacacaccgtgggcgagctcatcgaggtgcacctgcggcgccaggacagcatccctgccttcctcagctcgctcaccctcgagctcttcagccgccagaccgtggcgtagcctgcaggctcgggggcatagccggagccactctgcttggcctgacctgcaggtcccctgccccgccagccacaggctgggtgcacgtcctgcctctccagccccacagggcagcagcatgactgacagacacgctgggacctacgtcgggcttcctgctggggcggccagcaccctctccacgtgcagaccccatgcgtcccggagcctggtgtgtgggcgtcggccaccagcctgggttcctcaccttgtgaaataaaatcttctcccctagac

SEQ ID NO: 116088 - DNA, 2157 bp, Artificial Sequence
  derived and/or modified sequence
atggaggacctgggcgagaacaccatggtgctgagcaccctgcggtctctgaataacttcatctcgcagcgcgtcgagggtggaagtggcttggatatttccacctccgctcccggttccctgcagatgcagtatcagcagagtatgcagctggaggaacgtgctgaacagatcagaagtaaatctcacctgatccaggtggaacgggagaaaatgcagatggagttgtcccataaacgtgctagggtggagctggaacgggctgcttccacaagcgcccgaaactatgaaagggaagtggaccgtaatcaggagcttttaactagaatcaggcagctacaggagcgcgaggcaggcgcggaggagaagatgcaggagcagctagagagaaacagacagtgccagcagaacctggacgctgccagcaaaagacttcgtgaaaaagaggactccctggctcaggcaggggaaacaattaacgccctgaagggccggatctccgagctacagtggtctgtgatggaccaagagatgcgggtcaagcgccttgagtcagaaaaacaggagcttcaagagcagttggatcttcagcacaagaaatgtcaggaagcaaaccaaaagatacaagagttacaggccagtcaggaagcccgagctgaccacgagcagcagatcaaggatctggaacaaaagctttcactacaggagcaggatgcggcgatcgtgaaaaacatgaagagtgagctagtgagattgccccggctagaacgagaactgaagcagttgcgggaggaatctgctcacttgcgcgagatgagggagacaaacggtcttctgcaggaggaactcgaaggactgcaaagaaagttaggccgccaagagaaaatgcaggaaaccctcgtcggcctagagctcgagaacgagcgtctgctggccaagctccaatcgtgggagcggctggaccagactatgggacttagcatcagaactccagaagatctaagccggtttgtcgtagagctgcagcagagagagctggcactgaaggataagaattcggctgtgacctcttctgccagaggcctcgaaaaagctcggcagcaactgcaggaagagctaagacaggtgtccggacagcttctcgaggaacgcaaaaagcgagaaacgcacgaagctttagcaagaaggctacaaaagagagttttactcctgaccaaggaacgagacggtatgagggctattttggggtcatacgactctgagctcaccccagctgaatacagtcctcagttgactcgccgtatgcgggaggccgaggatatggtgcaaaaggttcacagccactccgcagagatggaagcgcagctgtcacaagcactggaagaactcggtggtcagaaacagcgagcggacatgctggagatggagctcaaaatgttaaaaagccagtcgtccagcgctgagcagagctttctgttctcaagggaggaggccgatactctgagactgaaggttgaagaattggaaggcgaaaggagccgtcttgaggaggagaagcggatgctggaggcccagctcgaaagacgggctttacagggcgattacgaccagtcccgcaccaaggtcttgcacatgagcctgaatcccacaagcgtcgcccgccaacgcctgagagaggatcattcccaacttcaagcggaatgtgagaggctgcggggtcttttacgggctatggaaagagggggtacagtgccggccgaccttgaggctgccgccgctagcctgcctagctctaaagaggtggcagaactcaagaagcaggtcgagtccgcggagttaaaaaatcagcgtttaaaggaagtcttccagactaaaatccaggaattcagaaaggcctgctataccctgacaggataccaaatcgatattaccaccgagaaccaataccgcctgacttctttgtatgccgaacaccccggcgactgtctcattttcaaggcaacgagcccatccgggagcaagatgcagttgttggagacggagttctcccacacagtcggagagctcattgaggtacacctccgacgccaggactccattccagcgttcctcagctctttaaccctggaactgttctcccggcagacagtggcgtag

SEQ ID NO: 116089 - DNA, 2157 bp, Artificial Sequence
  derived and/or modified sequence
atggaggacctgggcgagaacaccatggtgctgagcaccctgcggtcgttgaacaactttatttcccagcgggttgaaggagggtcaggcctggatataagcacgagcgcacctggatcacttcagatgcaataccagcagtccatgcaactggaggaaagggcagaacagattaggtccaagagccatctcatacaggtggaacgggagaaaatgcagatggagctcagccacaagcgagcacgtgtcgaactggagcgcgccgcttcaacctccgctcggaattatgaacgcgaagtggatcgcaatcaggaactgctgactagaattcggcagcttcaggagcgggaagccggagcagaggagaagatgcaggaacagcttgagaggaaccgacagtgccaacagaatttggatgctgcctctaaaagattaagggagaaggaagacagtctggctcaagccggggaaaccattaacgccctgaagggccgcattagcgaactccagtggagcgtgatggaccaagagatgagggtgaagaggctcgagtctgaaaaacaggagttgcaagagcagttggacttgcagcacaagaaatgccaggaggccaaccagaagattcaggaattgcaggcctctcaggaggcaagggcagatcatgaacaacaaatcaaagacctggagcagaaactgagcctgcaggagcaggacgcagccatagtcaagaacatgaaatcggagctggtgcgcctcccccggttggagcgcgagctaaaacagttaagggaagagtccgcccatcttagagagatgcgagagacaaacgggctgcttcaggaggaactggaaggcctgcagcggaagctgggaagacaggaaaaaatgcaggagacattagtagggctagaattggaaaacgagaggctgctcgccaagctccagagctgggaacggctggatcagactatgggcctctcgattcggacgcccgaggacctgtcccgcttcgtggttgaattgcaacagcgggagctggcactgaaagataaaaacagcgctgtcaccagcagcgcaaggggcttggagaaggccagacaacagttacaagaagaactgaggcaagtcagcggccagctgctcgaagagcgcaagaagagagagacgcacgaggccttggcccggcgcctacagaaacgagtgctgctgctcactaaagaaagagacgggatgagggccatcttaggatcttatgattcagaactcacccctgcggaatatagcccacagttgacaagaaggatgagagaggccgaagatatggtccaaaaagtgcattcccatagcgcagaaatggaggctcagctctcacaggccctggaggaattaggaggtcaaaagcaacgggctgatatgctggaaatggagcttaagatgctgaagtcgcagtcaagctctgctgagcagtcttttctcttcagcagggaggaagcagatacactcagattaaaggttgaagaattggagggggaacgatcaaggttggaggaagaaaagcgcatgctggaggcgcaactagaacgaagagccctccaaggcgactacgatcaaagcagaactaaagtgttgcacatgtctctgaaccccacatccgtcgcacgccaaaggctcagggaagaccactctcagcttcaagcagagtgcgagcgcctgaggggactgctgcgtgccatggaaaggggcggcaccgtgccggctgacctggaggccgctgcagctagcctcccaagttctaaggaggtggccgaattgaaaaagcaggtggaatcagctgagctgaagaatcagcgactaaaggaggtgtttcagacaaaaatccaggaatttcgcaaagcttgctacaccctgactggctatcaaattgatattacaaccgagaaccagtacaggctgaccagcctgtatgccgagcatcccggcgattgtctaattttcaaggcgacatcacccagtggctcaaaaatgcagctcctggaaaccgagttttctcatacagttggggagctaatcgaggtgcacctaaggagacaggattctattccagcatttttaagcagcctcaccttggagcttttttcacgtcagactgtggcctag

SEQ ID NO: 116090 - DNA, 2157 bp, Artificial Sequence
  derived and/or modified sequence
atggaggacctgggcgagaacaccatggtgctgagcaccctgcggtcgctgaacaacttcatctcacaacgtgtggagggagggtccggactggatatatctacatccgcacccggttctctccagatgcagtaccagcagtcgatgcagctggaggagcgtgcagaacaaatcaggagcaagtctcacctgatccaggtggaacgggagaaaatgcagatggagttgtctcataagcgagcacgagttgagttggagagggctgcctcaactagcgcccgtaactatgaacgcgaggtggatcgcaaccaagagctgttgactcggattagacagctgcaggagagggaggctggcgccgaggaaaaaatgcaggaacagctggaacgcaatcggcaatgccagcagaatttagacgccgcttcaaagcgcctgcgggagaaagaagactcgcttgcgcaggctggggaaaccatcaacgcactgaagggacgcataagtgagctgcaatggagcgtgatggatcaggagatgagggtgaaacgcctagaaagtgaaaaacaggaactgcaggagcagcttgacttgcagcacaagaaatgccaagaagctaatcagaagattcaggaactgcaggcctcccaagaagcgagagcggatcatgagcaacaaatcaaggatctggagcagaagctgagcttacaggaacaggatgccgctattgtgaaaaacatgaagtcagagctggtgcgtctgccccgactggagagagaactcaagcagttgcgggaggaatccgctcacctgcgggaaatgagggaaacaaatggactgctgcaagaagaattagaaggtctgcagaggaagctgggcaggcaggagaagatgcaggaaaccctagttgggcttgagctggaaaacgagcgtctccttgccaaactacagtcttgggagaggcttgatcaaactatggggctgagcattcgcaccccagaagacctgtctcggttcgtagtggagctgcagcagagggagttagccctcaaggacaagaattctgctgtcacgagctctgccagagggcttgaaaaggccaggcagcaactccaggaggagttgcgccaggtgtcaggccagctgctcgaggagcgtaagaaacgggagacgcacgaagcattggctcggcgcttgcagaagcgggttctgctgctgacaaaagagcgggatggcatgcgggccatcctgggaagctacgactctgagcttactccggccgaatattctccccagcttacacggaggatgagggaggcagaagacatggtccagaaagtgcatagtcattctgcagagatggaggcgcaattatcgcaggcactggaagaactgggtggccaaaaacagcgcgccgacatgttggaaatggaactaaagatgcttaagtcccaatctagttcggccgagcagtctttcctgttttctcgagaagaggcggacacgctccggctgaaagtagaagaactggaaggggagagatcccgattagaggaagagaagcgcatgctggaggctcagcttgaaagacgcgcactgcagggagattacgaccagtcgcgtaccaaggtcctgcacatgtctttgaatccaacttccgtggctcgccagcgtctccgggaggaccattcccagttacaagctgagtgtgagaggctccgcggtttactacgtgcaatggagagggggggcactgtcccagccgacctggaggcggccgcagctagcctgccctcatcaaaagaggtggccgaactgaagaagcaagtggagtctgccgagttgaagaatcaaagactcaaagaggtctttcagaccaagatccaagagtttagaaaggcttgttacaccctgaccggttaccagattgatatcactacggagaatcaatataggctgacgtccctttacgctgaacaccctggcgactgcctcattttcaaagccacctccccgagcggaagcaaaatgcagctacttgagacagaattctcacacactgtcggggaactaatcgaggttcatctgcgaagacaggactcaatccccgctttcctgtcgtcgctaaccttagagcttttttctagacagaccgtcgcttag

SEQ ID NO: 116091 - DNA, 2157 bp, Artificial Sequence
  derived and/or modified sequence
atggaagacctgggcgagaacactatggttttatcgacactgcggagtctgaataactttatctcccagagagttgagggaggatcaggtcttgatatcagcacgagcgccccagggagcttacaaatgcaataccagcaaagcatgcagctggaggaacgcgcagaacagatccgaagcaaatcacacctgattcaggtagaaagagaaaaaatgcagatggaactgtcacacaaaagggccagagtggaactcgagagggctgcctcaacgtccgccaggaattacgaacgtgaagtggatcgcaaccaggaactcctgacacggattagacagctgcaggaaagagaggcgggagccgaggaaaaaatgcaggagcagctggagcggaacagacagtgtcagcagaatttggacgccgctagtaagcgactgagggaaaaagaagacagtctcgcacaggcaggagagacaataaatgcgctcaaagggcgtatcagtgagctgcaatggtcagtaatggatcaggagatgcgtgtgaagagattagaatccgaaaaacaagagctgcaagagcaacttgacctgcagcataaaaaatgtcaggaggcgaaccagaaaatacaggaacttcaagcctcgcaggaggcaagggctgaccatgagcagcaaatcaaagaccttgagcagaaactttccctgcaggagcaagatgccgcaatagtgaaaaatatgaaatcagagcttgtccgtctacctaggttagaacgagagctcaaacagctaagggaggagtccgcccacttgcgagaaatgagagaaaccaacggcctcctgcaagaagaactggaaggactgcaaaggaaactgggccgtcaggaaaagatgcaggaaacgctggtgggactggagttggaaaatgagcgccttttagctaagctgcagtcctgggagcgtctggatcagactatgggcttaagcatcagaaccccagaagacctcagtagattcgtggtagaattgcaacagcgggagcttgcactcaaggataagaatagcgctgtgactagcagcgctagagggttagagaaggccaggcagcaattgcaggaggagctcaggcaagtatcaggccagctgttagaggagagaaagaaacgcgaaactcatgaagcccttgccaggaggctgcagaaaagagttttgctgctgaccaaggagcgggatggcatgcgtgccatcttgggatcatacgacagtgaacttactcccgcagagtatagcccacagctcacacgcagaatgagagaagctgaagatatggttcaaaaagttcactctcattccgccgagatggaggctcagttatcccaggcccttgaggagcttggcggacagaaacagagagcagatatgcttgagatggagttaaagatgcttaagtcccaatcatccagcgcggaacagagtttcctattctctagagaggaggccgacaccctacggttaaaggtggaggagcttgaaggggaacgaagccgcctcgaggaagaaaaacgcatgctagaagcccagctggagcggagagccctgcagggtgattacgatcagtctagaacaaaagtgttgcacatgtctctgaatcccacaagcgtcgccagacagaggctgagagaagaccatagccaactccaggcagaatgcgaacggcttcggggactgctgagagccatggaacgcggaggcacagtcccagcagaccttgaagccgctgcagccagccttccatcgagtaaagaggtcgccgagctgaagaaacaggtcgagtcagccgagcttaaaaaccaaaggctgaaagaagttttccagactaagatccaggaattccgcaaagcctgctataccctgacgggttaccagatcgacatcaccaccgagaatcaataccggttaacgagcttatatgccgaacaccccggagactgcctcatcttcaaagcaacatcccctagcggctcgaagatgcagctgctagaaacagagttcagccacactgtcggagagctcatcgaggtgcacctcaggaggcaagatagtataccagcattcttgtcgagtctcaccctggagttgttctcccgacagacagttgcttag

SEQ ID NO: 116092 - DNA, 2157 bp, Artificial Sequence
  derived and/or modified sequence
atggaggatctcggagagaataccatggtgttgagcacactcaggtccctgaacaattttatttctcaacgtgtggagggcggttcagggctcgatatctccacgagcgctccgggttctctccagatgcagtatcaacagagcatgcagttggaggagagggccgagcaaattcgatccaagtctcatctgatccaagttgaacgagaaaagatgcagatggagctttctcacaaaagagctcgggtggagctcgagagagcggcttctaccagcgcacgaaattacgaaagggaggtcgatagaaatcaggagctcctgacccgcataagacaactgcaagaacgggaagccggtgccgaggaaaaaatgcaagaacagctcgaacgcaaccgccaatgtcagcagaatctagatgcagcatcaaaaagattgcgggagaaggaagacagtctggcccaggcaggcgagaccattaacgccctgaaaggtaggataagcgagctccagtggagcgtgatggaccaagaaatgcgagtaaagagactggaaagcgagaaacaggaactccaggagcagctcgacctgcaacacaaaaagtgtcaggaggctaatcagaaaatccaagagctccaggccagccaagaagctcgcgctgaccacgaacagcagataaaggatctggagcaaaaactatcactccaggagcaggatgcagctatcgtcaagaacatgaaatctgaactggtcaggttgccaaggctggaacgagaactcaagcagctacgcgaagagtccgcccaccttcgtgagatgcgtgagaccaacggtctcctccaggaggagctcgagggcctacagcgcaaactgggtcgccaagaaaagatgcaagagaccttggttgggcttgagctcgagaatgagcgactactcgctaaactgcagagctgggagcggttggatcaaacaatgggcctctctatacgcacaccagaggacctgagtcggtttgttgtggaactacaacagagggagctggcactcaaagacaagaacagcgctgtgacgtcctctgcacggggattggagaaagcccgtcagcagttacaagaagaactgcgacaagtgtctggtcagttgctggaggaacggaagaagcgcgagacacacgaggctttggctcgccgtctccaaaagcgtgtcctgctgcttacaaaggagagagatggaatgagagccatactaggttcatacgatagtgagctgacacctgcggagtacagtccacaactgacaagaaggatgagggaggcagaagacatggtccagaaagttcattctcacagcgccgagatggaggcacaactgtctcaagccctcgaagagctggggggacagaagcaacgcgcagatatgttggagatggagctgaagatgttgaagtcacagtcctcctcagccgaacagagcttcctgttttctagagaagaggccgacaccctgcgattaaaagtcgaggagctcgagggggagagatcacggctggaagaagagaaaagaatgctggaagcgcagctcgagaggagggctttgcagggcgactatgaccagagtcgcacgaaggttttgcacatgagtttaaacccaacaagcgtagcgaggcaacgcctaagagaagaccactcccaattacaggcagaatgtgagcgcctccgcggtcttctacgggctatggaacgtggcggaacagttcccgctgatctggaggctgccgcagcatcgctgccctccagtaaagaggttgcggagctaaagaaacaggtggaatctgccgagttgaagaatcaaagactgaaagaggtatttcagacaaaaatacaggagttccgcaaagcatgttacactttgactggctaccaaatcgatatcacaaccgagaatcagtatcggcttactagcctgtacgcagaacaccctggcgattgtctgatttttaaggcaacctccccaagcggcagcaagatgcaactgctggagaccgagttttcacatactgtgggcgagctgattgaggtgcacctgagaaggcaggattccatccccgcttttctcagttctctgaccctcgaactttttagcagacagacggtggcctag

SEQ ID NO: 116093 - DNA, 2157 bp, Artificial Sequence
  derived and/or modified sequence
atggaagacctcggggaaaacaccatggtgctctcgacccttcggtctctgaacaacttcatctcacagcgggtggaaggcggatccgggttggatatctctacaagcgctcctgggagcctgcagatgcagtaccagcaaagcatgcagctggaagaacgtgcagagcaaattcgctccaaatctcacctgatccaggttgagagggagaaaatgcagatggagctgagccataagcgggcaagagtggagctggaacgagctgcatctacatccgccaggaactacgaaagagaagttgatagaaatcaggaattactgacacgcattagacagctacaagaacgggaggccggtgcagaagaaaagatgcaggagcagttggagcgaaaccgccagtgccaacagaacctcgacgcagcatccaagcggctgcgagagaaggaggactccctagcacaggcaggagagacgataaacgcactgaagggacgaatttccgagctccagtggtctgtgatggaccaggaaatgcgcgtaaagcgcctagagagcgagaagcaggaattacaggagcaactcgacctgcagcacaaaaaatgccaggaggcaaatcagaaaatccaagaactgcaagcttcccaggaggctcgggctgatcacgagcaacagatcaaagacctagagcagaagctgagcctgcaagaacaggatgccgcaatcgttaaaaacatgaaatccgaactggtgcgactcccgcgtttagagagagagctgaaacagctgcgggaagaatcagctcatctgagggagatgcgggaaacgaacggactcctccaggaggagctcgaagggctgcagaggaaactgggcagacaggaaaaaatgcaggaaaccctggtcggcttggaattggaaaacgaaagactattagcaaaactacagagttgggaacggctggatcaaacaatggggctgtcaatccgaacacctgaagatctgagtcggtttgtggtcgagttgcagcaacgtgaacttgctctgaaggataagaattctgctgtcacatctagcgccaggggcttggagaaggcacgacagcagctgcaggaagagcttcggcaggtttccggacagcttctggaagaaagaaagaaaagggaaacgcacgaggctctggccaggcggctgcagaagcgcgttctgctgttgaccaaggagcgagacgggatgcgtgctatcctgggctcatatgattcggagctcacccctgctgaatatagccctcaactgacacggcgaatgagggaagccgaggacatggtgcagaaagtccacagccacagcgctgaaatggaagcccagcttagtcaggctttggaggagctcggagggcaaaaacagcgcgctgacatgctggagatggagctcaagatgctcaagagtcagagctcaagcgctgagcaatcttttctgtttagccgggaggaagcggacactctccgcctcaaggtcgaggaattagaaggcgagaggagtcgcttggaggaggagaagaggatgctggaggcccagctggagagacgtgcgctgcagggggactacgatcaatcccgcaccaaagtgctgcatatgtccctgaacccaacatctgtggctaggcagcggttacgggaggaccactcacaactgcaggccgagtgcgagcgcctaagaggcctcctgagagctatggaaagagggggtactgtgcctgcagacctggaagccgcagcagcctcgttgccttcatccaaggaggtggctgagttgaagaagcaggtggaatccgcagaacttaagaaccagcgactcaaggaagtgttccagactaaaattcaagagttccgaaaggcctgttacacactgacgggttaccagatcgacatcacaaccgagaatcagtacaggctcacctccttatatgccgagcacccgggtgactgtcttatctttaaggccactagtccgagtggctcaaagatgcagttactggagacggagttctctcacactgtgggagagctcattgaagtgcatctgaggcggcaggattcgattcccgcattcctgtctagcctgaccctggagctcttctctaggcagaccgtggcttag

SEQ ID NO: 116094 - DNA, 2157 bp, Artificial Sequence
  derived and/or modified sequence
atggaggacctgggcgagaacaccatggtgctgagcaccctgagaagcctgaacaacttcatcagccagagagtggagggcggcagcggcctggacatcagcaccagcgcccccggcagcctgcagatgcagtaccagcagagcatgcagctggaggagagagccgagcagatcagaagcaagagccacctgatccaggtggagagagagaagatgcagatggagctgagccacaagagagccagagtggagctggagagagccgccagcaccagcgccagaaactacgagagagaggtggacagaaaccaggagctgctgaccagaatcagacagctgcaggagagagaggccggcgccgaggagaagatgcaggagcagctggagagaaacagacagtgccagcagaacctggacgccgccagcaagagactgagagagaaggaggacagcctggcccaggccggcgagaccatcaacgccctgaagggcagaatcagcgagctgcagtggagcgtgatggaccaggagatgagagtgaagagactggagagcgagaagcaggagctgcaggagcagctggacctgcagcacaagaagtgccaggaggccaaccagaagatccaggagctgcaggccagccaggaggccagagccgaccacgagcagcagatcaaggacctggagcagaagctgagcctgcaggagcaggacgccgccatcgtgaagaacatgaagagcgagctggtgagactgcccagactggagagagagctgaagcagctgagagaggagagcgcccacctgagagagatgagagagaccaacggcctgctgcaggaggagctggagggcctgcagagaaagctgggcagacaggagaagatgcaggagaccctggtgggcctggagctggagaacgagagactgctggccaagctgcagagctgggagagactggaccagaccatgggcctgagcatcagaacccccgaggacctgagcagattcgtggtggagctgcagcagagagagctggccctgaaggacaagaacagcgccgtgaccagcagcgccagaggcctggagaaggccagacagcagctgcaggaggagctgagacaggtgagcggccagctgctggaggagagaaagaagagagagacccacgaggccctggccagaagactgcagaagagagtgctgctgctgaccaaggagagagacggcatgagagccatcctgggcagctacgacagcgagctgacccccgccgagtacagcccccagctgaccagaagaatgagagaggccgaggacatggtgcagaaggtgcacagccacagcgccgagatggaggcccagctgagccaggccctggaggagctgggcggccagaagcagagagccgacatgctggagatggagctgaagatgctgaagagccagagcagcagcgccgagcagagcttcctgttcagcagagaggaggccgacaccctgagactgaaggtggaggagctggagggcgagagaagcagactggaggaggagaagagaatgctggaggcccagctggagagaagagccctgcagggcgactacgaccagagcagaaccaaggtgctgcacatgagcctgaaccccaccagcgtggccagacagagactgagagaggaccacagccagctgcaggccgagtgcgagagactgagaggcctgctgagagccatggagagaggcggcaccgtgcccgccgacctggaggccgccgccgccagcctgcccagcagcaaggaggtggccgagctgaagaagcaggtggagagcgccgagctgaagaaccagagactgaaggaggtgttccagaccaagatccaggagttcagaaaggcctgctacaccctgaccggctaccagatcgacatcaccaccgagaaccagtacagactgaccagcctgtacgccgagcaccccggcgactgcctgatcttcaaggccaccagccccagcggcagcaagatgcagctgctggagaccgagttcagccacaccgtgggcgagctgatcgaggtgcacctgagaagacaggacagcatccccgccttcctgagcagcctgaccctggagctgttcagcagacagaccgtggcctag

SEQ ID NO: 116095 - protein, 626 aa, Artificial Sequence
  derived and/or modified sequence
MLPARGCVRKRTVWPRLARVLIVTLLTLELSYAPLPCQLSGVPYNTGDPVGRWARPCIWPCPWHTTINALKGRISELQWSVMDQEMRVKRLESEKQELQEQLDLQHKKCQEANQKIQELQASQEARADHEQQIKDLEQKLSLQEQDAAIVKNMKSELVRLPRLERELKQLREESAHLREMRETNGLLQEELEGLQRKLGRQEKMQETLVGLELENERLLAKLQSWERLDQTMGLSIRTPEDLSRFVVELQQRELALKDKNSAVTSSARGLEKARQQLQEELRQVSGQLLEERKKRETHEALARRLQKRVLLLTKERDGMRAILGSYDSELTPAEYSPQLTRRMREAEDMVQKVHSHSAEMEAQLSQALEELGGQKQRADMLEMELKMLKSQSSSAEQSFLFSREEADTLRLKVEELEGERSRLEEEKRMLEAQLERRALQGDYDQSRTKVLHMSLNPTSVARQRLREDHSQLQAECERLRGLLRAMERGGTVPADLEAAAASLPSSKEVAELKKQVESAELKNQRLKEVFQTKIQEFRKACYTLTGYQIDITTENQYRLTSLYAEHPGDCLIFKATSPSGSKMQLLETEFSHTVGELIEVHLRRQDSIPAFLSSLTLELFSRQTVA

SEQ ID NO: 116096 - DNA, 1881 bp, Artificial Sequence
  derived and/or modified sequence
atgctgccggcgaggggctgcgtaagaaagcggacggtgtggcctcgcctggcccgcgtactcatcgttaccctgctgacccttgagttgagctacgctccgttaccgtgtcagttatctggcgttccatacaacaccggagatcctgtagggcggtgggcccgcccatgtatttggccttgtccctggcacactacaatcaacgctctcaagggccggatttctgaactccaatggtctgtaatggaccaggagatgagagtgaagcgtctcgaatccgagaaacaggaacttcaggagcagctggacttgcaacacaagaagtgccaagaagccaatcagaagatacaggaactccaagcaagccaagaggcgagagccgaccacgagcagcaaatcaaggacctcgagcagaagctgtctctgcaagaacaagacgcagccattgtgaagaatatgaaatctgagctggtccgcctcccccgcctggagcgggagctgaagcagctcagagaggagtctgctcacctgcgtgagatgagagagacaaatggtctgctccaggaggagctggaaggtcttcagcgaaagctgggccgacaagagaagatgcaggagacgctcgtgggcctggaactggagaatgagcgactcttggcaaagctgcaatcatgggagagattagatcagacaatggggctgtccatccgcactcccgaggatctatcacgcttcgtggtcgagctgcaacagcgggaacttgcattaaaggataaaaatagcgccgtcacctcctcagcacggggtttggagaaggcccgacagcaactgcaggaggagttgagacaagtgtccggacagttgctagaggagcgcaaaaaacgagaaacacatgaggccctcgctcgaagactgcaaaagagagtgctcttgctgacaaaggaacgtgacggaatgcgggccattttgggctcttatgactcagagcttactcctgccgaatattctcctcaactcactaggcgcatgcgcgaagccgaggatatggtacagaaagtgcatagccatagcgccgaaatggaggcacagctgagccaggcactggaagagctgggcggccaaaagcagcgagctgatatgctggagatggagctgaagatgttgaaaagtcagtcctcttcagctgagcaatcattcctgttctcccgagaagaagcagacacactgagactcaaagttgaggagcttgaaggcgagcgatcccgactggaagaggaaaaaaggatgttggaagcccagctcgagcggcgcgccctacaaggggattacgaccaatcacggactaaggtgcttcacatgtcactgaacccaactagtgttgcccgacagagattgagggaggaccatagccagcttcaggccgaatgcgagcggctgagaggcctgcttcgggctatggagcgaggagggacggtgccagccgacctggaagctgccgctgctagtcttccatctagtaaagaagttgctgaactgaagaagcaggttgaatccgccgagctaaagaatcagaggctgaaagaggtcttccaaacgaagatacaggaattccgcaaggcctgttacaccctcaccggttatcagatcgatatcaccaccgagaatcagtataggctgacaagtctatatgcggaacatcctggtgattgcctgatattcaaggctacaagtccctccggttcaaagatgcagctgctcgagaccgagttcagccatactgtgggcgagttgatagaagtccaccttaggcggcaggacagtattccagcatttctgtcaagcctgacacttgaactattcagcagacagaccgttgcctag

SEQ ID NO: 116097 - DNA, 1881 bp, Artificial Sequence
  derived and/or modified sequence
atgctgcctgcccggggctgtgtgaggaagaggacagtgtggccccggctggcccgggtgctgattgtgaccctgctgaccctggagctgtcctatgcccccctgccctgccagctgagcggcgtgccctacaacacaggagaccctgtgggccgctgggcccggccctgcatctggccctgcccctggcacaccaccatcaatgccctgaagggccgcatcagcgagctgcagtggagcgtgatggaccaggagatgagggtgaagaggctggagagcgagaagcaggagctgcaggagcagctggacctgcagcacaagaagtgccaggaggccaaccagaagatccaggagctgcaggccagccaggaggcccgggctgaccacgagcagcagatcaaggacctggagcagaagctgagcctgcaggagcaggatgctgccatcgtgaagaacatgaagtctgagctggtgcggctgccccggctggagcgggagctgaagcagctgcgggaggagagcgcccacctgcgggagatgagggagaccaacggcctgctgcaggaggagctggagggcctgcagaggaagctgggccggcaggagaagatgcaggagaccctggtgggcctggagctggagaatgaaaggctgctggccaagctgcagagctgggagcggctggaccagaccatgggcctgagcatccgcaccccagaggacctgagcagatttgtggtggagctgcagcagcgggagctggccctgaaggacaagaacagcgctgtgaccagcagcgcccggggcctggagaaggcccggcagcagctgcaggaggagctgcggcaggtgtctggccagctgctggaggagaggaagaagcgggagacccatgaggccctggcccggcggctgcagaagagggtgctgctgctgaccaaggagagagatggcatgagggccatcctgggcagctatgacagcgagctgaccccagctgagtacagcccccagctgaccaggaggatgagggaggccgaggacatggtgcagaaggtgcacagccacagcgctgagatggaggcccagctgagccaggccctggaggagctgggcggccagaagcagagagctgacatgctggagatggagctgaagatgctgaagagccagagcagcagcgctgagcagagcttcctgttcagccgggaggaggccgacaccctgcggctgaaggtggaggagctggagggggagaggagccggctggaggaggagaagaggatgctggaggcccagctggagcggcgggccctgcagggcgactatgaccagagcaggaccaaggtgctgcacatgagcctgaaccccacctctgtggcccggcagaggctgcgggaggaccacagccagctgcaggctgaatgtgagcggctgcggggcctgctgcgggccatggagcggggcggcaccgtgcctgctgacctggaggccgccgccgccagcctgcccagcagcaaggaggtggccgagctgaagaagcaggtggagagcgctgagctgaagaaccagaggctgaaggaggtgttccagaccaagatccaggagttcaggaaggcctgctacaccctgaccggctaccagattgacatcaccacagagaaccagtaccgcctgaccagcctgtatgcagagcaccctggggactgcctgatcttcaaggccaccagccccagcggcagcaagatgcagctgctggagacagagttcagccacacagtgggggagctgattgaggtgcacctgcggcggcaggacagcatcccagccttcctgagcagcctgaccctggagctgttcagccggcagacagtggcctag

SEQ ID NO: 116098 - DNA, 2355 bp, Artificial Sequence
  derived and/or modified sequence
gtcgcgataaatgggcgccggcggagcggagggagatccgagcggcggcggcaagctggctgcgagcggctgagcgtgaggtcgaccgcaaccaggagctcctgacgcgcatccggcagcttcaggagcgggaggccggggcggaggagaagatgcaggagcagctggagcgcaacaggcagtgtcagcagaacttggatgctgccagcaagaggctgcgtgagaaagaggacagtctggcccaggctggcgagggtcctgattgtcacgctccttactctggaattatcttatgcgcctcttccttgccaactgtccggcgtcccctacaacacgggtgaccctgtgggcaggtgggctcggccctgcatctggccttgcccctggcacacgaccatcaacgcactgaaggggaggatctcggaactgcagtggagcgtgatggaccaggagatgcgggtgaagcgcctggagtcggagaagcaggagctgcaggagcagctggacctgcaacacaaaaaatgccaggaagccaatcagaaaatccaggaactccaggccagccaagaagcaagagcagaccacgagcagcagattaaggatctggagcagaagctgtccctgcaagagcaggatgcagcgattgtgaagaacatgaagtctgagctggtacggctccctaggctggaacgggagctgaagcagctgcgggaggagagcgcgcacctgcgggagatgagagagaccaacgggctgctccaggaagagctggaagggctgcagaggaagctggggcgccaggagaagatgcaggagacgctggttggcttggagctggagaacgagaggctgctggccaagctgcaaagctgggagagactggaccagaccatgggcctgagcatcaggactccagaagacctttccagattcgtggttgagctgcagcagagggagcttgccttgaaggacaagaacagcgccgtcaccagcagcgcccgggggctggagaaggccaggcagcagctgcaggaggagctccggcaggtcagcggccagctgttggaggagaggaagaagcgcgagacccacgaggcgctggcccggaggctccagaaacgggtcctgctgctcaccaaggagcgggacggtatgcgggccatcctggggtcctacgacagcgagctgaccccggccgagtactcaccccagctgacgcggcgcatgcgggaggctgaggatatggtgcagaaggtgcacagccacagcgccgagatggaggctcagctgtcgcaggccctggaggagctgggaggccagaaacaaagagcagacatgctggagatggagctgaagatgctgaagtctcagtccagctctgccgaacagagcttcctgttctccagggaggaggcggacacgctcaggttgaaggtcgaggagctggaaggcgagcggagtcggctggaggaggaaaagaggatgctggaggcacagctggagcggcgagctctgcagggtgactatgaccagagcaggaccaaagtgctgcacatgagcctgaaccccaccagtgtggccaggcagcgcctgcgcgaggaccacagccagctgcaggcggagtgcgagcgactgcgcgggctcctgcgcgccatggagagaggaggcaccgtcccagccgaccttgaggctgccgccgcgagtctgccatcgtccaaggaggtggcagagctgaagaagcaggtggagagtgccgagctgaagaaccagcggctcaaggaggttttccagaccaagatccaggagttccgcaaggcctgctacacgctcaccggctaccagatcgacatcaccacggagaaccagtaccggctgacctcgctgtacgccgagcacccaggcgactgcctcatcttcaaggccaccagcccctcgggttccaagatgcagctactggagacagagttctcacacaccgtgggcgagctcatcgaggtgcacctgcggcgccaggacagcatccctgccttcctcagctcgctcaccctcgagctcttcagccgccagaccgtggcgtagcctgcaggctcgggggcatagccggagccactctgcttggcctgacctgcaggtcccctgccccgccagccacaggctgggtgcacgtcctgcctctccagccccacagggcagcagcatgactgacagacacgctgggacctacgtcgggcttcctgctggggcggccagcaccctctccacgtgcagaccccatgcgtcccggagcctggtgtgtgggcgtcggccaccagcctgggttcctcaccttgtgaaataaaatcttctcccctagac

SEQ ID NO: 116099 - DNA, 1881 bp, Artificial Sequence
  derived and/or modified sequence
atgctgcccgcccggggctgcgtgcggaagcggaccgtgtggcccaggctggcccgcgtgttgattgtgacactgctgacacttgagctgtcttatgctcctctgccatgtcagctcagcggcgtgccatacaatactggcgatccagtgggcaggtgggccaggccatgtatttggccctgtccttggcacactaccattaacgccctcaagggtcgtatcagcgagctccagtggtcggtgatggaccaggaaatgagagtgaagaggctagagtccgaaaagcaagagctgcaggagcaattggacctgcagcataagaaatgccaagaggctaaccagaagatccaggaactgcaggctagtcaggaagcccgtgcggaccatgaacagcaaatcaaagacctcgaacagaaactcagtctgcaagaacaggacgccgctatagttaagaacatgaaatccgaattggtgcgtttgccaaggctcgagagggaactgaaacagttaagagaagaaagcgcacatttaagggagatgcgagagacaaatggtttgctccaggaagaactggagggcctgcagaggaagctggggcggcaggagaagatgcaagagacattggtgggacttgagcttgagaatgagaggctcctggcaaagctgcaatcatgggagagactggaccagacaatgggactatcaatcaggactcccgaggacctgtctaggtttgttgtggagttgcaacagcgggagctggcactgaaggataagaactcagccgtaacatcatcagctcgcggcctggagaaggcaagacaacagctccaggaagaactacgccaggtgtccgggcagcttcttgaagagcggaagaagagggagactcacgaagcgttggcaaggcgcttgcagaagagagtgcttctgctgaccaaagagcgggatgggatgagagctatactaggttcttatgattctgagctcacgcctgccgagtactcaccacagttgacacgcaggatgagagaggccgaagacatggtgcagaaggtgcacagtcatagtgctgagatggaagcacaactgagccaggctctggaggaacttggggggcagaagcaacgcgccgacatgcttgaaatggagctgaaaatgctcaagtctcagagctcgtcagctgaacaatcttttctcttctcccgcgaagaagcggatactctgcggcttaaggtcgaggaacttgagggcgagcgctcaaggcttgaagaggaaaagaggatgctcgaagctcagctggaaagacgcgctttacagggagactacgaccagtccagaaccaaggttttgcacatgtctctgaaccccacgagcgtggcgaggcagagattgcgcgaggaccactcacagcttcaagcagaatgtgagcgactgagaggcctgctgagagccatggagcggggcggtactgtgccagcagacttagaggcagccgctgcctcattgccatcttccaaggaagtggctgagcttaaaaagcaagtggaaagcgcggaactgaagaaccagagattgaaagaggtctttcagacaaaaatacaggagtttcgtaaagcttgctatacactaaccgggtaccagattgacatcactacggaaaatcaataccgactgacgagcctgtatgctgagcaccctggagattgcctcatattcaaagcaacatcccccagcggctcaaagatgcagctattggagaccgaattctctcacactgtcggggagttaattgaagtgcacttgaggcgacaggattccatccccgctttcctttccagtctgacactggagctattttcccgccagaccgttgcctag

SEQ ID NO: 116100 - DNA, 1881 bp, Artificial Sequence
  derived and/or modified sequence
atgctgcctgccagaggatgcgtaaggaagaggacagtctggcctcggctcgcgcgagtgttgatcgtaactctgcttacactagaactcagctacgctcccctgccctgtcagctaagtggtgtgccatacaacactggagatcctgttggtcgttgggcgagaccttgtatatggccatgtccctggcacacaactatcaatgcgcttaagggaagaatctccgaactgcagtggtcagtaatggaccaagaaatgagagtgaagcgacttgagtctgagaagcaggaactgcaagaacagcttgacctccagcacaagaaatgccaggaggctaatcagaagatccaggagttgcaggcgagccaagaggctcgcgcagatcacgagcaacagataaaggacctggaacagaaactgtctctccaggaacaggatgcagcaattgtcaagaatatgaaatccgaactagttaggctgcctaggcttgagagagagctcaagcagctccgcgaagagtcggctcacttgcgcgaaatgcgtgagaccaacggactgctccaggaagagttggagggactgcagcgcaagttagggcgtcaagagaagatgcaggagaccttggttggactggaacttgagaacgaaagactccttgctaaacttcagtcttgggagcggttagaccagaccatgggcctttccattcgcaccccagaggacttgtctaggtttgtagtcgaactgcagcagcgcgagctggccttaaaggataagaattccgcagtgacatcaagtgctaggggcctggaaaaagcacgccaacagctgcaggaggagcttcgccaggtgtctggtcaactcctggaagaacgaaagaaaagggagacccatgaggccctcgccaggcgcctgcaaaagagagtgctgctcttgactaaggagagagatgggatgcgggctattctcggctcctacgacagtgagctcacccctgccgaatatagccctcagctgaccagacggatgcgcgaagcggaggacatggtccagaaggttcactcgcattctgctgaaatggaagcccaactgagtcaagcacttgaagagcttggaggccagaaacagcgcgctgacatgctggaaatggagctgaagatgctcaagagccagtcttcatccgccgagcaaagcttcctgttctcacgcgaggaggccgacacactgcgcctgaaagtcgaggaactggagggtgaacgctcacgcctggaagaagaaaagcgtatgttagaagcccagctggagaggcgcgcactgcagggagactatgaccagtctcgcacgaaggtgctccacatgagcctgaaccccacctccgtggcccgacagcgactgcgtgaagaccactctcagctacaagccgaatgtgagagactacgaggtctcctgagggcaatggagagaggtggcactgtgcccgctgacctcgaggcggcagctgcttcactcccatcctcaaaggaggtagcagagctgaagaaacaggtggagagtgcggagttgaaaaaccaacggttaaaagaggtctttcaaactaagattcaagaattccggaaggcctgctatacactgacaggttaccagattgatatcacgacggagaatcagtacagactgactagcttgtacgcagaacacccaggtgattgtctgatctttaaagccacctctccaagcgggtcgaagatgcagctgctagaaactgagtttagccacactgtgggagagctcatcgaggtgcacctacgacggcaggacagcatcccagcattcctatccagcctgaccctggagttattttctcggcagaccgtcgcctag

SEQ ID NO: 116101 - DNA, 1881 bp, Artificial Sequence
  derived and/or modified sequence
atgctgcccgccagaggctgcgtgagaaagagaaccgtgtggcccagactggccagagtgctgatcgtgaccctgctgaccctggagctgagctacgcccccctgccctgccagctgagcggcgtgccctacaacaccggcgaccccgtgggcagatgggccagaccctgcatctggccctgcccctggcacaccaccatcaacgccctgaagggcagaatcagcgagctgcagtggagcgtgatggaccaggagatgagagtgaagagactggagagcgagaagcaggagctgcaggagcagctggacctgcagcacaagaagtgccaggaggccaaccagaagatccaggagctgcaggccagccaggaggccagagccgaccacgagcagcagatcaaggacctggagcagaagctgagcctgcaggagcaggacgccgccatcgtgaagaacatgaagagcgagctggtgagactgcccagactggagagagagctgaagcagctgagagaggagagcgcccacctgagagagatgagagagaccaacggcctgctgcaggaggagctggagggcctgcagagaaagctgggcagacaggagaagatgcaggagaccctggtgggcctggagctggagaacgagagactgctggccaagctgcagagctgggagagactggaccagaccatgggcctgagcatcagaacccccgaggacctgagcagattcgtggtggagctgcagcagagagagctggccctgaaggacaagaacagcgccgtgaccagcagcgccagaggcctggagaaggccagacagcagctgcaggaggagctgagacaggtgagcggccagctgctggaggagagaaagaagagagagacccacgaggccctggccagaagactgcagaagagagtgctgctgctgaccaaggagagagacggcatgagagccatcctgggcagctacgacagcgagctgacccccgccgagtacagcccccagctgaccagaagaatgagagaggccgaggacatggtgcagaaggtgcacagccacagcgccgagatggaggcccagctgagccaggccctggaggagctgggcggccagaagcagagagccgacatgctggagatggagctgaagatgctgaagagccagagcagcagcgccgagcagagcttcctgttcagcagagaggaggccgacaccctgagactgaaggtggaggagctggagggcgagagaagcagactggaggaggagaagagaatgctggaggcccagctggagagaagagccctgcagggcgactacgaccagagcagaaccaaggtgctgcacatgagcctgaaccccaccagcgtggccagacagagactgagagaggaccacagccagctgcaggccgagtgcgagagactgagaggcctgctgagagccatggagagaggcggcaccgtgcccgccgacctggaggccgccgccgccagcctgcccagcagcaaggaggtggccgagctgaagaagcaggtggagagcgccgagctgaagaaccagagactgaaggaggtgttccagaccaagatccaggagttcagaaaggcctgctacaccctgaccggctaccagatcgacatcaccaccgagaaccagtacagactgaccagcctgtacgccgagcaccccggcgactgcctgatcttcaaggccaccagccccagcggcagcaagatgcagctgctggagaccgagttcagccacaccgtgggcgagctgatcgaggtgcacctgagaagacaggacagcatccccgccttcctgagcagcctgaccctggagctgttcagcagacagaccgtggcctag

SEQ ID NO: 116102 - protein, 444 aa, Artificial Sequence
  derived and/or modified sequence
MKRFGSLRSNKKHKDQNRSTERRQSEPHGLFASGLSSSPSTPTQVTKQHTFPLESYKHEPERLENRIYASSSPPDTGQRFCPSSFQSPTRPPLASPTHYAPSKAAALAAALGPAEAGMLEKLEFEDEVEDSESGVYMRFMRSHKCYDIVPTSSKLVVFDTTLQVKKAFFALVANGVRAAPLWESKKQSFVGMLTITDFINILHRYYKSPMVQIYELEEHKIETWRELYLQETFKPLVNISPDASLFDAVYSLIKNKIHRLPVIDPISGNALYILTHKRILKFLQLFMSDMPKPAFMKQNLDELGIGTYHNIAFIHPDTPIIKALNIFVERRISALPVVDESGKVVDIYSKFDVINLAAEKTYNNLDITVTQALQHRSQYFEGVVKCNKLEILETIVDRIVRAEVHRLVVVNEADSIVGIISLSDILQALILTPAGAKQKETETE

SEQ ID NO: 116103 - DNA, 1335 bp, Artificial Sequence
  derived and/or modified sequence
atgaaacgtttcggctccttgagaagtaacaagaagcataaagaccagaaccggtcaacagagcgaagacagtccgagccccatgggcttttcgcctctgggttgtctagcagtccttctacacctacccaagttactaagcagcacacatttccgctggagtcctacaaacacgagccagaaaggctggagaacaggatttacgcatctagcagcccacccgatactgggcagcgattttgtccctcctcctttcagagccctacacgaccccccctggccagtccaacccattatgccccgtccaaagctgccgccctcgcagccgccctgggcccggcggaagcaggcatgctcgagaaactcgagttcgaggacgaggtggaggactccgaatccggtgtatacatgcgcttcatgcggtcccataaatgttatgatattgtaccaacgtcgtcaaagctggtcgtcttcgacacaacgttacaagtgaagaaggcctttttcgccttagtggccaatggagtcagagctgctccactttgggaatccaaaaagcagtccttcgtgggtatgttgacgatcacagattttatcaacattctccacaggtattataaatcacccatggtccaaatttatgagctcgaagagcacaaaatagaaacctggagagagctgtatctgcaggagacctttaagccactggttaatatcagccctgacgccagtctctttgacgctgtatactcattaatcaaaaacaagatccaccggttgcctgtgatagaccccatatcaggaaatgcactctatatccttacccacaaaagaatcctgaagtttctgcagctgtttatgtcagacatgccaaagcctgcattcatgaagcagaacctggacgaattgggaattggtacatatcacaatatcgctttcattcatccagatacccccattattaaggcactgaacatattcgttgagaggcgtataagtgcactgcctgtagtcgacgagagtgggaaagttgtcgacatatatagcaaattcgatgtgattaatttggccgctgagaagacctacaacaatctcgatatcaccgtaacccaggctctgcagcataggtcccagtattttgaaggtgtggttaagtgcaacaagctggaaatcctagagaccattgttgatagaatcgtgcgagctgaagtgcatcgtttagtggttgtgaatgaggctgacagcattgtgggaatcatctctcttagcgacatactccaggcattaattctgacaccggcaggggctaagcagaaagaaacagagacggagtag

SEQ ID NO: 116104 - DNA, 1335 bp, Artificial Sequence
  derived and/or modified sequence
atgaagcgcttcggcagcctgcggagcaacaagaagcacaaggaccagaacagaagcacagagcggcggcagagcgagccccacggcctgtttgccagcggcctgagcagcagccccagcacccccacccaggtgaccaagcagcacaccttccccctggagagctacaagcatgagcctgagcggctggagaaccgcatctatgccagcagcagccccccagacaccggccagcgcttctgccccagcagcttccagagccccaccaggcctcccctggccagccccacccactacgcccccagcaaggctgctgccctggccgccgccctgggccctgctgaggccggcatgctggagaagctggagtttgaagatgaggtggaggacagcgagagcggcgtgtacatgaggttcatgaggagccacaagtgctatgacatcgtgcccaccagcagcaagctggtggtgtttgacaccaccctgcaggtgaagaaggccttctttgccctggtggccaacggggtgcgggccgcccccctgtgggagagcaagaagcagagctttgtgggcatgctgaccatcacagacttcatcaacatcctgcaccgctactacaagagccccatggtgcagatctatgagctggaggagcacaagattgagacctggagggagctgtacctgcaggagaccttcaagcccctggtgaacatcagcccagatgccagcctgtttgatgctgtgtacagcctcatcaagaacaagatccaccggctgcctgtgattgaccccatctctggaaatgccctgtacatcctgacccacaagaggatcctgaagttcctgcagctgttcatgtctgacatgcccaagccagccttcatgaagcagaacctggatgagctgggcatcggcacctaccacaacatcgccttcatccacccagacacccccatcatcaaggccctgaacatctttgtggagcggcgcatcagcgccctgcctgtggtggatgaaagtggcaaggtggtggacatctacagcaagtttgatgtgatcaacctggccgctgagaagacctacaacaacctggacatcaccgtgacccaggccctgcagcacaggagccagtactttgagggcgtggtgaagtgcaacaagctggagatcctggagaccatcgtggacagaattgtgcgggcagaggtgcaccggctggtggtggtgaatgaagctgacagcatcgtgggcatcatcagcctgagtgacatcctgcaggccctgatcctgaccccagctggggccaagcagaaggagacagaaacagaatag

SEQ ID NO: 116105 - DNA, 1335 bp, Artificial Sequence
  derived and/or modified sequence
atgaagcggttcggcagcctgcggagcaacaagaagcacaaggaccagaacagaagcactgagaggagacagtcagagcctcacggattatttgcaagcggcctttctagctcgccaagcactccgacacaggtgaccaaacagcacacttttccactggagtcctataaacatgagcccgaaaggttggagaacaggatctatgcttcgtcctcgccaccggatacaggccaacgcttttgccccagtagctttcaatcccctactagacctccccttgcttcgcccactcattatgccccttctaaggccgctgcgctggccgccgccctgggacctgccgaggccggcatgcttgaaaagctggaattcgaggacgaggtggaggattcagaaagcggcgtgtacatgagattcatgaggtcacacaaatgttatgatattgtgccaacgagttctaagctcgtcgtattcgacacaaccctgcaggtgaagaaggccttcttcgcactggtggccaatggggtgcgcgcagcccctctatgggagtctaagaaacagagctttgtgggaatgcttaccattaccgatttcatcaatatcctgcacaggtactacaagagccctatggttcaaatatacgagctggaggagcacaaaattgagacctggcgtgaactgtatctgcaagaaacatttaagcccctggtaaatatctcacctgacgcttctctttttgatgcggtgtactccctgattaagaataaaattcacagactgcctgttatcgatcccatcagcgggaatgccctttacatccttacacataagcgaatccttaagttcttacagttattcatgagcgacatgccaaagccagcgtttatgaaacagaatctggacgagttggggattggcacctatcataacatagcctttatacacccagacactcccatcattaaagccctcaatattttcgtcgagcggcgaatctcagcccttccagtcgttgatgagagtggcaaggtggtggacatctactcaaaatttgatgtgatcaacttggccgcagaaaaaacttacaacaatctcgatatcaccgtgacccaggccctacagcaccgaagccaatattttgaaggagttgtgaagtgtaacaaactggagatccttgagaccatcgtggacagaatagtgcgagccgaggttcataggctggtcgtggttaacgaggccgactctatagtgggaattatcagcctttctgacatactgcaggcactgattttaacccctgccggcgcgaagcaaaaagaaactgaaaccgagtag

SEQ ID NO: 116106 - DNA, 1335 bp, Artificial Sequence
  derived and/or modified sequence
atgaagaggttcggttccctgcgctccaataagaaacacaaggaccaaaaccgaagcacagagcgccgtcagagcgagcctcatggcctgttcgctagcggactgtctagcagtccctccacacccactcaggtgaccaagcagcatacattcccactggaaagttataagcacgagcccgaacgtctggagaaccgcatatacgcttccagttcgcctcctgacaccggccagcgtttctgtccatcctcattccagtcccccacacgaccacctctggcatcccctacccactatgcaccgtccaaagcagcagctcttgccgctgctctcggacccgcagaagccggtatgctggaaaaactcgagttcgaggacgaggtagaggacagcgagtcgggcgtgtatatgaggtttatgaggtcgcacaagtgctatgatatagtacccacgagttccaagcttgtggtcttcgatactaccctacaggttaagaaggctttcttcgccctggtggccaacggcgtccgcgcagctcccctgtgggagtccaaaaagcagtcatttgtaggcatgctgaccatcacagactttataaacattctccatcgatattacaagtcccccatggttcaaatctacgaattagaggagcataaaattgagacttggcgggaactctacctccaagagacgtttaagcctctggtgaatatcagtccggatgcctctctttttgatgcagtgtacagtttaattaaaaacaagatccaccggctgccagtaattgatcccatctccggtaatgcactgtatatcctcacgcacaagcggatattgaagttcttacaactgttcatgagtgacatgccaaaacctgctttcatgaaacagaacctcgacgaactcggcatcggcacttatcacaatattgcgttcatccatcctgatacacccattattaaggccttgaatatcttcgtggaacgacgcatctctgcccttcccgtggttgacgagagtggcaaagttgtggatatatatagtaaatttgacgtgatcaatctggctgccgagaagacctataacaaccttgacattaccgtcacccaggcgttgcaacataggagccaatacttcgagggggtcgtcaaatgtaacaagttagaaattcttgagactatcgtggaccggatagtgagggccgaggtccaccggttggtggtcgtaaatgaggctgactccattgttggcataatctccttgtccgatattttgcaggccttgattctgacacctgccggagccaagcagaaggagaccgaaaccgagtag

SEQ ID NO: 116107 - DNA, 2645 bp, Artificial Sequence
  derived and/or modified sequence
gctgtggccggaggtgcagccccgtcaggacggctccactccctggcgcctcacagactctggggctgcggtgaggtcgccctgaagaccccctggtgaggacgcttgaacccgggctgtcacctgagcacaggctgccactctgagcttttggggcgccctgtgcctgtcgggctgatgctcctctggctcccggccacctggggctgacaccggttctgtgggtcctgatatgttcacctgtcgccactcctgtggccacagctacccatgaagcgctttgggagcctcaggagcaacaagaaacacaaggaccaaaatcgaagcacggagaggcgccagtcggagcctcatggccttttcgcctccggcctctcctcctctccgtcaacacccacccaagtgaccaagcagcacacgtttcccctggaatcctataagcacgagcctgaacggttagagaatcgcatctatgcctcgtcttcccccccggacacagggcagaggttctgcccgtcttccttccagagcccgaccaggcctccactggcatcaccgacacactatgctccctccaaagccgcggcgctggcggcggccctgggacccgcggaagccggcatgctggagaagctggagttcgaggacgaagtagaagactcagaaagtggtgtttacatgcgattcatgaggtcacacaagtgttatgacatcgttccaaccagttcaaagcttgttgtctttgatactacattacaagttaaaaaggccttctttgctttggtagccaacggtgtccgagcagcgccactgtgggagagtaaaaaacaaagttttgtaggaatgctaacaattacagatttcataaatatactacatagatactataaatcacctatggtacagatttatgaattagaggaacataaaattgaaacatggagggagctttatttacaagaaacatttaagcctttagtgaatatatctccagatgcaagcctcttcgatgctgtatactccttgatcaaaaataaaatccacagattgcccgttattgaccctatcagtgggaatgcactttatatacttacccacaaaagaatcctcaagttcctccagctttttatgtctgatatgccaaagcctgccttcatgaagcagaacctggatgagcttggaataggaacgtaccacaacattgccttcatacatccagacactcccatcatcaaagccttgaacatatttgtggaaagacgaatatcagctctgcctgttgtggatgagtcaggaaaagttgtagatatttattccaaatttgatgtaattaatcttgctgctgagaaaacatacaataacctagatatcacggtgacccaggcccttcagcaccgttcacagtattttgaaggtgttgtgaagtgcaataagctggaaatactggagaccatcgtggacagaatagtaagagctgaggtccatcggctggtggtggtaaatgaagcagatagtattgtgggtattatttccctgtcggacattctgcaagccctgatcctcacaccagcaggtgccaaacaaaaggagacagaaacggagtgaccgccgtgaatgtagacgccctaggaggagaacttgaacaaagtctctgggtcacgttttgcctcatgaacactggctgcaagtggttaagaatgtatatcagggtttaacaataggtatttcttccagtgatgttgaaattaagcttaaaaaagaaagattttatgtgcttgaagattcaggcttgcattaaaagactgttttcagacctttgtctgaaggattttaaatgctgtatgtcattaaagtgcactgtgtcctgaagttttcattatttttcatttcaaagaattcactggtatggaacaggtgatgtggcataaggtgagtgcacggtatgttcagatcacagtgccttatgtccgaatacagcaatatgtcaccgccgcagccggggcgcacgcgtgtgaaacaacaccgagcttgaatgtggaagtctttgaaccttttaccaaatcagtttgttttctttagatttgtcaaaaagttgtaatttgaatataaataattactttaaaattgtaatgacacttttacacgtaagtgttttgttctgggctaccgtgtcaacgaggctgctttacaacagctttatttatttttactttcatgcaatttttttacacatcttttggtggagtaaacttcaccacatccatgaataaactctcagttattttgaaatggcaaatttctcattatttaagtttggatctggaaaggacatgacttctgaaatagccgctgctgggttttaaaagctgaggtctctcaaagtgtggaggagacgttgccgtcaggcgggagccaagtgccgggaagatgtctattttttttcttgtgtattgaaatgtaaaatcatgatgtttgttatgactgctgatgcgattgtttttgtaaattttattgtggcatatacagtattgtcatacagttgaagagaaacaatgtttcctaatgtaagtgctctgaaaatgttgacactgtatatatatatatgaggatagtttgttttttttttgttttgggttttttttttt

SEQ ID NO: 116108 - DNA, 1335 bp, Artificial Sequence
  derived and/or modified sequence
atgaagagattcggcagcctgagaagcaacaagaagcacaaggaccagaacagaagcaccgagagaagacagagcgagccccacggcctgttcgccagcggcctgagcagcagccccagcacccccacccaggtgaccaagcagcacaccttccccctggagagctacaagcacgagcccgagagactggagaacagaatctacgccagcagcagcccccccgacaccggccagagattctgccccagcagcttccagagccccaccagaccccccctggccagccccacccactacgcccccagcaaggccgccgccctggccgccgccctgggccccgccgaggccggcatgctggagaagctggagttcgaggacgaggtggaggacagcgagagcggcgtgtacatgagattcatgagaagccacaagtgctacgacatcgtgcccaccagcagcaagctggtggtgttcgacaccaccctgcaggtgaagaaggccttcttcgccctggtggccaacggcgtgagagccgcccccctgtgggagagcaagaagcagagcttcgtgggcatgctgaccatcaccgacttcatcaacatcctgcacagatactacaagagccccatggtgcagatctacgagctggaggagcacaagatcgagacctggagagagctgtacctgcaggagaccttcaagcccctggtgaacatcagccccgacgccagcctgttcgacgccgtgtacagcctgatcaagaacaagatccacagactgcccgtgatcgaccccatcagcggcaacgccctgtacatcctgacccacaagagaatcctgaagttcctgcagctgttcatgagcgacatgcccaagcccgccttcatgaagcagaacctggacgagctgggcatcggcacctaccacaacatcgccttcatccaccccgacacccccatcatcaaggccctgaacatcttcgtggagagaagaatcagcgccctgcccgtggtggacgagagcggcaaggtggtggacatctacagcaagttcgacgtgatcaacctggccgccgagaagacctacaacaacctggacatcaccgtgacccaggccctgcagcacagaagccagtacttcgagggcgtggtgaagtgcaacaagctggagatcctggagaccatcgtggacagaatcgtgagagccgaggtgcacagactggtggtggtgaacgaggccgacagcatcgtgggcatcatcagcctgagcgacatcctgcaggccctgatcctgacccccgccggcgccaagcagaaggagaccgagaccgagtag

SEQ ID NO: 116109 - DNA, 987 bp, Artificial Sequence
  derived and/or modified sequence
atgttagagaagttagagtttgaggatgaagccgtggaggactcggagtccggggtgtatatgcgcttcatgcgctcccataagtgctatgatatcgttccaacaagctctaagctggtggtgttcgacaccacactgcaggtgaagaaggctttttttgccttggtggcgaacggggtgcgtgctgcaccgctctgggaatcaaagaaacaatcctttgtcggaatgctgaccatcaccgactttattaacattttgcacaggtattacaagtctccgatggtgcagatttacgaacttgaggagcacaagattgagacctggcgagaactctacctccaggaaacgtttaagccactggtgaacatttctcccgatgcttcactatttgatgctgtgtacagcctgatcaaaaataagatccaccggctgccagtgattgatcccatttcgggaaatgctctttacattttgacccacaagcgcatcttaaagttcctacagctgttcatgagtgacatgcctaaacctgccttcatgaaacagaatctggacgagttgggaatcggcacctaccacaacatagctttcatccacccagatacaccaataataaaggctctgaacatctttgttgagcggcgcatttccgcattaccagtcgtggacgagagcggaaaagtagtggatatctattcgaaattcgacgtaatcaacctggcagctgaaaagacttataacaacctggatatcaccgtcactcaggctttgcagcacaggagccaatattttgagggcgttgtgaagtgtaataaactagagatcctggagaccatagtcgaccggatagtccgagccgaggttcaccgactggtggtcgtaaatgaggcagactccattgttggcatcatcagtttgtccgacatcctgcaggcactaatcctgacccctgctggcgctaagcagaaggagaccgaaacagaatag

SEQ ID NO: 116110 - DNA, 987 bp, Artificial Sequence
  derived and/or modified sequence
atgctggagaagctggagtttgaagatgaagctgtggaggacagcgagagcggcgtgtacatgaggttcatgaggagccacaagtgctatgacatcgtgcccaccagcagcaagctggtggtgtttgacaccaccctgcaggtgaagaaggccttctttgccctggtggccaacggggtgcgggccgcccccctgtgggagagcaagaagcagagctttgtgggcatgctgaccatcacagacttcatcaacatcctgcaccgctactacaagagccccatggtgcagatctatgagctggaggagcacaagattgagacctggagggagctgtacctgcaggagaccttcaagcccctggtgaacatcagcccagatgccagcctgtttgatgctgtgtacagcctcatcaagaacaagatccaccggctgcctgtgattgaccccatctctggaaatgccctgtacatcctgacccacaagaggatcctgaagttcctgcagctgttcatgtctgacatgcccaagccagccttcatgaagcagaacctggatgagctgggcatcggcacctaccacaacatcgccttcatccacccagacacccccatcatcaaggccctgaacatctttgtggagcggcgcatcagcgccctgcctgtggtggatgaaagtggcaaggtggtggacatctacagcaagtttgatgtgatcaacctggccgctgagaagacctacaacaacctggacatcaccgtgacccaggccctgcagcacaggagccagtactttgagggcgtggtgaagtgcaacaagctggagatcctggagaccatcgtggacagaattgtgcgggcagaggtgcaccggctggtggtggtgaatgaagctgacagcatcgtgggcatcatcagcctgagtgacatcctgcaggccctgatcctgaccccagctggggccaagcagaaggagacagaaacagaatag

SEQ ID NO: 116111 - DNA, 987 bp, Artificial Sequence
  derived and/or modified sequence
atgctggagaagctggagttcgaggacgaggccgtggaggacagcgagtccggggtttatatgaggttcatgagaagccataagtgttatgacattgtccctacgtcgtccaagctggttgttttcgacacaacactccaggttaaaaaggccttctttgctctcgttgctaatggcgtgagagccgcccccttgtgggagtctaaaaagcagtcatttgtggggatgctcactataactgactttataaatatcctgcatagatattataagtcacccatggtgcagatatacgagcttgaggagcataaaatagagacctggcgcgaattgtatctccaagagactttcaagccgcttgtgaacattagccccgacgccagtctgttcgacgctgtctattccctgattaagaataaaatccacaggctgcccgtaatcgacccgatctctggaaatgctctctatattctgacacataagcggattctcaagttcctgcaactgttcatgagtgatatgccgaagcctgcctttatgaagcagaatcttgacgagctggggatcggtacctatcataatattgctttcatccacccagatacacccattatcaaggccctcaatatcttcgttgaaaggaggatttctgccctgcctgtcgttgacgagagtggtaaggtagtagacatttattccaagtttgacgttattaacctggccgccgagaagacctacaataatttggacatcacggttacacaagcgctccagcataggtcccagtacttcgagggtgtggttaagtgtaacaaacttgaaattcttgaaaccatcgtggatcgaattgtgcgggccgaggtgcacaggttagtggtggtgaatgaggccgactccattgtgggtattattagtctgagcgacattctacaggctctgatcttgaccccggctggggccaaacagaaggagaccgaaacagaatag

SEQ ID NO: 116112 - DNA, 987 bp, Artificial Sequence
  derived and/or modified sequence
atgctggagaagctcgagttcgaagacgaagccgtagaggactctgaaagtggcgtgtacatgcggttcatgcgaagccacaagtgctatgatatcgtccctacatcgagtaagctagttgtttttgacacaaccttgcaagtcaaaaaggcattctttgcactggtagctaacggcgtgagggctgcaccgctctgggagagtaagaagcagtctttcgtagggatgctcacgattaccgatttcattaacattctgcatcggtattacaaatcaccgatggtccaaatctatgaattggaagaacataaaatcgaaacttggcgcgaactgtatttgcaggagacattcaaaccgctagtgaacatttcgcccgatgcgtctctgttcgatgctgtctacagcttgataaagaacaagatccacaggctacctgtcatagatcccatcagcggaaacgctctatacatcttgacacacaagagaatcctcaagttcctgcaattgtttatgagcgatatgccaaaacctgcgttcatgaagcaaaacctcgacgagctcggcatcggaacatatcataacattgccttcatccatccagacacgcccattatcaaggccttgaatatctttgtcgaaagaagaatctctgctttacctgtcgtcgatgaatcaggaaaagtggtcgacatttatagcaagtttgatgtaattaacctggctgccgaaaagacctataacaacctggatatcaccgtgacccaagccctgcagcacagatctcaatactttgagggggttgtcaagtgtaacaaactggaaattttggagaccatcgtagacaggattgtcagggcagaggtgcacaggcttgttgtggtcaatgaggctgactccatcgtcggaattatttctctatctgatatactccaggctctcatcctaaccccagccggtgcgaagcagaaagagacagaaactgaatag

SEQ ID NO: 116113 - DNA, 2318 bp, Artificial Sequence
  derived and/or modified sequence
gcggccgcgccacctgcggcggcggcggcggcctcgggcgggtgggggcagcgctcccgctccgcccccggcccccgctgcccgcgtcccctgccaggcccctcctcccggcggcgcggcagagccaggccccagcgctcggccggccgcgagcccgccggccggggacgagcgtcgcagctcatgctgatcgctgtcctcctcctccccctcaggcggcgctggcggcggccctgggacccgcggaagccggcatgctggagaagctggagttcgaggacgaagcagtagaagactcagaaagtggtgtttacatgcgattcatgaggtcacacaagtgttatgacatcgttccaaccagttcaaagcttgttgtctttgatactacattacaagttaaaaaggccttctttgctttggtagccaacggtgtccgagcagcgccactgtgggagagtaaaaaacaaagttttgtaggaatgctaacaattacagatttcataaatatactacatagatactataaatcacctatggtacagatttatgaattagaggaacataaaattgaaacatggagggagctttatttacaagaaacatttaagcctttagtgaatatatctccagatgcaagcctcttcgatgctgtatactccttgatcaaaaataaaatccacagattgcccgttattgaccctatcagtgggaatgcactttatatacttacccacaaaagaatcctcaagttcctccagctttttatgtctgatatgccaaagcctgccttcatgaagcagaacctggatgagcttggaataggaacgtaccacaacattgccttcatacatccagacactcccatcatcaaagccttgaacatatttgtggaaagacgaatatcagctctgcctgttgtggatgagtcaggaaaagttgtagatatttattccaaatttgatgtaattaatcttgctgctgagaaaacatacaataacctagatatcacggtgacccaggcccttcagcaccgttcacagtattttgaaggtgttgtgaagtgcaataagctggaaatactggagaccatcgtggacagaatagtaagagctgaggtccatcggctggtggtggtaaatgaagcagatagtattgtgggtattatttccctgtcggacattctgcaagccctgatcctcacaccagcaggtgccaaacaaaaggagacagaaacggagtgaccgccgtgaatgtagacgccctaggaggagaacttgaacaaagtctctgggtcacgttttgcctcatgaacactggctgcaagtggttaagaatgtatatcagggtttaacaataggtatttcttccagtgatgttgaaattaagcttaaaaaagaaagattttatgtgcttgaagattcaggcttgcattaaaagactgttttcagacctttgtctgaaggattttaaatgctgtatgtcattaaagtgcactgtgtcctgaagttttcattatttttcatttcaaagaattcactggtatggaacaggtgatgtggcataaggtgagtgcacggtatgttcagatcacagtgccttatgtccgaatacagcaatatgtcaccgccgcagccggggcgcacgcgtgtgaaacaacaccgagcttgaatgtggaagtctttgaaccttttaccaaatcagtttgttttctttagatttgtcaaaaagttgtaatttgaatataaataattactttaaaattgtaatgacacttttacacgtaagtgttttgttctgggctaccgtgtcaacgaggctgctttacaacagctttatttatttttactttcatgcaatttttttacacatcttttggtggagtaaacttcaccacatccatgaataaactctcagttattttgaaatggcaaatttctcattatttaagtttggatctggaaaggacatgacttctgaaatagccgctgctgggttttaaaagctgaggtctctcaaagtgtggaggagacgttgccgtcaggcgggagccaagtgccgggaagatgtctattttttttcttgtgtattgaaatgtaaaatcatgatgtttgttatgactgctgatgcgattgtttttgtaaattttattgtggcatatacagtattgtcatacagttgaagagaaacaatgtttcctaatgtaagtgctctgaaaatgttgacactgtatatatatatatgaggatagtttgttttttttttgttttgggtttttttttttcagattgaaaaattaaaatagatcctactatctacca

SEQ ID NO: 116114 - DNA, 987 bp, Artificial Sequence
  derived and/or modified sequence
atgctggagaagctggagttcgaggacgaggccgtggaggacagcgagagcggcgtgtacatgagattcatgagaagccacaagtgctacgacatcgtgcccaccagcagcaagctggtggtgttcgacaccaccctgcaggtgaagaaggccttcttcgccctggtggccaacggcgtgagagccgcccccctgtgggagagcaagaagcagagcttcgtgggcatgctgaccatcaccgacttcatcaacatcctgcacagatactacaagagccccatggtgcagatctacgagctggaggagcacaagatcgagacctggagagagctgtacctgcaggagaccttcaagcccctggtgaacatcagccccgacgccagcctgttcgacgccgtgtacagcctgatcaagaacaagatccacagactgcccgtgatcgaccccatcagcggcaacgccctgtacatcctgacccacaagagaatcctgaagttcctgcagctgttcatgagcgacatgcccaagcccgccttcatgaagcagaacctggacgagctgggcatcggcacctaccacaacatcgccttcatccaccccgacacccccatcatcaaggccctgaacatcttcgtggagagaagaatcagcgccctgcccgtggtggacgagagcggcaaggtggtggacatctacagcaagttcgacgtgatcaacctggccgccgagaagacctacaacaacctggacatcaccgtgacccaggccctgcagcacagaagccagtacttcgagggcgtggtgaagtgcaacaagctggagatcctggagaccatcgtggacagaatcgtgagagccgaggtgcacagactggtggtggtgaacgaggccgacagcatcgtgggcatcatcagcctgagcgacatcctgcaggccctgatcctgacccccgccggcgccaagcagaaggagaccgagaccgagtag

SEQ ID NO: 116115 - protein, 197 aa, Artificial Sequence
  derived and/or modified sequence
MGCCTGRCSLICLCALQLVSALERQIFDFLGFQWAPILGNFLHIIVVILGLFGTIQYRPRYIMVYTVWTALWVTWNVFIICFYLEVGGLSKDTDLMTFNISVHRSWWREHGPGCVRRVLPPSAHGMMDDYTYVSVTGCIVDFQYLEVIHSAVQILLSLVGFVYACYVISISMEEEDTYSCDLQVCKHLFIQMLQIIE

SEQ ID NO: 116116 - protein, 161 aa, Artificial Sequence
  derived and/or modified sequence
MGCCTGRCSLICLCALQLVSWVFDRQIFLLSFQWAPILGNFLHIIVVILGLFGTIQYRPRYIMVYTVWTALWVTWNVFIICFYLEVGGLSKDTDLMTFNISVHRSWWREHGPGCVRRVLPPSAHGMMDDYTYVSVTGCIVDFQYLEVIHSAVQILLSIFFL

SEQ ID NO: 116117 - protein, 986 aa, Artificial Sequence
  derived and/or modified sequence
MAGIFYFALFSCLFGICDAVTGSRVYPANEVTLLDSRSVQGELGWIASPLEGGWEEVSIMDEKNTPIRTYQVCNVMEPSQNNWLRTDWITREGAQRVYIEIKFTLRDCNSLPGVMGTCKETFNLYYYESDNDKERFIRENQFVKIDTIAADESFTQVDIGDRIMKLNTEIRDVGPLSKKGFYLAFQDVGACIALVSVRVFYKKCPLTVRNLAQFPDTITGADTSSLVEVRGSCVNNSEEKDVPKMYCGADGEWLVPIGNCLCNAGHEERSGECQACKIGYYKALSTDATCAKCPPHSYSVWEGATSCTCDRGFFRADNDAASMPCTRPPSAPLNLISNVNETSVNLEWSSPQNTGGRQDISYNVVCKKCGAGDPSKCRPCGSGVHYTPQQNGLKTTKVSITDLLAHTNYTFEIWAVNGVSKYNPNPDQSVSVTVTTNQAAPSSIALVQAKEVTRYSVALAWLEPDRPNGVILEYEVKYYEKDQNERSYRIVRTAARNTDIKGLNPLTSYVFHVRARTAAGYGDFSEPLEVTTNTVPSRIIGDGANSTVLLVSVSGSVVLVVILIAAFVISRRRSKYSKAKQEADEEKHLNQGVRTYVDPFTYEDPNQAVREFAKEIDASCIKIEKVIGVGEFGEVCSGRLKVPGKREICVAIKTLKAGYTDKQRRDFLSEASIMGQFDHPNIIHLEGVVTKCKPVMIITEYMENGSLDAFLRKNDGRFTVIQLVGMLRGIGSGMKYLSDMSYVHRDLAARNILVNSNLVCKVSDFGMSRVLEDDPEAAYTTRGGKIPIRWTAPEAIAYRKFTSASDVWSYGIVMWEVMSYGERPYWDMSNQDVIKAIEEGYRLPPPMDCPIALHQLMLDCWQKERSDRPKFGQIVNMLDKLIRNPNSLKRTGTESSRPNTALLDPSSPEFSAVVSVGDWLQAIKMDRYKDNFTAAGYTTLEAVVHVNQEDLARIGITAITHQNKILSSVQAMRTQMQQMHGRMVPV

SEQ ID NO: 116118 - protein, 949 aa, Artificial Sequence
  derived and/or modified sequence
MAGIFYFALFSCLFGICDAVTGSRVYPANEVTLLDSRSVQGELGWIASPLEGGWEEVSIMDEKNTPIRTYQVCNVMEPSQNNWLRTDWITREGAQRVYIEIKFTLRDCNSLPGVMGTCKETFNLYYYESDNDKERFIRENQFVKIDTIAADESFTQVDIGDRIMKLNTEIRDVGPLSKKGFYLAFQDVGACIALVSVRVFYKKCPLTVRNLAQFPDTITGADTSSLVEVRGSCVNNSEEKDVPKMYCGADGEWLVPIGNCLCNAGHEERSGECQACKIGYYKALSTDATCAKCPPHSYSVWEGATSCTCDRGFFRADNDAASMPCTRPPSAPLNLISNVNETSVNLEWSSPQNTGGRQDISYNVVCKKCGAGDPSKCRPCGSGVHYTPQQNGLKTTKVSITDLLAHTNYTFEIWAVNGVSKYNPNPDQSVSVTVTTNQAAPSSIALVQAKEVTRYSVALAWLEPDRPNGVILEYEVKYYEKDQNERSYRIVRTAARNTDIKGLNPLTSYVFHVRARTAAGYGDFSEPLEVTTNTVPSRIIGDGANSTVLLVSVSGSVVLVVILIAAFVISRRRSKYSKAKQEADEEKHLNQGVRTYVDPFTYEDPNQAVREFAKEIDASCIKIEKVIGVGEFGEVCSGRLKVPGKREICVAIKTLKAGYTDKQRRDFLSEASIMGQFDHPNIIHLEGVVTKCKPVMIITEYMENGSLDAFLRKNDGRFTVIQLVGMLRGIGSGMKYLSDMSYVHRDLAARNILVNSNLVCKVSDFGMSRVLEDDPEAAYTTRGGKIPIRWTAPEAIAYRKFTSASDVWSYGIVMWEVMSYGERPYWDMSNQDVIKAIEEGYRLPPPMDCPIALHQLMLDCWQKERSDRPKFGQIVNMLDKLIRNPNSLKRTGTESSRPNTALLDPSSPEFSAVVSVGDWLQAIKMDRYKDNFTAAGYTTLEAVVHVNQE

SEQ ID NO: 116119 - protein, 91 aa, Artificial Sequence
  derived and/or modified sequence
MAGIFYFALFSCLFGICDAVTGSRVYPANEVTLLDSRSVQGELGWIASPLEGGWEEVSIMDEKNTPIRTYQVCNVMEPSQNNWLRTDWITR

SEQ ID NO: 116120 - protein, 149 aa, Artificial Sequence
  derived and/or modified sequence
MAGIFYFALFSCLFGICDAVTGSRVYPANEVTLLDSRSVQGELGWIASPLEGGWEEVSIMDEKNTPIRTYQVCNVMEPSQNNWLRTDWITREGAQRVYIEIKFTLRDCNSLPGVMGTCKETFNLYYYESDNDKERFIRENQFVKIDTIA

SEQ ID NO: 116121 - protein, 17 aa, Artificial Sequence
  derived and/or modified sequence
MAGIFYFLFSFLFGICD

SEQ ID NO: 116122 - DNA, 2961 bp, Artificial Sequence
  derived and/or modified sequence
atggccggcatcttctacttcgccctgttcagctgcctgttcggcatctgcgacgccgtgaccggcagcagagtgtaccccgccaacgaggtgaccctgctggacagcagaagcgtgcagggcgagctgggctggatcgccagccccctggagggcggctgggaggaggtgagcatcatggacgagaagaacacccccatcagaacctaccaggtgtgcaacgtgatggagcccagccagaacaactggctgagaaccgactggatcaccagagagggcgcccagagagtgtacatcgagatcaagttcaccctgagagactgcaacagcctgcccggcgtgatgggcacctgcaaggagaccttcaacctgtactactacgagagcgacaacgacaaggagagattcatcagagagaaccagttcgtgaagatcgacaccatcgccgccgacgagagcttcacccaggtggacatcggcgacagaatcatgaagctgaacaccgagatcagagacgtgggccccctgagcaagaagggcttctacctggccttccaggacgtgggcgcctgcatcgccctggtgagcgtgagagtgttctacaagaagtgccccctgaccgtgagaaacctggcccagttccccgacaccatcaccggcgccgacaccagcagcctggtggaggtgagaggcagctgcgtgaacaacagcgaggagaaggacgtgcccaagatgtactgcggcgccgacggcgagtggctggtgcccatcggcaactgcctgtgcaacgccggccacgaggagagaagcggcgagtgccaggcctgcaagatcggctactacaaggccctgagcaccgacgccacctgcgccaagtgccccccccacagctacagcgtgtgggagggcgccaccagctgcacctgcgacagaggcttcttcagagccgacaacgacgccgccagcatgccctgcaccagaccccccagcgcccccctgaacctgatcagcaacgtgaacgagaccagcgtgaacctggagtggagcagcccccagaacaccggcggcagacaggacatcagctacaacgtggtgtgcaagaagtgcggcgccggcgaccccagcaagtgcagaccctgcggcagcggcgtgcactacaccccccagcagaacggcctgaagaccaccaaggtgagcatcaccgacctgctggcccacaccaactacaccttcgagatctgggccgtgaacggcgtgagcaagtacaaccccaaccccgaccagagcgtgagcgtgaccgtgaccaccaaccaggccgcccccagcagcatcgccctggtgcaggccaaggaggtgaccagatacagcgtggccctggcctggctggagcccgacagacccaacggcgtgatcctggagtacgaggtgaagtactacgagaaggaccagaacgagagaagctacagaatcgtgagaaccgccgccagaaacaccgacatcaagggcctgaaccccctgaccagctacgtgttccacgtgagagccagaaccgccgccggctacggcgacttcagcgagcccctggaggtgaccaccaacaccgtgcccagcagaatcatcggcgacggcgccaacagcaccgtgctgctggtgagcgtgagcggcagcgtggtgctggtggtgatcctgatcgccgccttcgtgatcagcagaagaagaagcaagtacagcaaggccaagcaggaggccgacgaggagaagcacctgaaccagggcgtgagaacctacgtggaccccttcacctacgaggaccccaaccaggccgtgagagagttcgccaaggagatcgacgccagctgcatcaagatcgagaaggtgatcggcgtgggcgagttcggcgaggtgtgcagcggcagactgaaggtgcccggcaagagagagatctgcgtggccatcaagaccctgaaggccggctacaccgacaagcagagaagagacttcctgagcgaggccagcatcatgggccagttcgaccaccccaacatcatccacctggagggcgtggtgaccaagtgcaagcccgtgatgatcatcaccgagtacatggagaacggcagcctggacgccttcctgagaaagaacgacggcagattcaccgtgatccagctggtgggcatgctgagaggcatcggcagcggcatgaagtacctgagcgacatgagctacgtgcacagagacctggccgccagaaacatcctggtgaacagcaacctggtgtgcaaggtgagcgacttcggcatgagcagagtgctggaggacgaccccgaggccgcctacaccaccagaggcggcaagatccccatcagatggaccgcccccgaggccatcgcctacagaaagttcaccagcgccagcgacgtgtggagctacggcatcgtgatgtgggaggtgatgagctacggcgagagaccctactgggacatgagcaaccaggacgtgatcaaggccatcgaggagggctacagactgcccccccccatggactgccccatcgccctgcaccagctgatgctggactgctggcagaaggagagaagcgacagacccaagttcggccagatcgtgaacatgctggacaagctgatcagaaaccccaacagcctgaagagaaccggcaccgagagcagcagacccaacaccgccctgctggaccccagcagccccgagttcagcgccgtggtgagcgtgggcgactggctgcaggccatcaagatggacagatacaaggacaacttcaccgccgccggctacaccaccctggaggccgtggtgcacgtgaaccaggaggacctggccagaatcggcatcaccgccatcacccaccagaacaagatcctgagcagcgtgcaggccatgagaacccagatgcagcagatgcacggcagaatggtgcccgtgtag

SEQ ID NO: 116123 - DNA, 2850 bp, Artificial Sequence
  derived and/or modified sequence
atggccggcatcttctacttcgccctgttcagctgcctgttcggcatctgcgacgccgtgaccggcagcagagtgtaccccgccaacgaggtgaccctgctggacagcagaagcgtgcagggcgagctgggctggatcgccagccccctggagggcggctgggaggaggtgagcatcatggacgagaagaacacccccatcagaacctaccaggtgtgcaacgtgatggagcccagccagaacaactggctgagaaccgactggatcaccagagagggcgcccagagagtgtacatcgagatcaagttcaccctgagagactgcaacagcctgcccggcgtgatgggcacctgcaaggagaccttcaacctgtactactacgagagcgacaacgacaaggagagattcatcagagagaaccagttcgtgaagatcgacaccatcgccgccgacgagagcttcacccaggtggacatcggcgacagaatcatgaagctgaacaccgagatcagagacgtgggccccctgagcaagaagggcttctacctggccttccaggacgtgggcgcctgcatcgccctggtgagcgtgagagtgttctacaagaagtgccccctgaccgtgagaaacctggcccagttccccgacaccatcaccggcgccgacaccagcagcctggtggaggtgagaggcagctgcgtgaacaacagcgaggagaaggacgtgcccaagatgtactgcggcgccgacggcgagtggctggtgcccatcggcaactgcctgtgcaacgccggccacgaggagagaagcggcgagtgccaggcctgcaagatcggctactacaaggccctgagcaccgacgccacctgcgccaagtgccccccccacagctacagcgtgtgggagggcgccaccagctgcacctgcgacagaggcttcttcagagccgacaacgacgccgccagcatgccctgcaccagaccccccagcgcccccctgaacctgatcagcaacgtgaacgagaccagcgtgaacctggagtggagcagcccccagaacaccggcggcagacaggacatcagctacaacgtggtgtgcaagaagtgcggcgccggcgaccccagcaagtgcagaccctgcggcagcggcgtgcactacaccccccagcagaacggcctgaagaccaccaaggtgagcatcaccgacctgctggcccacaccaactacaccttcgagatctgggccgtgaacggcgtgagcaagtacaaccccaaccccgaccagagcgtgagcgtgaccgtgaccaccaaccaggccgcccccagcagcatcgccctggtgcaggccaaggaggtgaccagatacagcgtggccctggcctggctggagcccgacagacccaacggcgtgatcctggagtacgaggtgaagtactacgagaaggaccagaacgagagaagctacagaatcgtgagaaccgccgccagaaacaccgacatcaagggcctgaaccccctgaccagctacgtgttccacgtgagagccagaaccgccgccggctacggcgacttcagcgagcccctggaggtgaccaccaacaccgtgcccagcagaatcatcggcgacggcgccaacagcaccgtgctgctggtgagcgtgagcggcagcgtggtgctggtggtgatcctgatcgccgccttcgtgatcagcagaagaagaagcaagtacagcaaggccaagcaggaggccgacgaggagaagcacctgaaccagggcgtgagaacctacgtggaccccttcacctacgaggaccccaaccaggccgtgagagagttcgccaaggagatcgacgccagctgcatcaagatcgagaaggtgatcggcgtgggcgagttcggcgaggtgtgcagcggcagactgaaggtgcccggcaagagagagatctgcgtggccatcaagaccctgaaggccggctacaccgacaagcagagaagagacttcctgagcgaggccagcatcatgggccagttcgaccaccccaacatcatccacctggagggcgtggtgaccaagtgcaagcccgtgatgatcatcaccgagtacatggagaacggcagcctggacgccttcctgagaaagaacgacggcagattcaccgtgatccagctggtgggcatgctgagaggcatcggcagcggcatgaagtacctgagcgacatgagctacgtgcacagagacctggccgccagaaacatcctggtgaacagcaacctggtgtgcaaggtgagcgacttcggcatgagcagagtgctggaggacgaccccgaggccgcctacaccaccagaggcggcaagatccccatcagatggaccgcccccgaggccatcgcctacagaaagttcaccagcgccagcgacgtgtggagctacggcatcgtgatgtgggaggtgatgagctacggcgagagaccctactgggacatgagcaaccaggacgtgatcaaggccatcgaggagggctacagactgcccccccccatggactgccccatcgccctgcaccagctgatgctggactgctggcagaaggagagaagcgacagacccaagttcggccagatcgtgaacatgctggacaagctgatcagaaaccccaacagcctgaagagaaccggcaccgagagcagcagacccaacaccgccctgctggaccccagcagccccgagttcagcgccgtggtgagcgtgggcgactggctgcaggccatcaagatggacagatacaaggacaacttcaccgccgccggctacaccaccctggaggccgtggtgcacgtgaaccaggagtag

SEQ ID NO: 116124 - DNA, 6346 bp, Artificial Sequence
  derived and/or modified sequence
ctgggatagaagcggcaggagcagcgttggcaccggcgaaccatggctgggattttctatttcgccctattttcgtgtctcttcgggatttgcgacgctgtcacaggttccagggtataccccgcgaatgaagttaccttattggattccagatctgttcagggagaacttgggtggatagcaagccctctggaaggagggtgggaggaagtgagtatcatggatgaaaaaaatacaccaatccgaacctaccaagtgtgcaatgtgatggaacccagccagaataactggctacgaactgattggatcacccgagaaggggctcagagggtgtatattgagattaaattcaccttgagggactgcaatagtcttccgggcgtcatggggacttgcaaggagacgtttaacctgtactactatgaatcagacaacgacaaagagcgtttcatcagagagaaccagtttgtcaaaattgacaccattgctgctgatgagagcttcacccaagtggacattggtgacagaatcatgaagctgaacaccgagatccgggatgtagggccattaagcaaaaaggggttttacctggcttttcaggatgtgggggcctgcatcgccctggtatcagtccgtgtgttctataaaaagtgtccactcacagtccgcaatctggcccagtttcctgacaccatcacaggggctgatacgtcttccctggtggaagttcgaggctcctgtgtcaacaactcagaagagaaagatgtgccaaaaatgtactgtggggcagatggtgaatggctggtacccattggcaactgcctatgcaacgctgggcatgaggagcggagcggagaatgccaagcttgcaaaattggatattacaaggctctctccacggatgccacctgtgccaagtgcccaccccacagctactctgtctgggaaggagccacctcgtgcacctgtgaccgaggctttttcagagctgacaacgatgctgcctctatgccctgcacccgtccaccatctgctcccctgaacttgatttcaaatgtcaacgagacatctgtgaacttggaatggagtagccctcagaatacaggtggccgccaggacatttcctataatgtggtatgcaagaaatgtggagctggtgaccccagcaagtgccgaccctgtggaagtggggtccactacaccccacagcagaatggcttgaagaccaccaaagtctccatcactgacctcctagctcataccaattacacctttgaaatctgggctgtgaatggagtgtccaaatataaccctaacccagaccaatcagtttctgtcactgtgaccaccaaccaagcagcaccatcatccattgctttggtccaggctaaagaagtcacaagatacagtgtggcactggcttggctggaaccagatcggcccaatggggtaatcctggaatatgaagtcaagtattatgagaaggatcagaatgagcgaagctatcgtatagttcggacagctgccaggaacacagatatcaaaggcctgaaccctctcacttcctatgttttccacgtgcgagccaggacagcagctggctatggagacttcagtgagcccttggaggttacaaccaacacagtgccttcccggatcattggagatggggctaactccacagtccttctggtctctgtctcgggcagtgtggtgctggtggtaattctcattgcagcttttgtcatcagccggagacggagtaaatacagtaaagccaaacaagaagcggatgaagagaaacatttgaatcaaggtgtaagaacatatgtggacccctttacgtacgaagatcccaaccaagcagtgcgagagtttgccaaagaaattgacgcatcctgcattaagattgaaaaagttataggagttggtgaatttggtgaggtatgcagtgggcgtctcaaagtgcctggcaagagagagatctgtgtggctatcaagactctgaaagctggttatacagacaaacagaggagagacttcctgagtgaggccagcatcatgggacagtttgaccatccgaacatcattcacttggaaggcgtggtcactaaatgtaaaccagtaatgatcataacagagtacatggagaatggctccttggatgcattcctcaggaaaaatgatggcagatttacagtcattcagctggtgggcatgcttcgtggcattgggtctgggatgaagtatttatctgatatgagctatgtgcatcgtgatctggccgcacggaacatcctggtgaacagcaacttggtctgcaaagtgtctgattttggcatgtcccgagtgcttgaggatgatccggaagcagcttacaccaccaggggtggcaagattcctatccggtggactgcgccagaagcaattgcctatcgtaaattcacatcagcaagtgatgtatggagctatggaatcgttatgtgggaagtgatgtcgtacggggagaggccctattgggatatgtccaatcaagatgtgattaaagccattgaggaaggctatcggttaccccctccaatggactgccccattgcgctccaccagctgatgctagactgctggcagaaggagaggagcgacaggcctaaatttgggcagattgtcaacatgttggacaaactcatccgcaaccccaacagcttgaagaggacagggacggagagctccagacctaacactgccttgttggatccaagctcccctgaattctctgctgtggtatcagtgggcgattggctccaggccattaaaatggaccggtataaggataacttcacagctgctggttataccacactagaggctgtggtgcacgtgaaccaggaggacctggcaagaattggtatcacagccatcacgcaccagaataagattttgagcagtgtccaggcaatgcgaacccaaatgcagcagatgcacggcagaatggttcccgtctgagccagtactgaataaactcaaaactcttgaaattagtttacctcatccatgcactttaattgaagaactgcactttttttacttcgtcttcgccctctgaaattaaagaaatgaaaaaaaaaaacaatatctgcagcgttgcttggtgcacagattgctgaaactgtggggcttacagaaatgactgccggtcatttgaatgagacctggaacaaatcgtttctcagaagtacttttctgttcatcaccagtctgtaaaatacatgtacctatagaaatagaacactgcctctgagttttgatgctgtatttgctgccagacactgagcttctgagacatccctgattctctctccatttggaattacaaccattgtattttgtttgtggcataaattacagtcatctgtctttcactggaatgaagaccatgcctaggaacattttttaaggactcagctgtggcttttagggcttggttcataccatgggggaaaaaaaagtcctaggagaaagcgacgtggctcattagtgttgcctcttcagtgctcaagccgcctggtggattcctatgacacagggggcctggaaagaaagggaaagtggatttaaaatatatatatacgtaacccaagccccataacccctaactggacaaatgaggtctgtttctttgggcctgaggctgtgccatataaagtcttattttgggactttacaaacttgtcctaactatcttgtggatagtgggctgtgacaatctggaatagagaacgttcacacttcgctcctttaaagaagcgaccccagatctgcaagggagtagattctgctatcttggcctcacagcccttcctgttgattacaaagcccgtggaagaaaacagaacacaccctcctcagttccgtctaaatgtgtttcttctgcttcaattacaccagttctggggcaaagacactgatgaaacaacacccatacctgaaaagaataaatgtgtgactttcaaatcccctttcgcagtgaaagaaacagcaaacacttaagattcagcatctgttctccagttgcactgaggaatgcactgtctcgcagcaccagctctgcagagcccttgccccagactctttgcggttttatttatatgtatttccatatttcattcctgtgtgtcactgctgcattggtgtggcagcaagtgaccaaatgctacaggtcttactatggacaccaggtcaggtgcaaccacacaaaacaaagccagttccatgagctgcctatgatatgcattgcggaagtaacattttacccagggtgtgccattgcagtgatataaatatatttttttcttagactaaatatgagctgactatctcttttgatgtgtgtacataggtgtgagtgtgtctgtatgcgtgcctgtctgtgtgcgggtgtgtgtatgtgcgtagcctcatgcttaggactacccatgaatgttgtggaatgctacacctggagagttctggttttccaccagtttcaagatgaagaactacatgatacagtggacctggagaccatccccttggaaagacaacccagagatgttcagcatcctgtatctacacgcatcctgtatctacacgtgtattttgtagctgtcacactaaccttaataagaattctacagctttggacagaggcattttcaccttaatggtgaagtaatttaaaatataaatccattcaggtgacaacccatcatcaaaattacaaattttctgattgaactcatctgaatcatcagttccttgatggagagagagaaggagatggaatgtgtctggtaaccccaaatggagtacaagtagcctttgttttcctgcataaatggacttgttgaatgcgaacgaatatatgcaattcatatacttttggagatgaacgtagatatgtgtgtcagctttgagatggtgtgtcctggattaatactttgtctcccaatatcacagaaaaatacatgccagtgactcttgaggttaaggtagttgggatgaaatggcctcaggcaatttcacattccctaattacctggaaagttctacagtaattaatatgcagctaactcctgttgccctcacaagagcatcagccttctagaatcggagctccggagtgtgaagattcagtattgatatgatatgtataccaaactccagccaacttactgccatttttcataatctgagtggctgccttgcttatcctaagctgtggttgcagaaaccgtggccatttatataagctataacatcaaatcagggaaaaatgaggaaaaaaaatagattctgaaccatttattgttgaataagtagagaaaatcatcaataaatatttattacattctgacagggtgtgtggcattgtgttctatgccagagtgacaaagttgattcacccctttttggggaccttaatatattttttaagggatgtgcctatgcattgatgcctgaaaaatatgtataaagaaatgaggttgactcttctgagcagttcatcttttccagaggtaagggtaggaggccaacttcagggtctgggtctgagcccgtgggcaagccctggccgagtgagctccaatgctaactcatgtgccgatctctagagcagtgggaaactaccccgctgcaccaaatcaagtagcttcaccttgtgtatgcaggccccaagttattttttagcaatcttacgagtgaaatgttctggtgggttgaaaaacgttcttattttaaagaaaggttgtgctcgctacactgctggtgtgtgcattctgagacctcttgtattcaatctgtgaaggatatgtgtattaatccgtacacccgtatagcctcaatatttgtctgaagacacttaaattctgacccataaaggaaagttctagaagcaatattttcacttatttaacattctccaaacaacatcaagcattgatacacactgaagagtgcgtttattttttgtatcactctaagtatgttggaatatgcaaggactgtggttcaaattagaatgtataaggcatattataatttagttcatactgaataagaaattaacagaacattgttcggttcacacgttccaaactttgagtgatttctggagttagacatagattttctattttgttttaatttgtcaaggtatttttcttcccttcatgaactttaggtacacataacttatgtcatttatttatggtcttttatacctagtttgtaaaattgtaaaatagcaaactaaatgcaaagagtttgcatttgaaaataataaagtagttgccgtatacaaccctgc

SEQ ID NO: 116125 - DNA, 3454 bp, Artificial Sequence
  derived and/or modified sequence
agaagcggcaggagcagcgttggcaccggcgaaccatggctgggattttctatttcgccctattttcgtgtctcttcgggatttgcgacgctgtcacaggttccagggtataccccgcgaatgaagttaccttattggattccagatctgttcagggagaacttgggtggatagcaagccctctggaaggagggtgggaggaagtgagtatcatggatgaaaaaaatacaccaatccgaacctaccaagtgtgcaatgtgatggaacccagccagaataactggctacgaactgattggatcacccgagaaggggctcagagggtgtatattgagattaaattcaccttgagggactgcaatagtcttccgggcgtcatggggacttgcaaggagacgtttaacctgtactactatgaatcagacaacgacaaagagcgtttcatcagagagaaccagtttgtcaaaattgacaccattgctgctgatgagagcttcacccaagtggacattggtgacagaatcatgaagctgaacaccgagatccgggatgtagggccattaagcaaaaaggggttttacctggcttttcaggatgtgggggcctgcatcgccctggtatcagtccgtgtgttctataaaaagtgtccactcacagtccgcaatctggcccagtttcctgacaccatcacaggggctgatacgtcttccctggtggaagttcgaggctcctgtgtcaacaactcagaagagaaagatgtgccaaaaatgtactgtggggcagatggtgaatggctggtacccattggcaactgcctatgcaacgctgggcatgaggagcggagcggagaatgccaagcttgcaaaattggatattacaaggctctctccacggatgccacctgtgccaagtgcccaccccacagctactctgtctgggaaggagccacctcgtgcacctgtgaccgaggctttttcagagctgacaacgatgctgcctctatgccctgcacccgtccaccatctgctcccctgaacttgatttcaaatgtcaacgagacatctgtgaacttggaatggagtagccctcagaatacaggtggccgccaggacatttcctataatgtggtatgcaagaaatgtggagctggtgaccccagcaagtgccgaccctgtggaagtggggtccactacaccccacagcagaatggcttgaagaccaccaaagtctccatcactgacctcctagctcataccaattacacctttgaaatctgggctgtgaatggagtgtccaaatataaccctaacccagaccaatcagtttctgtcactgtgaccaccaaccaagcagcaccatcatccattgctttggtccaggctaaagaagtcacaagatacagtgtggcactggcttggctggaaccagatcggcccaatggggtaatcctggaatatgaagtcaagtattatgagaaggatcagaatgagcgaagctatcgtatagttcggacagctgccaggaacacagatatcaaaggcctgaaccctctcacttcctatgttttccacgtgcgagccaggacagcagctggctatggagacttcagtgagcccttggaggttacaaccaacacagtgccttcccggatcattggagatggggctaactccacagtccttctggtctctgtctcgggcagtgtggtgctggtggtaattctcattgcagcttttgtcatcagccggagacggagtaaatacagtaaagccaaacaagaagcggatgaagagaaacatttgaatcaaggtgtaagaacatatgtggacccctttacgtacgaagatcccaaccaagcagtgcgagagtttgccaaagaaattgacgcatcctgcattaagattgaaaaagttataggagttggtgaatttggtgaggtatgcagtgggcgtctcaaagtgcctggcaagagagagatctgtgtggctatcaagactctgaaagctggttatacagacaaacagaggagagacttcctgagtgaggccagcatcatgggacagtttgaccatccgaacatcattcacttggaaggcgtggtcactaaatgtaaaccagtaatgatcataacagagtacatggagaatggctccttggatgcattcctcaggaaaaatgatggcagatttacagtcattcagctggtgggcatgcttcgtggcattgggtctgggatgaagtatttatctgatatgagctatgtgcatcgtgatctggccgcacggaacatcctggtgaacagcaacttggtctgcaaagtgtctgattttggcatgtcccgagtgcttgaggatgatccggaagcagcttacaccaccaggggtggcaagattcctatccggtggactgcgccagaagcaattgcctatcgtaaattcacatcagcaagtgatgtatggagctatggaatcgttatgtgggaagtgatgtcgtacggggagaggccctattgggatatgtccaatcaagatgtgattaaagccattgaggaaggctatcggttaccccctccaatggactgccccattgcgctccaccagctgatgctagactgctggcagaaggagaggagcgacaggcctaaatttgggcagattgtcaacatgttggacaaactcatccgcaaccccaacagcttgaagaggacagggacggagagctccagacctaacactgccttgttggatccaagctcccctgaattctctgctgtggtatcagtgggcgattggctccaggccattaaaatggaccggtataaggataacttcacagctgctggttataccacactagaggctgtggtgcacgtgaaccaggagtaagtactcaacgatgtaacacgaaaggggacctggcaagaattggtatcacagccatcacgcaccagaataagattttgagcagtgtccaggcaatgcgaacccaaatgcagcagatgcacggcagaatggttcccgtctgagccagtactgaataaactcaaaactcttgaaattagtttacctcatccatgcactttaattgaagaactgcactttttttacttcgtcttcgccctctgaaattaaagaaatgaaaaaaaaaaacaatatctgcagcgttgcttggtgcacagattgctgaaactgtggggcttacagaaatgactgccggtcatttgaatgagacctggaacaaatcgtttctcagaagtacttttctgttcatcaccagtctgtaaaatacatgtacctatagaaatagaacactgcctctgagttttgatgctgtatttgctgccagacactgagcttctgagacatccctgattctctctccatttggaattacaaccattgtattttgtttgtggcataaattacagtcatctgtctttcactggaatgaagac

SEQ ID NO: 116126 - DNA, 3363 bp, Artificial Sequence
  derived and/or modified sequence
acgcgtgctcatcttgtgtaaaagtaaaagttgctcatgtcattagctcggctctgagtttgcatgagaaaccagcgcagctctcgagccacgggagaaaacacgatctgctgcggagcccagtgacctgaaactgtagcagtgactcgagacctgtcctctcctcgacgtcgccctataaccctcccgctttatttaggatccgcttttccgagagcagccactcaggcaacccccggaagaagcggcaggagcagcgttggcaccggcgaaccatggctgggattttctatttcgccctattttcgtgtctcttcgggatttgcgacgctgtcacaggttccagggtataccccgcgaatgaagttaccttattggattccagatctgttcagggagaacttgggtggatagcaagccctctggaaggagggtgggaggaagtgagtatcatggatgaaaaaaatacaccaatccgaacctaccaagtgtgcaatgtgatggaacccagccagaataactggctacgaactgattggatcacccgagaaggggctcagagggtgtatattgagattaaattcaccttgagggactgcaatagtcttccgggcgtcatggggacttgcaaggagacgtttaacctgtactactatgaatcagacaacgacaaagagcgtttcatcagagagaaccagtttgtcaaaattgacaccattgctgctgatgagagcttcacccaagtggacattggtgacagaatcatgaagctgaacaccgagatccgggatgtagggccattaagcaaaaaggggttttacctggcttttcaggatgtgggggcctgcatcgccctggtatcagtccgtgtgttctataaaaagtgtccactcacagtccgcaatctggcccagtttcctgacaccatcacaggggctgatacgtcttccctggtggaagttcgaggctcctgtgtcaacaactcagaagagaaagatgtgccaaaaatgtactgtggggcagatggtgaatggctggtacccattggcaactgcctatgcaacgctgggcatgaggagcggagcggagaatgccaagcttgcaaaattggatattacaaggctctctccacggatgccacctgtgccaagtgcccaccccacagctactctgtctgggaaggagccacctcgtgcacctgtgaccgaggctttttcagagctgacaacgatgctgcctctatgccctgcacccgtccaccatctgctcccctgaacttgatttcaaatgtcaacgagacatctgtgaacttggaatggagtagccctcagaatacaggtggccgccaggacatttcctataatgtggtatgcaagaaatgtggagctggtgaccccagcaagtgccgaccctgtggaagtggggtccactacaccccacagcagaatggcttgaagaccaccaaagtctccatcactgacctcctagctcataccaattacacctttgaaatctgggctgtgaatggagtgtccaaatataaccctaacccagaccaatcagtttctgtcactgtgaccaccaaccaagcagcaccatcatccattgctttggtccaggctaaagaagtcacaagatacagtgtggcactggcttggctggaaccagatcggcccaatggggtaatcctggaatatgaagtcaagtattatgagaaggatcagaatgagcgaagctatcgtatagttcggacagctgccaggaacacagatatcaaaggcctgaaccctctcacttcctatgttttccacgtgcgagccaggacagcagctggctatggagacttcagtgagcccttggaggttacaaccaacacagtgccttcccggatcattggagatggggctaactccacagtccttctggtctctgtctcgggcagtgtggtgctggtggtaattctcattgcagcttttgtcatcagccggagacggagtaaatacagtaaagccaaacaagaagcggatgaagagaaacatttgaatcaaggtgtaagaacatatgtggacccctttacgtacgaagatcccaaccaagcagtgcgagagtttgccaaagaaattgacgcatcctgcattaagattgaaaaagttataggagttggtgaatttggtgaggtatgcagtgggcgtctcaaagtgcctggcaagagagagatctgtgtggctatcaagactctgaaagctggttatacagacaaacagaggagagacttcctgagtgaggccagcatcatgggacagtttgaccatccgaacatcattcacttggaaggcgtggtcactaaatgtaaaccagtaatgatcataacagagtacatggagaatggctccttggatgcattcctcaggaaaaatgatggcagatttacagtcattcagctggtgggcatgcttcgtggcattgggtctgggatgaagtatttatctgatatgagctatgtgcatcgtgatctggccgcacggaacatcctggtgaacagcaacttggtctgcaaagtgtctgattttggcatgtcccgagtgcttgaggatgatccggaagcagcttacaccaccaggggtggcaagattcctatccggtggactgcgccagaagcaattgcctatcgtaaattcacatcagcaagtgatgtatggagctatggaatcgttatgtgggaagtgatgtcgtacggggagaggccctattgggatatgtccaatcaagatgtgattaaagccattgaggaaggctatcggttaccccctccaatggactgccccattgcgctccaccagctgatgctagactgctggcagaaggagaggagcgacaggcctaaatttgggcagattgtcaacatgttggacaaactcatccgcaaccccaacagcttgaagaggacagggacggagagctccagacctaacactgccttgttggatccaagctcccctgaattctctgctgtggtatcagtgggcgattggctccaggccattaaaatggaccggtataaggataacttcacagctgctggttataccacactagaggctgtggtgcacgtgaaccaggaggacctggcaagaattggtatcacagccatcacgcaccagaataagattttgagcagtgtccaggcaatgcgaacccaaatgcagcagatgcacggcagaatggttcccgtctgagccagtactgaataaactcaaaactcttgaaattagtttacctcatccatgcactttaattgaagaactgcactttttttacttcgtcttcgccctctgaaattaaagaaatgaaaaaaaaaaacaa

SEQ ID NO: 116127 - DNA, 2961 bp, Artificial Sequence
  derived and/or modified sequence
atggcaggcattttctacttcgcactcttctcctgtctcttcggcatctgcgacgccgtgaccggatctcgggtgtatccagcaaacgaagttactttgctcgattccaggtcagtacagggggaactcggatggattgcaagcccgttagagggcggatgggaggaggtcagcatcatggacgagaagaataccccaatccgcacctaccaggtttgtaacgtaatggagccctcccagaacaactggctgagaacagactggattacacgggagggagcccagcgggtatatattgagattaaatttactctgcgagattgcaacagcctgccgggggtcatgggtacatgcaaagaaaccttcaacctctattactacgagtcagataacgataaggaacgcttcattagggagaatcagtttgttaagattgatacgattgccgccgacgaatcattcacccaagtggacatcggcgataggatcatgaagcttaacactgagataagggatgtgggaccccttagcaaaaaggggttttacttggcattccaggacgtgggtgcttgtatcgccctagtaagcgtacgggttttctataagaagtgtcctctgaccgtgcgtaatcttgcacagtttccggataccataaccggagcagatactagctccctcgtggaggtcagggggagttgtgtcaataatagcgaagaaaaggacgttcccaaaatgtactgcggtgcagacggggagtggttagtgcctatcggcaattgtctgtgtaacgctggacacgaggaacgttccggtgagtgtcaggcctgcaagattgggtattacaaagctctcagcacggacgctacctgcgccaaatgccccccccactcctactctgtgtgggagggggctaccagctgtacatgtgatcgcgggttcttccgagctgacaatgacgctgcaagcatgccatgcacccgacctccctctgccccccttaacctgatcagcaacgttaatgaaacgagcgtgaatctcgaatggtcatcccctcagaacactggggggagacaggacatctcttataacgtggtgtgcaaaaagtgcggagccggggatccgtctaagtgcaggccctgtggttctggcgttcactacactccacagcagaacgggctgaaaaccaccaaggtgtcaatcacagacttgctagcacatactaattataccttcgagatttgggcagtaaacggagtctccaaatacaatccaaacccagatcagtctgtttcagtcaccgtgaccactaaccaggctgccccaagctctattgcactggtccaagcaaaggaagtgacaaggtatagcgtggccctggcctggcttgagccagacaggcctaatggtgttatactggaatatgaagttaagtactacgagaaagatcagaatgagcggagctaccgaattgtgaggaccgcagcccgcaacacagacatcaaggggctgaatccgcttactagctacgtgtttcatgtccgagctcggaccgcagctggttacggggacttctccgaacccctggaggtaactaccaatacggtgccgtccaggatcataggtgatggtgcaaactcaactgtgctgttagtgtcagtgagcggcagtgtagtgctggtggtgattctaatcgccgctttcgtgattagtaggcgacgttcaaaatactctaaagctaaacaggaggcagacgaggaaaagcatctaaaccagggtgtgcggacttatgtcgatccattcacttacgaagatcccaatcaggcagtgcgggagttcgcgaaagagattgacgcctcttgcattaagatcgagaaagtgatcggcgtgggggagtttggagaagtctgctctggcaggttgaaagtccccggtaagcgggagatctgtgtggcaatcaaaactttgaaagccggatacaccgataagcaacgccgcgacttcctgagcgaggcttcaattatgggccagtttgaccatcccaatattattcaccttgaaggtgtggttaccaagtgcaagcccgtgatgatcatcacagagtacatggagaacggaagtttagacgcttttctgagaaagaacgatggcagattcaccgtgatccagctggttggcatgttgcgcggaatagggagcggaatgaagtacttgagcgatatgtcctatgtacatcgtgacctggctgcccgaaacatcctcgtgaacagcaatttggtgtgtaaggtgtcagacttcggcatgagccgggtgctcgaggacgaccctgaggccgcttatacaacccgaggcggcaagattcccattcggtggacggcgcctgaggcaatagcataccgtaagtttacctcggcttcagacgtctggagctacggcattgtcatgtgggaggtgatgtcttacggcgagcgcccctattgggacatgtccaatcaggatgtcattaaagctatagaggaaggctacaggcttccaccccctatggactgtccaatcgccttgcaccagttaatgttagactgctggcaaaaagaacgatctgaccgcccgaagttcggtcagattgtgaatatgctcgataaactgattagaaacccaaattccttgaagcggaccgggaccgagtccagtaggcctaacaccgccctgctggatccttcatcaccagagttttcagcggttgtgagcgtcggagattggctacaggcgattaaaatggaccggtataaggacaacttcaccgctgcaggatataccacgctggaggcagtagtgcatgtaaaccaagaagacctggcccggatcggcatcacagctattactcaccagaataagattttatccagcgtgcaagcaatgaggacacagatgcagcagatgcacggacggatggtgcccgtgtag

SEQ ID NO: 116128 - DNA, 2850 bp, Artificial Sequence
  derived and/or modified sequence
atggccggcatcttttattttgccctgttcagctgcctgttcgggatttgtgatgcagtgaccggctcaagggtgtaccctgcaaacgaggtcaccctcctggattcccgtagcgtgcagggagaattgggatggatcgcctcccctttggaagggggttgggaagaggtgagcatcatggacgagaaaaatacgcctattcggacgtaccaggtttgcaacgttatggagcccagtcagaacaactggctgcgaaccgattggatcaccagggaaggtgcccagcgggtctacatagagatcaaatttactctgagggattgcaattctttaccaggcgttatgggcacctgcaaagagaccttcaacctgtattattacgaatctgacaatgataaggaacgcttcatccgagagaaccagtttgtcaagatcgataccattgccgctgacgagtcctttactcaggtggatatcggcgaccgaatcatgaagttgaatacagagatcagagatgtgggccctttgtccaagaaggggttctacctggcattccaggacgttggggcctgcattgccctggtgtctgttcgagtattttataagaagtgtcctctgaccgtccggaatcttgcccaatttccagataccatcacaggagccgacactagcagcctggtagaagtccggggctcgtgcgttaacaattctgaagaaaaagacgtcccaaagatgtattgcggagctgatggggaatggctggtacctattggaaactgtttgtgtaacgccggccacgaagagcggagcggcgagtgccaggcctgtaagattggttactataaggccctgtccacagatgcgacctgcgcaaaatgtcccccacactcatactcagtctgggagggggcaaccagttgtacctgcgaccgcggattctttagagccgacaatgacgcagcctccatgccttgtacacggcctccctcagcaccccttaatctaatctctaacgtcaacgaaacctccgtgaatcttgaatggtcctctccacagaatacaggcggacggcaggacatcagttacaacgtggtttgtaagaaatgtggagccggagacccatccaaatgcagaccatgcggatctggtgtccattataccccccagcaaaatggactcaaaaccaccaaagtgagtattaccgaccttctagctcacaccaactacacgttcgaaatctgggctgttaatggagttagcaaatataacccaaatcccgaccagtctgtcagtgtgactgtaaccaccaatcaagccgcaccatcatccatcgctctggtccaagcgaaggaggtcacaagatacagcgtcgccctagcctggctggagcctgacagaccaaatggggtgatcctggaatatgaggtcaaatactacgaaaaggaccaaaacgaacgatcataccgtattgtgagaaccgccgcccggaacaccgacattaagggcctaaaccccctcactagttatgtgtttcacgtgagggctcgcacggctgctggatacggagacttttccgagccccttgaggtcaccacgaacacagtgccctcaaggatcatcggcgacggagccaacagcacagttctcctagtaagtgtgtctgggagcgtggtcttggtagtgatccttattgccgctttcgtcatttcccgccgcaggtccaagtactctaaggcaaagcaggaggccgacgaagaaaaacacctgaatcaaggagttcgcacctatgtggatccatttacctacgaagatcccaatcaggccgtaagggaattcgccaaagaaattgacgccagttgtatcaagatcgaaaaggtgattggtgttggagagtttggggaagtttgctccggacgtctcaaggtgccaggtaaacgagaaatttgtgttgccatcaagactctgaaagccggatacaccgataaacagcggagggacttcctgtctgaggcaagcataatgggccaatttgatcatccaaacattatccacttggaaggcgtcgttacgaagtgtaaaccagttatgataatcacagagtatatggagaatggaagcctcgacgctttcctgcgaaagaacgacggcagattcaccgtgatccagctagttggtatgctccgcggaatcggttctggcatgaaatatctgtcggatatgtcctatgtccatcgggatctggcagccagaaacatactggtaaacagcaacttggtttgcaaagttagtgattttggcatgtctagggtgctggaggatgacccagaggctgcttacactacaagaggcgggaaaataccaattaggtggacagctccggaggccatcgcttaccgtaagttcaccagcgccagtgatgtctggtcctatggaattgtcatgtgggaggtgatgagttatggggaaaggccctattgggacatgagcaatcaagacgtgatcaaagctattgaagagggctaccggttgcctccccctatggactgtcccatcgccctgcatcaactcatgctggactgctggcagaaggagagatccgataggccgaagttcggtcagatagtcaacatgctggacaaacttatacgcaaccctaacagcctgaagcggaccggtacagaaagcagcaggccaaacacagcactcctcgacccatcctctcccgaattttccgctgtagtgtccgtcggggattggctgcaggcaatcaagatggaccgttacaaggacaactttaccgccgccggttatacaaccctagaagccgttgtccatgtcaatcaagagtag

SEQ ID NO: 116129 - DNA, 2961 bp, Artificial Sequence
  derived and/or modified sequence
atggccggaattttctacttcgccctgtttagctgtctgttcggcatttgcgacgctgtcaccggttcacgagtttatccagcaaacgaagtgacgttactggattcaagatcagtccagggcgaactgggatggatcgcctctccactggagggaggatgggaggaagtgtccattatggatgagaaaaacaccccaatcaggacgtatcaggtctgtaatgtcatggagccctctcagaacaactggctccgaaccgactggatcacccgggagggcgcccagcgcgtgtatatcgagataaagttcacccttcgcgactgcaattccctgcccggcgtgatgggaacctgcaaggaaacgtttaacctgtattattatgagagcgacaatgataaggagagatttataagggaaaatcagttcgtaaaaatcgatacgatagctgccgacgagagcttcactcaagtggacatcggcgaccggatcatgaagctgaacactgaaatccgcgacgtaggtccactaagtaaaaaaggtttctacttggcttttcaggacgtgggggcgtgcatcgccctcgtttccgtacgcgtcttctacaaaaaatgcccactgacagtccgaaatctcgcccagttccccgacaccatcaccggagccgacaccagttctctggtcgaggtacggggctcatgtgttaataactctgaagagaaggacgtcccaaagatgtactgcggggctgatggcgagtggcttgtgcctattggaaactgtctgtgcaatgccggccacgaggaacgttcgggcgagtgccaagcgtgtaagattggctattataaagctctcagcaccgatgcgacctgcgccaagtgccccccacattcctattcggtctgggagggcgctacctcctgcacgtgcgatcgggggtttttcagggcagataatgacgcagcctctatgccatgcaccaggcccccatctgctcccctgaacttaatctccaacgtaaacgaaacctcagtcaacctggaatggtcaagcccacagaatactggcggtaggcaggatatctcttacaacgtagtttgtaaaaaatgcggggccggggacccctctaaatgtaggccatgcggttcaggtgtgcactacactccacagcagaacgggttgaagacaaccaaggtgtctatcaccgatttgttagcacatacaaactacacatttgaaatctgggcagtaaacggagtgagcaagtataatcctaatcccgaccaatccgtatccgtaaccgtgaccacaaatcaagccgctcctagcagtattgcgttggtgcaagcaaaggaggttacccggtatagtgtggctctagcttggctcgagcccgatcgcccaaatggcgtaattcttgagtatgaagtaaaatattacgagaaggatcagaacgagcgcagctacagaatcgttcgaacggcggccaggaataccgatatcaagggccttaaccccctcacatcttatgtgttccatgtgcgcgcgaggaccgcggcagggtacggtgattttagcgaacccctggaagtgactactaataccgtgccatcccgcataattggcgacggtgccaactccacagtgctgttagtgagtgtgtctggttccgtggtcttggtggtgatccttatagccgcttttgtcatcagcaggagacgcagtaaatactctaaggcaaaacaggaagctgacgaagagaaacacctgaaccagggtgttcgaacatacgtggatcctttcacatacgaagatccaaaccaggccgtcagggagttcgctaaggagatcgatgcctcttgcattaagattgagaaagtgatcggtgtgggagaatttggggaggtatgttccggcaggctcaaggtccctgggaagagggagatttgcgtagcaatcaaaaccttaaaggccggttatacagacaagcagaggagggacttcctgagcgaagcctccatcatgggccagtttgatcatcctaatataatccatctggaaggtgtggtcacaaagtgtaagccagtaatgattatcacagagtatatggaaaatggttcactggacgcctttctcagaaaaaacgatgggcggttcacagtgatccagcttgtgggcatgttgaggggtattgggtcgggaatgaaatacctgtccgacatgtcctacgtgcaccgggacctggccgccaggaatattcttgtgaacagtaacttggtgtgtaaggtttccgacttcggaatgtcaagggtcctcgaggatgacccagaggccgcatacacaacacgaggaggcaaaatcccaatcagatggacggccccagaagccatagcttatcgtaagtttacgagcgcgagcgacgtgtggtcctatggcatcgtcatgtgggaggttatgagttatggggaaaggccatactgggacatgtcaaaccaggatgttattaaggccatcgaggaggggtatcggttgccaccacctatggactgcccaatcgctcttcaccagctgatgctcgactgctggcagaaggagagatctgataggccaaaattcggccagatagttaatatgcttgataagttaattaggaatccaaacagccttaagcgcaccggaacagagtcaagtcgcccaaacacagccctgctcgaccctagttctcccgagttttccgccgtggttagcgtgggtgactggctgcaagctatcaaaatggatcgctataaagacaactttactgctgcaggttacaccacccttgaagccgtggtccacgttaatcaggaagatcttgctagaattggcataacagcaatcacccatcagaataagattctttcttcggtgcaggcaatgaggacccagatgcagcagatgcacgggcgaatggtgccggtgtag

SEQ ID NO: 116130 - DNA, 2961 bp, Artificial Sequence
  derived and/or modified sequence
atggccggcatcttctactttgccctcttcagctgcctgtttggcatctgtgatgctgtgacaggcagccgggtgtacccagccaatgaggtgaccctgctggacagccgctctgtgcagggcgagctgggctggatcgccagccccctggagggcggctgggaggaggtgtccatcatggatgagaagaacacccccatccgcacctaccaggtgtgcaatgtgatggagcccagccagaacaactggctgaggacagactggatcacccgggagggcgcccagagggtgtacatcgagatcaagttcaccctgcgggactgcaacagcctgcccggggtgatgggcacctgcaaggagaccttcaacctgtactactatgaaagtgacaatgacaaggagcgcttcatccgggagaaccagtttgtgaagattgacaccatcgccgcagatgagagcttcacccaggtggacattggagaccgcatcatgaagctgaacacagagatcagagatgtgggccccctgagcaagaagggcttctacctggccttccaggatgtgggcgcctgcatcgccctggtgtctgtgcgggtcttctacaagaagtgccccctgactgtgaggaacctggcccagttcccagacaccatcactggagctgacaccagcagcctggtggaggtgcggggcagctgtgtgaacaacagcgaggagaaggatgtgcccaagatgtactgtggggctgatggagagtggctggtgcccatcggcaactgcctgtgcaatgccggccacgaggagaggtctggagagtgccaggcctgcaagattggctactacaaggccctgagcacagatgccacctgtgccaagtgccccccccacagctacagcgtgtgggagggcgccaccagctgcacctgtgaccggggcttcttccgggctgacaatgatgctgcctccatgccctgcacccggccccccagcgcccccctgaacctgatcagcaatgtgaatgagacctctgtgaacctggagtggagcagcccccagaacacaggaggccggcaggacatctcctacaacgtggtgtgcaagaagtgtggggccggggaccccagcaagtgccggccctgtggcagcggcgtgcactacaccccccagcagaatggcctgaagaccaccaaggtgtccatcacagacctgctggcccacaccaactacacctttgagatctgggccgtgaatggagtgtccaagtacaaccccaacccagaccagagcgtgtctgtgacagtgaccaccaaccaggccgcccccagcagcatcgccctggtgcaggccaaggaggtgacccgctacagcgtggccctggcctggctggagccagaccggcccaacggggtcatcctggagtatgaggtgaagtactatgagaaggaccagaatgaaagaagctaccgcatcgtgaggacagctgccaggaacacagacatcaagggcctgaaccccctgaccagctatgtgttccacgtgcgggccaggacagctgctggctatggagacttcagcgagcccctggaggtgaccaccaacacagtgcccagccgcatcattggagatggagccaacagcacagtgctgctggtgtctgtgtctggctctgtggtgctggtggtgatcctgattgctgcctttgtgatcagcagaagaagaagcaagtacagcaaggccaagcaggaggctgatgaggagaagcacctgaaccagggcgtgaggacctacgtggaccccttcacctatgaggaccccaaccaggccgtgcgggagtttgccaaggagattgatgccagctgcatcaagattgagaaggtgattggagtgggggagtttggagaggtgtgcagcggccgcctgaaggtgcctgggaagcgggagatctgtgtggccatcaagaccctgaaggccggctacacagacaagcagaggcgggacttcctgtctgaggccagcatcatgggccagtttgaccaccccaacatcatccacctggagggcgtggtgaccaagtgcaagcctgtgatgatcatcacagagtacatggagaatggcagcctggatgccttcctgaggaagaatgatggccgcttcaccgtcatccagctggtgggcatgctgcggggcatcggcagcggcatgaagtacctgagtgacatgtcctatgtgcaccgggacctggccgccaggaacatcctggtgaacagcaacctggtgtgcaaggtgtctgactttggcatgagccgggtgctggaggatgatcctgaggccgcctacaccacccggggcggcaagatccccatccgctggacagcccctgaggccatcgcctacaggaagttcaccagcgccagtgatgtgtggagctatggcatcgtgatgtgggaggtgatgtcctatggagagcggccctactgggacatgagcaaccaggacgtcatcaaggccatcgaggagggctaccgcctgcccccacccatggactgccccatcgccctgcaccagctgatgctggactgctggcagaaggagaggagtgaccggcccaagtttggccagatcgtgaacatgctggacaagctgatccggaaccccaacagcctgaagaggactggaacagagagcagccggcccaacacagccctgctggaccccagcagccctgagttctctgctgtggtgtctgtgggggactggctgcaggccatcaagatggaccgctacaaggacaacttcaccgctgctggctacaccaccctggaggccgtggtgcacgtgaaccaggaggacctggcccgcatcggcatcacagccatcacccaccagaacaagatcctgagctctgtgcaggccatgaggacccagatgcagcagatgcacggccgcatggtgcctgtgtag

SEQ ID NO: 116131 - DNA, 2850 bp, Artificial Sequence
  derived and/or modified sequence
atggccggcatcttctactttgccctcttcagctgcctgtttggcatctgtgatgctgtgacaggcagccgggtgtacccagccaatgaggtgaccctgctggacagccgctctgtgcagggcgagctgggctggatcgccagccccctggagggcggctgggaggaggtgtccatcatggatgagaagaacacccccatccgcacctaccaggtgtgcaatgtgatggagcccagccagaacaactggctgaggacagactggatcacccgggagggcgcccagagggtgtacatcgagatcaagttcaccctgcgggactgcaacagcctgcccggggtgatgggcacctgcaaggagaccttcaacctgtactactatgaaagtgacaatgacaaggagcgcttcatccgggagaaccagtttgtgaagattgacaccatcgccgcagatgagagcttcacccaggtggacattggagaccgcatcatgaagctgaacacagagatcagagatgtgggccccctgagcaagaagggcttctacctggccttccaggatgtgggcgcctgcatcgccctggtgtctgtgcgggtcttctacaagaagtgccccctgactgtgaggaacctggcccagttcccagacaccatcactggagctgacaccagcagcctggtggaggtgcggggcagctgtgtgaacaacagcgaggagaaggatgtgcccaagatgtactgtggggctgatggagagtggctggtgcccatcggcaactgcctgtgcaatgccggccacgaggagaggtctggagagtgccaggcctgcaagattggctactacaaggccctgagcacagatgccacctgtgccaagtgccccccccacagctacagcgtgtgggagggcgccaccagctgcacctgtgaccggggcttcttccgggctgacaatgatgctgcctccatgccctgcacccggccccccagcgcccccctgaacctgatcagcaatgtgaatgagacctctgtgaacctggagtggagcagcccccagaacacaggaggccggcaggacatctcctacaacgtggtgtgcaagaagtgtggggccggggaccccagcaagtgccggccctgtggcagcggcgtgcactacaccccccagcagaatggcctgaagaccaccaaggtgtccatcacagacctgctggcccacaccaactacacctttgagatctgggccgtgaatggagtgtccaagtacaaccccaacccagaccagagcgtgtctgtgacagtgaccaccaaccaggccgcccccagcagcatcgccctggtgcaggccaaggaggtgacccgctacagcgtggccctggcctggctggagccagaccggcccaacggggtcatcctggagtatgaggtgaagtactatgagaaggaccagaatgaaagaagctaccgcatcgtgaggacagctgccaggaacacagacatcaagggcctgaaccccctgaccagctatgtgttccacgtgcgggccaggacagctgctggctatggagacttcagcgagcccctggaggtgaccaccaacacagtgcccagccgcatcattggagatggagccaacagcacagtgctgctggtgtctgtgtctggctctgtggtgctggtggtgatcctgattgctgcctttgtgatcagcagaagaagaagcaagtacagcaaggccaagcaggaggctgatgaggagaagcacctgaaccagggcgtgaggacctacgtggaccccttcacctatgaggaccccaaccaggccgtgcgggagtttgccaaggagattgatgccagctgcatcaagattgagaaggtgattggagtgggggagtttggagaggtgtgcagcggccgcctgaaggtgcctgggaagcgggagatctgtgtggccatcaagaccctgaaggccggctacacagacaagcagaggcgggacttcctgtctgaggccagcatcatgggccagtttgaccaccccaacatcatccacctggagggcgtggtgaccaagtgcaagcctgtgatgatcatcacagagtacatggagaatggcagcctggatgccttcctgaggaagaatgatggccgcttcaccgtcatccagctggtgggcatgctgcggggcatcggcagcggcatgaagtacctgagtgacatgtcctatgtgcaccgggacctggccgccaggaacatcctggtgaacagcaacctggtgtgcaaggtgtctgactttggcatgagccgggtgctggaggatgatcctgaggccgcctacaccacccggggcggcaagatccccatccgctggacagcccctgaggccatcgcctacaggaagttcaccagcgccagtgatgtgtggagctatggcatcgtgatgtgggaggtgatgtcctatggagagcggccctactgggacatgagcaaccaggacgtcatcaaggccatcgaggagggctaccgcctgcccccacccatggactgccccatcgccctgcaccagctgatgctggactgctggcagaaggagaggagtgaccggcccaagtttggccagatcgtgaacatgctggacaagctgatccggaaccccaacagcctgaagaggactggaacagagagcagccggcccaacacagccctgctggaccccagcagccctgagttctctgctgtggtgtctgtgggggactggctgcaggccatcaagatggaccgctacaaggacaacttcaccgctgctggctacaccaccctggaggccgtggtgcacgtgaaccaggagtag

SEQ ID NO: 116132 - DNA, 2961 bp, Artificial Sequence
  derived and/or modified sequence
atggccggcatcttctacttcgccctgttcagctgcctgttcggcatttgtgacgcagtgacgggatcccgggtttatcctgccaatgaggttaccctcttggacagccggtcggtgcagggcgagcttggatggatcgcttcacccttggaaggcggctgggaggaagtgagcatcatggacgaaaaaaacactccaatcagaacctaccaagtgtgtaatgtgatggaaccatcccagaacaactggcttagaacagattggatcacgagggaaggtgcccagcgagtttacatagaaattaaattcactctccgggattgtaacagcctgcccggtgtgatgggtacctgcaaggagacattcaatttgtactactatgaaagcgataacgataaggagcgcttcattagggaaaaccaattcgtgaagatagacaccattgcagccgacgaatctttcacgcaagtggatataggtgatcgaatcatgaagctgaataccgaaatcagagatgtgggccccctgtctaagaagggattttaccttgcttttcaggatgtcggcgcatgcatcgccctggtgtcagtgagagtgttttataaaaagtgtcctctgacagtcagaaaccttgcacagttcccggacaccatcacgggggctgacacatccagtctggtcgaggtgaggggtagctgcgtgaataactctgaagagaaagatgtccccaaaatgtattgcggcgccgatggggagtggctggtaccaataggcaattgtctgtgtaatgcgggccacgaagaaagatcaggggaatgccaagcctgtaaaatcggatactataaggcactctccacagatgcaacatgtgctaagtgcccaccccactcatacagcgtttgggaaggagccacgtcctgcacatgcgatcggggattctttagggccgataatgacgccgctagtatgccttgcacgagacccccctccgctccactgaacctgatctcaaatgtcaatgagacctctgtgaacctcgagtggagctccccccaaaacaccggcggccgccaagacatatcatacaatgttgtgtgcaagaaatgtggggccggggaccccagtaaatgccgcccctgtggtagtggggttcactatactcctcagcagaatggtttgaaaaccaccaaagtgtctatcacagatctactcgcccacacgaattatacctttgaaatctgggctgtcaacggcgtgagtaagtacaaccctaatccagatcagagtgtgtctgtgactgtcactactaaccaggctgctcccagttctatcgccctcgtgcaggcaaaggaggtaacgcgatactcggtggcgctggcttggctcgagccagatcgtcccaatggtgtcatcctggagtatgaagttaaatattacgaaaaggatcaaaacgagagaagctacaggattgttcgaactgcagctcgaaacacagatatcaagggcctgaacccactaacgtcatacgtgttccacgtccgagcaagaacagccgctgggtacggcgatttttccgagcctttggaggtcaccactaacaccgtgccatctcgtatcattggggacggggccaacagcacagtcttactggtgtccgtgtcaggcagtgtagtcttagttgtcattctcattgcagcttttgtgatctcccgcaggcggagtaaatactctaaggccaagcaggaggccgatgaagagaagcatctgaatcagggcgttcgcacttatgtcgaccccttcacttatgaggacccgaatcaggccgtacgggagtttgccaaagagatcgatgcgtcttgtatcaagattgagaaagtgattggcgtcggagagttcggggaggtgtgctcaggtagactaaaggtgccaggtaagagagagatctgtgtggctattaagaccctgaaagccggctataccgacaaacagcgtagggattttctgagtgaagcgtctatcatgggtcagtttgaccaccctaatattattcaccttgagggggtcgtgacaaagtgtaaacccgttatgataattactgagtacatggagaatggaagcttggatgctttcctccggaaaaatgacggcaggttcactgttatccagctagtgggtatgctacgaggaattggctccgggatgaaatacctttccgatatgtcatatgtgcatcgcgacctggctgccaggaatattttggtgaactctaatctcgtttgtaaggtgtccgactttggcatgagcagagtgctagaagacgacccagaggcggcttacacaacacggggcggcaaaatcccaatcaggtggacagcccccgaggccatagcttacaggaagtttactagtgcctcagacgtctggtcatatggcatcgtcatgtgggaagtcatgagctatggagagagaccctactgggatatgtccaaccaggatgtcatcaaggccattgaggaaggctacagactgccccctcctatggattgcccaatcgctctgcaccaattgatgttagattgctggcagaaagagaggtccgatcgtcctaagttcggtcagatagtgaatatgctcgataagctaatacggaatcctaattcactgaaacggacaggcactgaaagcagccgccctaacaccgcgcttctggacccctctagtccggagttctcagccgttgtctcggtgggcgattggttgcaggcgattaagatggacaggtataaagacaactttacggcagcaggctataccacactggaggccgtagttcatgtgaaccaggaggacctggcacgcatcggtatcaccgcaatcactcaccagaataaaatcctctcatcagtgcaggctatgaggacccagatgcaacaaatgcatggccggatggtgccagtgtag

SEQ ID NO: 116133 - DNA, 2850 bp, Artificial Sequence
  derived and/or modified sequence
atggccggcatcttctacttcgccctgttcagctgcctgttcggcatctgcgacgccgtgacaggatccagagtctaccctgcaaacgaagttacactcttggacagccggtcagttcagggcgaacttgggtggattgccagccccctggagggcggatgggaagaggtgtcaatcatggatgaaaaaaacacccccatcaggacatatcaggtctgtaacgtcatggagccctctcagaataattggctgaggaccgattggattaccagagaaggtgcccagagggtctacattgagataaagtttaccctcagggactgcaacagcctcccaggcgttatgggtacatgcaaggagacctttaacctgtattactatgaatcagacaacgacaaggagagatttattcgggaaaatcagttcgtcaagatagacaccatagccgccgatgagtcttttactcaggttgatatcggcgaccgaattatgaagctaaacaccgagattagggatgtcggtcccctgtcgaaaaaggggttctacctcgcatttcaggacgtgggggcctgtattgccttagtgagtgttcgagtattctacaagaaatgccctcttaccgtgcgcaatctggctcaattccccgacaccatcaccggagctgatactagcagtttggtggaagtgcgcggatcctgcgtaaacaattcagaagaaaaggatgtccctaaaatgtattgcggcgcagacggagaatggctggtaccaataggaaattgtctctgcaatgcgggacatgaggagagaagcggggaatgccaagcctgcaagatcggctactataaggcactgtctaccgacgcaacttgcgctaaatgccctcctcattcctactctgtttgggagggcgctaccagctgcacttgtgatcgagggttcttccgggctgataacgatgccgcctccatgccatgcactagacccccgagcgcacccttaaacctcatttctaatgtgaacgagacctctgtcaatctggagtggtcctccccccaaaacaccggcggacgccaggatatttcttataacgtagtatgtaaaaaatgcggcgccggggatccaagcaaatgtcgcccgtgcgggtccggagttcattatacccctcaacagaatgggctcaaaacgaccaaggtcagcataaccgatctgctagcacatactaactacacctttgaaatatgggctgtgaatggcgtcagtaagtacaaccctaaccctgaccagagtgtcagcgtgactgttacaacaaatcaagcagcaccaagctcaattgcactggtgcaggccaaggaggtcaccaggtactccgtggccctcgcatggcttgagcccgatcgtcccaatggtgtcatcctagagtatgaggtgaaatattatgaaaaggatcagaacgaacgctcataccgcatcgtgcgcacagcagccagaaataccgatatcaagggcttgaatcccttgacaagctatgtctttcatgttcgggctagaactgcagccggatatggcgactttagtgagccgttggaggtgactacgaacactgtgccctccaggatcatcggcgatggggcgaactccaccgtgctgcttgtatccgtgtccggatccgttgttttggtggtgatactgattgctgctttcgtcataagccgaaggaggtcaaaatatagcaaggcaaaacaagaagccgatgaagagaagcatctgaatcaaggtgtgcgcacgtatgtcgaccccttcacttacgaagatccaaatcaggcggtcagagaattcgctaaagagatcgacgccagttgtatcaagatcgagaaggtgatcggtgtgggtgagttcggagaggtgtgtagtgggcggctgaaggtccctggcaagcgagaaatttgcgtagcaatcaaaaccttgaaagcaggatacactgacaagcagagacgcgatttcctcagcgaagccagcataatggggcagtttgatcatcctaacataatccacctcgaaggcgtcgtcaccaaatgtaaacctgttatgatcataacagaatatatggagaatggaagcttggacgcgtttctaagaaaaaatgacggtcgatttactgtgatacaactggtgggaatgctgcgcgggatagggagcggtatgaagtatctcagtgatatgtcttacgtgcacagagacctggccgccaggaatattctcgtaaactctaacctcgtctgcaaggtctcggattttggcatgtcccgtgtcctcgaagatgaccctgaggctgcctacactactcgtggtggaaagatcccgattcgatggacagcacctgaggcaattgcctatcgaaagtttacaagtgcatccgatgtttggtcctacggtattgttatgtgggaagtgatgtcttacggagagcgaccttattgggacatgtcaaatcaggacgtcatcaaggccatcgaggaagggtacagactccctccaccgatggactgccccattgcactgcatcagctgatgctcgactgctggcagaaagagaggtcggatagaccaaaattcgggcaaatcgtcaatatgctagataaattgatccgaaaccccaattcactcaagcgcacaggcaccgaatctagcagacccaacacggctctgctggatccttcaagtcctgagttttctgctgtcgtgagtgtgggcgattggctgcaggccatcaagatggaccgttataaagacaacttcaccgccgctgggtacaccacactggaggccgttgtccacgtcaaccaggagtag

SEQ ID NO: 116134 - DNA, 2961 bp, Artificial Sequence
  derived and/or modified sequence
atggccggcatcttctacttcgccctgttcagctgcctgttcggcatttgtgacgcagtgactggctcacgagtataccccgcaaacgaggttaccttacttgattctagaagtgttcagggcgagctcggctggatcgcgtcgcccctggaaggtggctgggaagaggtgtccatcatggacgaaaaaaatactccgatcaggacatatcaggtatgtaacgttatggagccttcccagaataattggttacggaccgactggattactagggagggtgcccagcgagtatatattgaaatcaagttcactttgcgcgactgcaactctctccccggggtaatggggacttgcaaggagacttttaatctgtattactatgagtctgataatgacaaggaacggttcataagagagaatcagttcgtgaagatcgacaccattgctgccgacgagtccttcacccaggtcgatatcggcgaccgtattatgaagctgaataccgaaatccgggacgtgggcccactgtccaaaaagggtttttatctcgcattccaggacgtcggggcctgtatcgctctggttagcgtccgcgtgttctacaaaaaatgtcccttaacagtccgtaacctcgcccagttccctgatactatcactggagccgacacatctagtcttgtagaggttaggggcagctgcgttaataattccgaggagaaagatgtgccaaagatgtactgcggcgctgatggggagtggctagtgcctataggtaattgtctctgcaacgcaggacatgaagaacggtcgggcgaatgtcaggcatgtaagataggatattataaagctttatccactgacgctacctgtgctaagtgtccacctcatagttattccgtgtgggaaggcgccacgagctgtacttgcgacaggggctttttccgggccgataatgatgcagcctccatgccatgtacaaggcccccatccgctcctcttaacttgatctcaaacgtgaacgagactagcgtgaacctggagtggtctagcccccagaatacgggtggtcggcaagacatttcctacaacgtagtttgcaagaagtgcggagccggagatccctctaagtgccgcccctgtggcagcggggttcattataccccacagcaaaatggtctgaaaaccacaaaggtgagcatcaccgacctcctggcccatactaactacacgtttgaaatttgggccgtaaatggcgtgtccaagtacaaccccaatccagaccagagtgtgtccgtcactgtaacgaccaaccaggcagcccctagcagcatagctttagtgcaggccaaagaagtgacgcggtattcagttgcattggcttggctcgagcccgaccgaccaaacggggtgatccttgagtatgaagttaagtattacgagaaagatcagaacgaaaggtcatacagaatagtccgcacagctgcgaggaatacggacataaaggggctgaacccgctgacaagttatgtgttccatgttagggctcgcaccgccgcaggttatggggacttctccgaacccctcgaggtcactacaaacacagttcctagtcggataatcggggatggcgccaattctaccgttctactggtgtccgtcagtggctccgtcgtgttggttgtgattctgatagccgcgttcgtgataagcagaaggaggtctaagtacagcaaagctaaacaggaagccgatgaagaaaagcacctgaaccagggtgtgaggacgtacgtggacccctttacgtatgaggatcccaaccaggctgtgagggagtttgccaaagaaatagacgcctcgtgtatcaagatcgagaaagtgatcggcgtgggggaattcggagaggtgtgttccggccggctgaaggtgcccggcaagcgcgagatctgtgtggctatcaagaccctgaaagccggatacacggacaagcaacgtagggactttctgagcgaggcatctatcatgggtcaattcgatcatccaaatatcatccatctcgagggggtggttaccaaatgcaagccggtaatgatcattactgagtatatggagaatggatcacttgatgcatttctaagaaagaatgatggccgctttacagtgatccagctggtgggcatgctgcgtgggattggtagcggcatgaagtacctgagcgatatgagctacgtccaccgggacttagccgcaaggaacatcctggtgaattccaacctcgtttgtaaggtgagcgactttggcatgagtagggtgctggaggacgacccagaagccgcatacacaactcgcggcggtaaaatcccaattaggtggaccgcacctgaggcaatagcctaccgcaagtttacatcagcctctgacgtttggagttatggaatcgtaatgtgggaagttatgagttacggtgagcgcccctattgggacatgtctaaccaggatgtcatcaaggccattgaggaaggctacaggctacccccacccatggattgccctatcgctttgcatcaactgatgttggattgctggcagaaagagcgatcagatcgccccaagtttggtcagatcgtgaacatgttggataagctcattaggaacccgaatagtcttaagcgtacaggaacggagtcctccagacccaacaccgccctgctggatccctctagtcccgaatttagcgccgtggtgtctgtcggggactggctacaggccataaaaatggatcgctacaaagataatttcacagctgctggctacacgacgctggaggcagtggtgcatgtgaatcaggaggacctagctagaattggtatcacggccataacgcatcagaataagatcctttcaagcgtgcaggccatgcgcacccagatgcagcaaatgcacggacggatggtgcccgtgtag

SEQ ID NO: 116135 - DNA, 51 bp, Artificial Sequence
  derived and/or modified sequence
atggcgggcattttttattttctgtttagctttctgtttggcatttgcgat

SEQ ID NO: 116136 - DNA, 2961 bp, Artificial Sequence
  derived and/or modified sequence
atggctgggatcttctattttgccctgttcagctgcctctttggcatatgtgatgccgtcactggaagtcgtgtctatccagcaaacgaagtgactttgctggatagcagaagcgttcaaggcgagcttggatggatagccagtccactggaagggggttgggaggaggtttctattatggatgagaaaaacacccctattcgcacctaccaagtttgcaacgttatggaaccctcccagaataattggcttcgcacagactggattacccgagaaggagcccagagggtctatatcgagatcaaattcaccctgagagactgtaacagtctccctggtgtgatggggacatgcaaagagacatttaatttatactattatgagagcgataacgacaaagaaagatttatcagagagaatcagtttgtgaaaatcgatactatagcggcagatgagtcttttactcaggtggacatcggcgatcggatcatgaaattgaataccgagattagggatgttggccctctgtccaagaaggggttttacctcgcctttcaagatgtcggtgcttgtattgctctggtttccgtgcgtgtattctacaaaaagtgccctttgacagtgcgcaacctcgcacaattcccagatacaataaccggcgcagatacatccagtctcgttgaggtccggggttcttgtgtgaacaacagtgaggaaaaagacgtccctaagatgtactgcggcgctgacggggaatggctggtgcccattggcaattgcctgtgtaatgccggtcatgaggagagatctggagagtgccaggcttgcaaaattggctattacaaggctctgagcacagacgcgacttgcgctaaatgccctccccattcctacagtgtgtgggagggcgctacatcctgcacttgtgatagaggctttttccgagccgataatgatgcggcatcaatgccctgcacacgccctccaagtgcacccctgaatctgatttccaatgtcaatgaaacctccgtcaacctcgagtggtccagcccccagaataccggagggcgtcaggacataagttacaatgttgtttgcaaaaaatgcggcgctggtgacccctcaaaatgtagaccatgtgggagtggcgttcattataccccacagcagaatggtctcaaaaccaccaaagtgtccatcacagacctactagctcatactaattacacgtttgagatctgggcagtcaacggggttagcaagtacaacccaaatcccgaccaatcagtctccgtgactgtgactaccaatcaggcagctcccagcagtatagcgctggtgcaagcgaaggaggtcacccgatactctgtggccttggcctggttagagcccgaccgcccaaatggcgtcatcctcgagtatgaagtgaaatactacgagaaagatcagaatgagcgctcttaccgtattgtgcgcaccgccgcaagaaacactgatataaaggggctgaatccattgaccagttacgttttccacgtgcgggctagaaccgctgccggatatggagacttttccgaacccctggaagtgactacaaatacggtccctagcaggatcattggagatggcgctaatagcactgtgctactggttagcgtgagtggttcagttgtgctggtggtaatcttgatcgctgctttcgtcatatccaggagacgctccaagtactcaaaggcaaaacaggaagccgatgaagagaaacatctaaaccagggcgttaggacctatgtagatccattcacatacgaagatccgaatcaagcagtgcgggagttcgctaaagagattgacgcctcttgtataaagatagagaaggtgatcggcgttggcgagttcggggaggtttgtagtggaaggcttaaagtacctgggaaacgagaaatctgcgttgctattaaaacccttaaggccggatataccgataaacagcggagagacttcctctctgaagccagcattatgggacagttcgaccaccccaacattattcatctcgagggggtcgtcaccaagtgtaagcccgtgatgatcataacagagtatatggagaatggtagcttagatgcattccttcgaaaaaacgatggcaggttcactgtaatacaacttgtgggaatgctgcgaggtatcgggtccggaatgaagtacctgtccgatatgtcctacgtgcaccgggacctagcagcacgcaacatcttggtaaacagcaatctggtctgcaaagtctctgattttggcatgtctcgggtcctggaggacgatcccgaagctgcatatactaccagaggagggaaaatccctattcgctggaccgctcccgaggccatcgcttacaggaaatttacctctgcctctgacgtctggtcatatgggatcgtgatgtgggaagtaatgagctatggagagcggccatactgggacatgagtaaccaggacgtgataaaagccattgaagagggatatagactgccccctcctatggactgtccgattgccctgcaccagctaatgctggattgttggcagaaagagcggagtgatagacctaagtttgggcagattgtgaacatgctcgacaagttaattagaaatccaaattccctgaagcgcacaggcactgagtcatcacgccctaatacagctctgcttgaccctagctccccagaattctctgctgtagtgtctgtgggggactggttgcaggccatcaaaatggataggtacaaggacaacttcacagccgcaggttataccacgctggaggccgtggttcatgttaaccaggaagatcttgccaggattggcataactgccatcacacaccagaataaaatcctgagctctgtccaggccatgcgtacccaaatgcaacaaatgcacggtaggatggtgcccgtctag

SEQ ID NO: 116137 - DNA, 2850 bp, Artificial Sequence
  derived and/or modified sequence
atggccggaatcttctatttcgctctgttctcatgcctgttcggaatatgcgacgccgttaccggctcacgcgtgtaccctgctaatgaggttaccctgttggattccagaagcgtgcaaggagaactaggctggattgccagcccactggagggtggatgggaggaagtatctatcatggacgaaaagaacacccctataaggacctaccaggtgtgtaatgtcatggagccctcccagaacaattggctgcgcaccgactggatcactcgggagggtgctcagagagtgtacatcgagataaaatttaccctcagggattgcaacagtttgcctggagtgatgggaacatgcaaggaaacctttaatttatactactacgagagcgataacgataaagagaggttcattcgggagaaccagttcgtgaaaatcgacacaatagcggctgatgagagcttcactcaggtagatattggagataggattatgaagctcaatactgagattcgcgacgtaggccctctaagtaaaaagggattttatctagccttccaggacgtgggcgcttgtattgcacttgttagcgttcgcgtgttctacaaaaaatgtccactgacagttcgcaatcttgcccagttccctgatactatcactggcgcagacacatcctcactcgtggaggtccgaggatcttgtgtaaataatagcgaagagaaagacgtgcccaagatgtattgcggagccgatggagagtggctggtcccaattggaaactgcctctgcaacgcaggccacgaggagcgctctggagagtgccaggcttgcaagattggatactacaaagccctgtctaccgacgccacttgtgcaaagtgccccccacattcctatagcgtgtgggagggcgctacctcatgcacgtgcgacagaggcttctttcgcgcagataatgatgccgcaagcatgccatgtaccagaccgccatctgcccctctgaacctgatcagcaacgtcaacgaaacctcagtgaatctcgagtggagtagcccccagaatactggaggtcgccaagacatatcttataacgtggtctgcaaaaagtgcggagcgggagaccccagcaagtgcaggccttgtggtagtggcgtgcattacaccccacagcagaatggtttgaaaactacaaaggtgagcattacggacctgctggcgcacaccaattacacgttcgagatttgggcggtaaacggagtgagcaaatacaatccaaatcctgatcagtcagtgtctgtcacagtcacaacaaatcaggcagccccttctagcatcgcactcgtgcaggcgaaagaagtgacacgctacagtgtcgccctggcctggctggagcctgatcgacctaacggcgtaatcctggaatatgaggtgaagtactatgagaaagatcaaaacgaacgctcctaccggattgttagaactgccgcaaggaacaccgatattaaaggcttgaatcctctgaccagctacgtgtttcacgtccgcgcacggactgcagctggatacggcgatttttctgaacccttggaggtcaccactaacactgtgccctcccggatcatcggggacggagctaacagcactgtattgctcgtgtcagtgtcgggcagtgtcgtcctcgtggtcatacttatcgcagcgttcgtgataagtcggcgaagatccaaatactccaaggctaagcaggaagcagacgaggaaaagcatttgaatcagggagtcaggacctatgtcgatcccttcacatacgaagacccaaatcaagccgtaagagagttcgccaaggaaatcgatgcctcatgcatcaaaattgaaaaggtgattggagttggagaattcggggaagtttgctcaggcagactgaaggtcccgggtaaaagggaaatatgcgtggccatcaagacgctgaaagccggatacaccgacaaacagaggcgtgacttcctcagcgaggcctctattatggggcagtttgaccaccctaatattatccatctggagggcgtcgtcaccaaatgtaagcccgtaatgatcattaccgagtacatggaaaacggttccttagacgccttcctgcgcaaaaacgacggtcgctttaccgtgatccagctggtcggtatgttgcgaggtatcggaagcggcatgaaataccttagcgacatgtcctacgtgcatagggacttagcagccaggaacatcttggttaactcaaacttggtgtgcaaggttagtgactttggcatgagccgcgtgctggaagatgatccggaagcggcatatactactcgtggcggtaagatccctattcgatggaccgcccctgaggcaatcgcataccgaaagttcacctcagcgtccgatgtgtggtcctacggtatcgtgatgtgggaagtgatgagctatggagagaggccctactgggatatgtctaaccaggacgtgatcaaagccattgaggaaggctatcgcctgcctccccctatggattgtcctatcgccctgcatcagctgatgcttgactgctggcagaaagagagatctgaccgcccaaagtttgggcaaattgttaacatgttggataaactcatccggaatccaaacagcctgaagaggactgggactgagagttctcgccctaacaccgcgttgctggatccctcctctcccgaattcagcgcggttgtgagtgtgggagactggctccaggcaatcaaaatggatagatacaaggataattttacggcagcgggttacaccacgctagaggccgtggtccacgtgaatcaggagtag

SEQ ID NO: 116138 - DNA, 2961 bp, Artificial Sequence
  derived and/or modified sequence
atggcaggtattttctacttcgctctcttctcttgcctctttggaatttgtgacgcagtaaccggaagccgggtctatccagccaatgaagtgacacttctggacagcaggtccgtccagggggagctggggtggatcgccagtcctctggaaggagggtgggaggaggtctcgataatggacgaaaagaatacacccataagaacgtaccaggtatgtaacgtgatggagcccagccagaataattggctgagaacggattggatcacccgggagggcgcacagagagtgtacatcgagattaaatttacattgagggattgcaactccctaccaggggtaatgggcacttgcaaagagacttttaatctatattactacgagagcgacaatgacaaggagcgattcatccgggaaaaccagttcgtgaagatcgatacaattgctgctgacgagtcatttacacaagttgacattggggaccggataatgaagctaaataccgagatccgggatgtgggcccactgtcgaaaaagggtttctacctggccttccaggacgtgggagcctgcatcgccctagtttctgttcgggtattttataagaaatgtcctctgacagtgcggaacttagcccagttcccggatactatcaccggggctgatacatcctccctggtggaagttcggggaagctgcgtcaacaattctgaggagaaggatgtgccgaagatgtactgcggcgcagatggcgaatggctggtacccataggcaactgcctgtgtaatgccggacacgaggagcgatcaggagagtgccaggcgtgcaagatcggctattacaaggcactctcaactgatgccacctgtgctaaatgcccgccacatagctattcagtgtgggagggggctaccagttgtacgtgcgatcgcggatttttcagggccgataacgacgccgcatccatgccatgtacaaggccgccaagcgcccctctgaacttaatttcaaatgtgaatgagacctctgtaaacctcgagtggtccagtcctcaaaatacgggcggaagacaggatatctcatacaacgtggtttgtaaaaaatgtggtgccggagatcctagtaagtgcagaccctgtggctccggcgtgcactacacccctcaacagaatggacttaagacaacaaaggtctctattacagatctgttagcccatacaaactacaccttcgagatttgggcagttaacggggttagtaagtacaatcccaatcctgatcaatctgtcagtgtgacagtgaccacaaatcaggccgcaccgagctccattgctctggtgcaggccaaagaggtcaccagatactctgttgccctggcatggttggagccggatcgcccaaatggggtgatcctggaatacgaggtcaaatattatgagaaagatcaaaatgaaagaagttataggatcgtgaggacagcggctagaaataccgacattaaagggctgaatcccctgacctcttacgtgttccacgtaagggctaggactgctgccggatatggagacttcagtgaacctctggaagtcacaacaaacaccgtaccttccagaattatcggcgatggtgccaattctacagtgttactggtgagtgtgtcaggctccgtcgttctggtggtgattctcattgcagcattcgtgatatcgcgcaggcggtctaagtatagcaaggccaaacaggaggctgatgaagaaaagcatctcaaccagggggtacgcacttacgtggacccatttacttacgaggatcctaaccaggcagtcagggagttcgcaaaggagattgacgccagttgtatcaagattgaaaaagtgattggcgtgggcgaatttggtgaggtttgttccgggagactgaaggtacccggaaagagagagatctgtgtggccatcaaaactctgaaggcgggttacactgacaagcagcggcgagactttctctccgaggcctcaatcatggggcagttcgaccatccaaacatcatacacctggaaggggtcgtgaccaagtgcaaacccgttatgatcattacggaatatatggagaacggtagcctggacgcttttctgcgtaagaacgacggacgcttcactgtgatccaattagtcggcatgctgcgtggtattggctctggcatgaaatacctttccgatatgagttatgtgcacagggatttggccgctaggaacatattagtgaactctaatctcgtgtgtaaggtctctgattttggaatgagtcgtgtcctggaagatgacccagaagccgcttacacgaccaggggaggtaaaatcccaataagatggaccgcccctgaagccatcgcttaccgtaaattcacatctgcttctgacgtctggtcctatggtattgtcatgtgggaagtcatgtcatatggcgagaggccttactgggacatgtcaaatcaagacgtgatcaaagccatcgaagaagggtaccgcctgccccctcctatggattgcccaatagctctgcaccaactgatgctcgactgctggcaaaaggagagaagcgatcgccctaaatttggtcagatagtcaacatgcttgataaactcatacgcaacccaaacagcctgaaacgtacaggtactgaaagtagcagacccaatactgctctactcgatccttcctcccctgagtttagtgctgtggtctccgttggcgactggctccaagctataaaaatggatcggtacaaggataatttcaccgccgctggctacaccaccttggaggctgtcgtgcacgtcaatcaggaggatctggcccgtataggaattaccgccatcacacatcagaacaagatactgtccagcgtgcaggcgatgaggacgcagatgcagcaaatgcatggacgaatggtcccagtctag

SEQ ID NO: 116139 - protein, 935 aa, Artificial Sequence
  derived and/or modified sequence
MKWEEVSIMDEKNTPIRTYQVCNVMEPSQNNWLRTDWITREGAQRVYIEIKFTLRDCNSLPGVMGTCKETFNLYYYESDNDKERFIRENQFVKIDTIAADESFTQVDIGDRIMKLNTEIRDVGPLSKKGFYLAFQDVGACIALVSVRVFYKKCPLTVRNLAQFPDTITGADTSSLVEVRGSCVNNSEEKDVPKMYCGADGEWLVPIGNCLCNAGHEERSGECQACKIGYYKALSTDATCAKCPPHSYSVWEGATSCTCDRGFFRADNDAASMPCTRPPSAPLNLISNVNETSVNLEWSSPQNTGGRQDISYNVVCKKCGAGDPSKCRPCGSGVHYTPQQNGLKTTKVSITDLLAHTNYTFEIWAVNGVSKYNPNPDQSVSVTVTTNQAAPSSIALVQAKEVTRYSVALAWLEPDRPNGVILEYEVKYYEKDQNERSYRIVRTAARNTDIKGLNPLTSYVFHVRARTAAGYGDFSEPLEVTTNTVPSRIIGDGANSTVLLVSVSGSVVLVVILIAAFVISRRRSKYSKAKQEADEEKHLNQGVRTYVDPFTYEDPNQAVREFAKEIDASCIKIEKVIGVGEFGEVCSGRLKVPGKREICVAIKTLKAGYTDKQRRDFLSEASIMGQFDHPNIIHLEGVVTKCKPVMIITEYMENGSLDAFLRKNDGRFTVIQLVGMLRGIGSGMKYLSDMSYVHRDLAARNILVNSNLVCKVSDFGMSRVLEDDPEAAYTTRGGKIPIRWTAPEAIAYRKFTSASDVWSYGIVMWEVMSYGERPYWDMSNQDVIKAIEEGYRLPPPMDCPIALHQLMLDCWQKERSDRPKFGQIVNMLDKLIRNPNSLKRTGTESSRPNTALLDPSSPEFSAVVSVGDWLQAIKMDRYKDNFTAAGYTTLEAVVHVNQEDLARIGITAITHQNKILSSVQAMRTQMQQMHGRMVPV

SEQ ID NO: 116140 - DNA, 2808 bp, Artificial Sequence
  derived and/or modified sequence
atgaagtgggaggaggtgagcatcatggacgagaagaacacccccatcagaacctaccaggtgtgcaacgtgatggagcccagccagaacaactggctgagaaccgactggatcaccagagagggcgcccagagagtgtacatcgagatcaagttcaccctgagagactgcaacagcctgcccggcgtgatgggcacctgcaaggagaccttcaacctgtactactacgagagcgacaacgacaaggagagattcatcagagagaaccagttcgtgaagatcgacaccatcgccgccgacgagagcttcacccaggtggacatcggcgacagaatcatgaagctgaacaccgagatcagagacgtgggccccctgagcaagaagggcttctacctggccttccaggacgtgggcgcctgcatcgccctggtgagcgtgagagtgttctacaagaagtgccccctgaccgtgagaaacctggcccagttccccgacaccatcaccggcgccgacaccagcagcctggtggaggtgagaggcagctgcgtgaacaacagcgaggagaaggacgtgcccaagatgtactgcggcgccgacggcgagtggctggtgcccatcggcaactgcctgtgcaacgccggccacgaggagagaagcggcgagtgccaggcctgcaagatcggctactacaaggccctgagcaccgacgccacctgcgccaagtgccccccccacagctacagcgtgtgggagggcgccaccagctgcacctgcgacagaggcttcttcagagccgacaacgacgccgccagcatgccctgcaccagaccccccagcgcccccctgaacctgatcagcaacgtgaacgagaccagcgtgaacctggagtggagcagcccccagaacaccggcggcagacaggacatcagctacaacgtggtgtgcaagaagtgcggcgccggcgaccccagcaagtgcagaccctgcggcagcggcgtgcactacaccccccagcagaacggcctgaagaccaccaaggtgagcatcaccgacctgctggcccacaccaactacaccttcgagatctgggccgtgaacggcgtgagcaagtacaaccccaaccccgaccagagcgtgagcgtgaccgtgaccaccaaccaggccgcccccagcagcatcgccctggtgcaggccaaggaggtgaccagatacagcgtggccctggcctggctggagcccgacagacccaacggcgtgatcctggagtacgaggtgaagtactacgagaaggaccagaacgagagaagctacagaatcgtgagaaccgccgccagaaacaccgacatcaagggcctgaaccccctgaccagctacgtgttccacgtgagagccagaaccgccgccggctacggcgacttcagcgagcccctggaggtgaccaccaacaccgtgcccagcagaatcatcggcgacggcgccaacagcaccgtgctgctggtgagcgtgagcggcagcgtggtgctggtggtgatcctgatcgccgccttcgtgatcagcagaagaagaagcaagtacagcaaggccaagcaggaggccgacgaggagaagcacctgaaccagggcgtgagaacctacgtggaccccttcacctacgaggaccccaaccaggccgtgagagagttcgccaaggagatcgacgccagctgcatcaagatcgagaaggtgatcggcgtgggcgagttcggcgaggtgtgcagcggcagactgaaggtgcccggcaagagagagatctgcgtggccatcaagaccctgaaggccggctacaccgacaagcagagaagagacttcctgagcgaggccagcatcatgggccagttcgaccaccccaacatcatccacctggagggcgtggtgaccaagtgcaagcccgtgatgatcatcaccgagtacatggagaacggcagcctggacgccttcctgagaaagaacgacggcagattcaccgtgatccagctggtgggcatgctgagaggcatcggcagcggcatgaagtacctgagcgacatgagctacgtgcacagagacctggccgccagaaacatcctggtgaacagcaacctggtgtgcaaggtgagcgacttcggcatgagcagagtgctggaggacgaccccgaggccgcctacaccaccagaggcggcaagatccccatcagatggaccgcccccgaggccatcgcctacagaaagttcaccagcgccagcgacgtgtggagctacggcatcgtgatgtgggaggtgatgagctacggcgagagaccctactgggacatgagcaaccaggacgtgatcaaggccatcgaggagggctacagactgcccccccccatggactgccccatcgccctgcaccagctgatgctggactgctggcagaaggagagaagcgacagacccaagttcggccagatcgtgaacatgctggacaagctgatcagaaaccccaacagcctgaagagaaccggcaccgagagcagcagacccaacaccgccctgctggaccccagcagccccgagttcagcgccgtggtgagcgtgggcgactggctgcaggccatcaagatggacagatacaaggacaacttcaccgccgccggctacaccaccctggaggccgtggtgcacgtgaaccaggaggacctggccagaatcggcatcaccgccatcacccaccagaacaagatcctgagcagcgtgcaggccatgagaacccagatgcagcagatgcacggcagaatggtgcccgtgtag

SEQ ID NO: 116141 - DNA, 3045 bp, Artificial Sequence
  derived and/or modified sequence
attccactgggatagaagcggcaggagcagcgttggcaccggcgaaccatggctgggattttctatttcgccctattttcgtgtctcttcgggatttgcgacgctgtcacaggttccagggtataccccgcgaatgaagtgggaggaagtgagtatcatggatgaaaaaaatacaccaatccgaacctaccaagtgtgcaatgtgatggaacccagccagaataactggctacgaactgattggatcacccgagaaggggctcagagggtgtatattgagattaaattcaccttgagggactgcaatagtcttccgggcgtcatggggacttgcaaggagacgtttaacctgtactactatgaatcagacaacgacaaagagcgtttcatcagagagaaccagtttgtcaaaattgacaccattgctgctgatgagagcttcacccaagtggacattggtgacagaatcatgaagctgaacaccgagatccgggatgtagggccattaagcaaaaaggggttttacctggcttttcaggatgtgggggcctgcatcgccctggtatcagtccgtgtgttctataaaaagtgtccactcacagtccgcaatctggcccagtttcctgacaccatcacaggggctgatacgtcttccctggtggaagttcgaggctcctgtgtcaacaactcagaagagaaagatgtgccaaaaatgtactgtggggcagatggtgaatggctggtacccattggcaactgcctatgcaacgctgggcatgaggagcggagcggagaatgccaagcttgcaaaattggatattacaaggctctctccacggatgccacctgtgccaagtgcccaccccacagctactctgtctgggaaggagccacctcgtgcacctgtgaccgaggctttttcagagctgacaacgatgctgcctctatgccctgcacccgtccaccatctgctcccctgaacttgatttcaaatgtcaacgagacatctgtgaacttggaatggagtagccctcagaatacaggtggccgccaggacatttcctataatgtggtatgcaagaaatgtggagctggtgaccccagcaagtgccgaccctgtggaagtggggtccactacaccccacagcagaatggcttgaagaccaccaaagtctccatcactgacctcctagctcataccaattacacctttgaaatctgggctgtgaatggagtgtccaaatataaccctaacccagaccaatcagtttctgtcactgtgaccaccaaccaagcagcaccatcatccattgctttggtccaggctaaagaagtcacaagatacagtgtggcactggcttggctggaaccagatcggcccaatggggtaatcctggaatatgaagtcaagtattatgagaaggatcagaatgagcgaagctatcgtatagttcggacagctgccaggaacacagatatcaaaggcctgaaccctctcacttcctatgttttccacgtgcgagccaggacagcagctggctatggagacttcagtgagcccttggaggttacaaccaacacagtgccttcccggatcattggagatggggctaactccacagtccttctggtctctgtctcgggcagtgtggtgctggtggtaattctcattgcagcttttgtcatcagccggagacggagtaaatacagtaaagccaaacaagaagcggatgaagagaaacatttgaatcaaggtgtaagaacatatgtggacccctttacgtacgaagatcccaaccaagcagtgcgagagtttgccaaagaaattgacgcatcctgcattaagattgaaaaagttataggagttggtgaatttggtgaggtatgcagtgggcgtctcaaagtgcctggcaagagagagatctgtgtggctatcaagactctgaaagctggttatacagacaaacagaggagagacttcctgagtgaggccagcatcatgggacagtttgaccatccgaacatcattcacttggaaggcgtggtcactaaatgtaaaccagtaatgatcataacagagtacatggagaatggctccttggatgcattcctcaggaaaaatgatggcagatttacagtcattcagctggtgggcatgcttcgtggcattgggtctgggatgaagtatttatctgatatgagctatgtgcatcgtgatctggccgcacggaacatcctggtgaacagcaacttggtctgcaaagtgtctgattttggcatgtcccgagtgcttgaggatgatccggaagcagcttacaccaccaggggtggcaagattcctatccggtggactgcgccagaagcaattgcctatcgtaaattcacatcagcaagtgatgtatggagctatggaatcgttatgtgggaagtgatgtcgtacggggagaggccctattgggatatgtccaatcaagatgtgattaaagccattgaggaaggctatcggttaccccctccaatggactgccccattgcgctccaccagctgatgctagactgctggcagaaggagaggagcgacaggcctaaatttgggcagattgtcaacatgttggacaaactcatccgcaaccccaacagcttgaagaggacagggacggagagctccagacctaacactgccttgttggatccaagctcccctgaattctctgctgtggtatcagtgggcgattggctccaggccattaaaatggaccggtataaggataacttcacagctgctggttataccacactagaggctgtggtgcacgtgaaccaggaggacctggcaagaattggtatcacagccatcacgcaccagaataagattttgagcagtgtccaggcaatgcgaacccaaatgcagcagatgcacggcagaatggttcccgtctgagccagtactgaataaactcaaaactcttgaaattagtttacctcatccatgcactttaattgaagaactgcactttttttacttcgtcttcgccctctgaaatt

SEQ ID NO: 116142 - DNA, 2808 bp, Artificial Sequence
  derived and/or modified sequence
atgaagtgggaagaggtctccatcatggatgagaaaaatactccaatccgtacctatcaggtgtgcaatgtcatggaaccatcgcagaacaactggttgaggaccgattggattaccagggaaggtgcccaaagagtgtacatcgaaatcaaattcaccctgcgagactgcaattccctaccgggcgtcatgggcacgtgtaaggagacattcaacctgtactactacgagtctgacaatgacaaggaacgattcatccgcgagaatcagttcgtgaagatcgatactatcgctgctgacgagagcttcacgcaggtcgatattggcgataggatcatgaaactgaatacagaaatacgggatgtgggaccactgtctaagaagggattttatttagcattccaggacgtgggcgcctgcattgcccttgttagcgttcgggtgttctataaaaagtgcccactcacagtaagaaatctagcccagttccctgacacaatcactggcgccgacacttcgtctctcgtagaagtcagaggctcgtgcgtgaacaattccgaggagaaagacgtcccaaagatgtattgtggcgcagacggtgaatggctggtcccgatcggtaactgtctttgcaacgctggccacgaagaaaggagtggtgagtgccaggcgtgcaaaattggttactacaaagccctgtccactgatgctacatgcgccaaatgcccaccacatagttactctgtgtgggaaggcgcgacctcctgcacatgtgaccgaggctttttccgtgcggacaacgacgccgcatctatgccctgtaccaggcctccctcagccccgctgaatctgatcagtaatgtgaatgaaactagcgtcaaccttgagtggtctagcccgcagaatacaggcgggaggcaggacatttcatacaacgttgtgtgtaagaagtgtggcgcaggtgatccttcaaaatgtagaccctgcggctctggcgttcactatactccacagcagaatgggcttaagacaactaaggtgtcaataacagatttactggcccatactaactacacctttgagatctgggctgtgaacggtgtcagtaaatacaatcctaacccagaccaaagcgtttctgtaacagtgactacgaaccaggcagcaccttcatccattgcactggtacaagcgaaagaagtaactcgttactctgtggctctggcttggctggagccggatcgaccaaacggcgtaattctcgagtatgaggttaagtactatgagaaagaccagaatgagaggtcatatcgcattgtgcgaactgccgcccgcaatacagatattaagggtctgaacccattgaccagctatgtctttcacgtccgcgcccgcaccgccgcaggatatggtgatttctcagaacctctcgaagtgaccaccaacacggttccatccaggatcatcggcgatggagccaacagcacagtattgctggtctctgtgagtggctccgtcgtcctggtagtaatactgatagccgcctttgtgattagccgtaggagatccaagtacagtaaagccaaacaggaggctgatgaggaaaaacacctgaatcagggagtgcggacatacgtggacccgtttacctacgaagatccgaaccaggcagtgcgtgagtttgctaaagagatagacgcctcgtgcattaagatcgagaaagtgataggagtgggggaatttggcgaggtctgttccgggcggctcaaggtccccgggaaaagggagatctgtgttgctattaaaaccttgaaggcagggtacaccgacaaacaaagacgcgattttctgagtgaggcaagcataatgggtcagtttgatcatcccaatatcattcacctggagggagtggtcacgaagtgcaagcccgtcatgatcatcaccgagtacatggaaaacggaagtctggacgccttccttcggaaaaacgacggtagattcactgttattcagttggtaggtatgctgcggggtattgggtccggtatgaaatacctctcagacatgtcttacgtccatagggatctggccgccaggaatatcctcgtgaactccaaccttgtgtgcaaggtatcagattttggcatgtcacgcgtgcttgaggacgaccccgaagcagcctatactactagagggggcaagataccaatacggtggaccgctccagaggctattgcataccgcaagttcaccagtgccagcgacgtgtggagctacggcatcgtaatgtgggaggtgatgtcttatggagagagaccttactgggacatgtctaaccaggatgtcatcaaggctattgaggagggatataggttacccccccctatggattgccctattgcactgcaccagctgatgctcgactgttggcagaaagaacgctccgataggccaaaattcgggcagatcgtaaatatgttagacaaactgattcgaaatcctaacagcctgaagcgcactggcaccgaatcaagtagacctaatactgcactactggacccttcttcccctgaattctctgccgtggttagcgtgggcgactggctgcaagccattaagatggaccggtacaaagataattttacggctgccgggtatacaacgttagaggctgtggttcatgttaatcaagaggacctggcccgtattggaataaccgccattacgcaccaaaacaaaatcttgagtagcgtccaagcgatgcgtacacagatgcagcagatgcatggccgaatggtgcctgtatag

SEQ ID NO: 116143 - DNA, 2808 bp, Artificial Sequence
  derived and/or modified sequence
atgaagtgggaggaggtgtccatcatggatgagaagaacacccccatccgcacctaccaggtgtgcaatgtgatggagcccagccagaacaactggctgaggacagactggatcacccgggagggcgcccagagggtgtacatcgagatcaagttcaccctgcgggactgcaacagcctgcccggggtgatgggcacctgcaaggagaccttcaacctgtactactatgaaagtgacaatgacaaggagcgcttcatccgggagaaccagtttgtgaagattgacaccatcgctgctgatgagagcttcacccaggtggacatcggggaccgcatcatgaagctgaacacagagatcagagatgtgggccccctgagcaagaagggcttctacctggccttccaggatgtgggcgcctgcatcgccctggtgtctgtgcgggtcttctacaagaagtgccccctgactgtgaggaacctggcccagttcccagacaccatcaccggggctgacaccagcagcctggtggaggtgcggggcagctgtgtgaacaacagcgaggagaaggatgtgcccaagatgtactgtggggctgatggagagtggctggtgcccatcggcaactgcctgtgcaatgccggccacgaggagaggtctggagagtgccaggcctgcaagattggctactacaaggccctgagcacagatgccacctgtgccaagtgccccccccacagctacagcgtgtgggagggcgccaccagctgcacctgtgaccggggcttcttccgggctgacaatgatgctgcctccatgccctgcaccaggcctccttctgcccccctgaacctgatcagcaatgtgaatgagacctctgtgaacctggagtggagcagcccccagaacacaggaggccggcaggacatctcctacaacgtggtgtgcaagaagtgtggggccggggaccccagcaaatgtcggccctgtggcagcggcgtgcactacaccccccagcagaatggcctgaagaccaccaaggtgtccatcacagacctgctggcccacaccaactacacctttgagatctgggccgtgaatggagtgtccaagtacaaccccaacccagaccagagcgtgtctgtgacagtgaccaccaaccaggccgcccccagcagcatcgccctggtgcaggccaaggaggtgacccgctacagcgtggccctggcctggctggagccagaccggcccaatggagtcatcctggagtatgaggtgaagtactatgagaaggaccagaatgaaagaagctacagaattgtgaggacagctgccaggaacacagacatcaagggcctgaaccccctgaccagctatgtgttccacgtgcgggccaggacagctgctggctacggggacttcagcgagcccctggaggtgaccaccaacacagtgcccagccgcatcattggagatggagccaacagcacagtgctgctggtgtctgtgtctggctctgtggtgctggtggtgatcctgattgctgccttcgtcatcagcagaagaagaagcaagtacagcaaggccaagcaggaggctgatgaggagaagcacctgaaccagggcgtgaggacctacgtggaccccttcacctatgaggaccccaaccaggccgtgcgggagtttgccaaggagattgatgccagctgcatcaagattgagaaggtgattggagtgggggagtttggagaggtgtgcagcggccgcctgaaggtgcctgggaagcgggagatctgtgtggccatcaagaccctgaaggccggctacacagacaagcagaggcgggacttcctgtctgaggccagcatcatgggccagtttgaccaccccaacatcatccacctggagggcgtggtgaccaagtgcaagcctgtgatgatcatcacagagtacatggagaatggcagcctggatgccttcctgaggaagaatgatggccgcttcaccgtcatccagctggtgggcatgctgcggggcatcggcagcggcatgaagtacctgagtgacatgtcctatgtgcaccgggacctggccgccaggaacatcctggtgaacagcaacctggtgtgcaaggtgtctgactttggcatgagccgggtgctggaggatgatcctgaggccgcctacaccacccggggcggcaagatccccatccgctggacagcccctgaggccatcgcctacaggaagttcaccagcgccagtgatgtgtggagctatggaattgtgatgtgggaggtgatgtcctatggagagcggccctactgggacatgagcaaccaggatgtgatcaaggccatcgaggagggctaccgcctgcccccacccatggactgccccatcgccctgcaccagctgatgctggactgctggcagaaggagaggagtgaccggcccaagtttggccagatcgtgaacatgctggacaagctgatccggaaccccaacagcctgaagaggactggaacagagagcagccggcccaacacagccctgctggaccccagcagccctgagttctctgctgtggtgtctgtgggggactggctgcaggccatcaagatggaccgctacaaggacaacttcaccgctgctggctacaccaccctggaggccgtggtgcacgtgaaccaggaggacctggccagaattggcatcacagccatcacccaccagaacaagatcctgagctctgtgcaggccatgaggacccagatgcagcagatgcacggccgcatggtgcctgtgtag

SEQ ID NO: 116144 - DNA, 2808 bp, Artificial Sequence
  derived and/or modified sequence
atgaagtgggaggaggtgagcatcatggacgagaagaacacccccattcgtacctatcaggtatgtaacgttatggaacctagtcagaacaactggctacggaccgactggattacacgggagggcgctcaacgcgtatacatcgagattaagttcaccctccgggattgcaacagcctcccgggcgtgatgggcacctgcaaggagaccttcaatttgtactattacgaatctgacaacgacaaggagaggtttatcagagagaaccagtttgtgaagatcgatactatcgctgccgatgagagctttactcaggtagatataggcgaccgaataatgaaactgaacactgagatcagagatgtgggacctctgagcaagaagggattttatctcgctttccaagatgtgggtgcatgcatcgccctggtgtccgtgcgtgtgttctataaaaagtgccccttaacagtgcggaaccttgcccaattccccgacaccattacgggagccgacacaagtagccttgttgaagtgagaggatcttgtgtgaataattccgaggagaaggatgtgcctaaaatgtactgcggcgccgacggggagtggcttgtccctatagggaattgcctgtgcaatgcgggccacgaggaacgctcaggagagtgccaggcctgcaagattgggtattataaggccctctcgaccgatgcaacctgcgccaagtgcccgcctcatagctattcagtatgggagggagctacctcttgtacctgcgataggggattctttcgggcagataatgacgctgcttccatgccttgtacccggcccccatccgccccactgaatctgatcagcaacgtaaatgagactagcgtgaacctggagtggagtagtccccaaaatacaggtggtcggcaagatatttcatacaacgtagtttgtaaaaaatgcggcgcaggtgacccaagcaaatgtaggccatgcggctctggggttcactacacccctcaacaaaatggtttgaaaacaactaaagtcagcattacggacttgttggcccatactaactacacattcgagatttgggcggtgaatggcgtgtcaaaatacaatcctaatcccgaccaaagcgtctcagtcaccgtgacaactaatcaagctgcgccctcaagcatagctcttgtgcaagctaaagaggtgaccagatatagcgttgccctggcatggcttgagccggatcgtcccaacggagtaatccttgaatatgaagtaaagtactacgagaaagaccagaacgaacgtagctaccgaatcgtcaggactgcagcccgaaacacagacattaagggcttgaaccccctgacctcctatgtgttccacgtgcgagcaagaaccgccgccggctacggggacttctccgaacctctggaggtaaccacaaacaccgtgccgtcccgcattatcggggacggagccaacagcactgtactgctggtgtccgtgagcggatccgtggtgctagtggtgattttaattgcggcgtttgtgatcagccgacggcgcagcaagtattccaaggccaagcaggaagcagacgaggagaagcacctcaatcaaggggtgcgcacctatgtagacccttttacatacgaggaccctaatcaagcggttagggaatttgccaaggaaatagacgcatcctgcattaaaattgaaaaggtgatcggggttggcgaattcggagaggtgtgctcagggcgattaaaagtccccgggaaaagagagatctgtgtggctattaaaacattgaaggctggttacactgacaagcaaagacgggactttctgtcagaggcttccattatgggtcagttcgatcaccccaacatcattcatttagagggcgtagtgacaaagtgtaaaccggttatgatcattactgaatacatggaaaatggaagccttgatgcttttttgaggaaaaacgatggcaggtttacagtgattcagttggttggcatgttgcgtggcataggatctgggatgaagtacctgtctgacatgtcttatgtgcaccgcgacttggccgctaggaatatcctggttaacagtaacctagtctgcaaggtgagcgacttcgggatgagccgtgtgctggaggatgaccctgaagcagcttatacaacccgaggaggtaagattcctattcgatggacagccccagaagccatcgcctatcggaagtttactagtgcttccgatgtatggagctacggcatcgtgatgtgggaagtcatgtcatacggagaaaggccatactgggacatgtccaaccaggacgttattaaggctattgaagagggctatcgcctcccccccccgatggactgccctattgcattgcatcagctaatgctagactgttggcaaaaagaaaggtccgatagacccaaattcggacaaatcgtgaacatgctggacaagctcatcagaaacccaaactccctaaagagaaccggcacagaaagttcaagacctaacaccgccctcctggacccaagctcacctgagttttcagccgtggtgtctgtcggtgattggttgcaggcgattaaaatggatagatacaaggacaattttaccgcagcaggctatacaacgctcgaggccgttgtccacgtaaatcaggaagatcttgctcgtatcgggattactgcaataacccaccaaaataagattttaagcagcgtgcaagctatgcgcacccagatgcagcagatgcacggcaggatggtgcctgtctag

SEQ ID NO: 116145 - DNA, 2808 bp, Artificial Sequence
  derived and/or modified sequence
atgaaatgggaggaagtgtccatcatggacgaaaagaacacccccatccgcacctatcaggtttgtaatgtcatggagccaagccaaaacaactggttacggacggactggatcacacgcgaaggtgcccaacgagtttacatcgaaatcaagtttacgctccgggactgtaacagtcttcctggagtgatgggcacatgtaaagagacattcaatctgtattactatgaatcggacaacgacaaggagcggttcatcagagagaatcaattcgtcaagatcgacacaattgccgctgacgagtccttcacccaagttgatatcggagatagaatcatgaagctcaacaccgagatcagagacgttgggccactgtccaagaagggtttttacctggcgtttcaggacgttggcgcttgcattgccctagtttccgtgagggtgttttacaagaaatgtccactgacagtaaggaatctggcccagttcccggatacaattacaggggctgatacctcttctttggttgaggtgagaggaagttgtgtgaataacagcgaagaaaaagacgtgccaaagatgtattgcggggcagacggggagtggttggttcccattggaaactgcctgtgtaatgctgggcacgaggaacgctccggggagtgccaggcttgtaagatcgggtattacaaggctctctctacggatgccacatgtgctaagtgccctccccactcctacagtgtctgggagggcgcaactagctgtacctgcgatagagggttcttccgggcagacaacgacgctgcgagtatgccttgcacaaggccaccaagcgcccctctgaacctcatttcaaacgtgaatgagacaagcgtgaatctggagtggagcagtcctcagaatacgggcggtcggcaggacatctcctacaatgttgtctgtaaaaagtgcggtgccggtgacccatccaaatgtaggccttgcggctctggcgtccactacacaccccagcagaatggcttgaagacgactaaggtgagcattactgaccttctcgcccatactaactacacctttgagatttgggcagtcaacggagtgagcaaatacaacccaaacccagatcagtctgtgtccgtgacagtcactaccaaccaggcagcgccttcctccattgcactggtccaggccaaagaagtgacgcgctatagtgtggctcttgcttggctggaacccgacaggcctaacggagttattctggaatatgaggttaagtattatgagaaggaccagaacgaacgcagttatcggatcgtacggaccgccgctcggaataccgatattaaggggctgaacccactgacgtcctatgtgtttcacgttcgggctcggaccgccgcaggttacggggacttcagtgagcccctcgaagtgactaccaacacagtgccctcgcgcatcataggggatggtgcaaactcgacagtgttgctggtctccgtctctggctctgtggtgttggtggtcatactgattgcagcttttgtcatttccagacgccgatccaagtactctaaggcaaagcaggaggctgatgaggagaagcatttgaatcaaggagtccggacgtacgtcgatccctttacatacgaagacccgaatcaggcggtgcgcgaattcgccaaggagatcgacgcgtcatgcatcaagattgaaaaagtgattggcgttggggaattcggcgaggtgtgcagcggacgactgaaagtgcctggcaagcgggagatttgcgtagctatcaagactttaaaagccggttacactgacaaacagcgaagggatttcttgtcagaggcttccatcatgggacagtttgaccatcctaatatcatccacctagaaggggttgtcactaaatgcaagcccgtcatgatcatcaccgaatatatggaaaacgggtctctcgacgccttcctcagaaagaatgacggccgattcaccgtcatacagctcgttgggatgctgaggggcattggctcaggtatgaaatatctctcagacatgtcctatgtgcatagggacctggcagctcggaacatccttgtcaatagcaacctggtctgcaaggtcagtgacttcggcatgtccagggtcctcgaggacgatcccgaggcggcttacactacccggggagggaagataccaatccggtggaccgcaccagaagcaattgcctatagaaagtttacctccgcatccgacgtttggtcctacggcattgtaatgtgggaggttatgtcctatggcgaacgcccttactgggatatgtcaaaccaggacgtcatcaaggccattgaggaaggatatagactgccaccccctatggattgtcctatagcactccaccagcttatgctggactgctggcagaaggagcgatccgacagacctaagtttggccagattgtcaacatgcttgataagctcataaggaaccccaactccttaaagaggaccggcacagagtccagtaggcctaatactgcgctgttggatccttcttctcccgagttttccgccgtggtatccgtgggagattggctgcaagcaataaaaatggaccggtataaggacaatttcaccgctgccggttacaccactctagaagccgtcgttcacgtaaatcaggaagaccttgctagaattggtattactgcaatcacacatcagaacaaaatcctgagtagtgtgcaggcaatgaggacacagatgcaacagatgcatgggcgtatggtgccggtgtag

SEQ ID NO: 116146 - protein, 455 aa, Artificial Sequence
  derived and/or modified sequence
MVDFPGYNLSGAVASFLFILLTMKQSEDFRVIGPAHPILAGVGEDALLTCQLLPKRTTMHVEVRWYRSEPSTPVFVHRDGVEVTEMQMEEYRGWVEWIENGIAKGNVALKIHNIQPSDNGQYWCHFQDGNYCGETSLLLKVAGLGSAPSIHMEGPGESGVQLVCTARGWFPEPQVYWEDIRGEKLLAVSEHRIQDKDGLFYAEATLVVRNASAESVSCLVHNPVLTEEKGSVISLPEKLQTELASLKVNGPSQPILVRVGEDIQLTCYLSPKANAQSMEVRWDRSHRYPAVHVYMDGDHVAGEQMAEYRGRTVLVSDAIDEGRLTLQILSARPSDDGQYRCLFEKDDVYQEASLDLKVVSLGSSPLITVEGQEDGEMQPMCSSDGWFPQPHVPWRDMEGKTIPSSSQALTQGSHGLFHVQTLLRVTNISAVDVTCSISIPFLGEEKIATFSLSGW

SEQ ID NO: 116147 - protein, 245 aa, Artificial Sequence
  derived and/or modified sequence
MVDFPGYNLSGAVASFLFILLTMKQSEKLQTELASLKVNGPSQPILVRVGEDIQLTCYLSPKANAQSMEVRWDRSHRYPAVHVYMDGDHVAGEQMAEYRGRTVLVSDAIDEGRLTLQILSARPSDDGQYRCLFEKDDVYQEASLDLKVVSLGSSPLITVEGQEDGEMQPMCSSDGWFPQPHVPWRDMEGKTIPSSSQALTQGSHGLFHVQTLLRVTNISAVDVTCSISIPFLGEEKIATFSLSGW

SEQ ID NO: 116148 - protein, 259 aa, Artificial Sequence
  derived and/or modified sequence
MVDFPGYNLSGAVASFLFILLTMKQSEDFRVIGPAHPILAGVGEDALLTCQLLPKRTTMHVEVRWYRSEPSTPVFVHRDGVEVTEMQMEEYRGWVEWIENGIAKGNVALKIHNIQPSDNGQYWCHFQDGNYCGETSLLLKVAGLGSAPSIHMEGPGESGVQLVCTARGWFPEPQVYWEDIRGEKLLAVSEHRIQDKDGLFYAEATLVVRNASAESVSCLVHNPVLTEEKGSVISLPEKLQTELGKYEVLAHTCGGSLCP

SEQ ID NO: 116149 - protein, 211 aa, Artificial Sequence
  derived and/or modified sequence
KANAQSMEVRWDRSHRYPAVHVYMDGDHVAGEQMAEYRGRTVLVSDAIDEGRLTLQILSARPSDDGQYRCLFEKDDVYQEASLDLKVVSLGSSPLITVEGQEDGEMQPMCSSDGWFPQPHVPWRDMEGKTIPSSSQALTQGSHGLFHVQTLLRVTNISAVDVTCSISIPFLGEEKIATFSLSESRMTFLWKTLLVWGLLLAVAVGLPRKRS

SEQ ID NO: 116150 - protein, 211 aa, Artificial Sequence
  derived and/or modified sequence
KANAQSMEVRWDRSHRYPAVHVYMDGDHVAGEQMAEYRGRTVLVSDAIDEGRLTLQILSARPSDDGQYRCLFEKDDVYQEASLDLKVVGLGSSPLITVEGQEDGEMQPMCSSDGWFPQPHVPWRDMEGKTIPSSSQALTQGSHGLFHVQTLLRVTNISAVDVTCSISIPFLGEEKIATFSLSESRMTFLWKTLLVWGLLLAVAVGLPRKRS

SEQ ID NO: 116151 - protein, 482 aa, Artificial Sequence
  derived and/or modified sequence
MVDFPGYNLSGAVASFLFILLTMKQSEDFRVIGPAHPILAGVGEDALLTCQLLPKRTTMHVEVRWYRSEPSTPVFVHRDGVEVTEMQMEEYRGWVEWIENGIAKGNVALKIHNIQPSDNGQYWCHFQDGNYCGETSLLLKVAGLGSAPSIHMEGPGESGVQLVCTARGWFPEPQVYWEDIRGEKLLAVSEHRIQDKDGLFYAEATLVVRNASAESVSCLVHNPVLTEEKGSVISLPEKLQTELASLKVNGPSQPILVRVGEDIQLTCYLSPKANAQSMEVRWDRSHRYPAVHVYMDGDHVAGEQMAEYRGRTVLVSDAIDEGRLTLQILSARPSDDGQYRCLFEKDDVYQEASLDLKVVSLGSSPLITVEGQEDGEMQPMCSSDGWFPQPHVPWRDMEGKTIPSSSQALTQGSHGLFHVQTLLRVTNISAVDVTCSISIPFLGEEKIATFSLSESRMTFLWKTLLVWGLLLAVAVGLPRKRS

SEQ ID NO: 116152 - protein, 245 aa, Artificial Sequence
  derived and/or modified sequence
MVDFPGYNLSGAVASFLFILLTMKQSDRLDTPKASLKVNGPSQPILVRVGEDIQLTCYLSPKANAQSMEVRWDRSHRYPAVHVYMDGDHVAGEQMAEYRGRTVLVSDAIDEGRLTLQILSARPSDDGQYRCLFEKDDVYQEASLDLKVVSLGSSPLITVEGQEDGEMQPMCSSDGWFPQPHVPWRDMEGKTIPSSSQALTQGSHGLFHVQTLLRVTNISAVDVTCSISIPFLGEEKIATFSLSGW

SEQ ID NO: 116153 - protein, 178 aa, Artificial Sequence
  derived and/or modified sequence
MEVRWDRSHRYPAVHVYMDGDHVAGEQMAEYRGRTVLVSDAIDEGRLTLQILSARPSDDGQYRCLFEKDDVYQEASLDLKVVSLGSSPLITVEGQEDGEMQPMCSSDGWFPQPHVPWRDMEGKTIPSSSQALTQGSHGLFHVQTLLRVTNISAVDVTCSISIPFLGEEKIATFSLSGW

SEQ ID NO: 116154 - protein, 245 aa, Artificial Sequence
  derived and/or modified sequence
MVDFPGYNLSGAVASFLFILLTMKQSDRLDTPKASLKVNGPSQPILVRVGEDIQLTCYLSPKANAQSMEVRWDRSHRYPAVHVYMDGDHVAGEQMAEYRGRTVLVSDAIDEGRLTLQILSARPSDDGQYRCLFEKDDVYQEASLDLKVVGLGSSPLITVEGQEDGEMQPMCSSDGWFPQPHVPWRDMEGKTIPSSSQALTQGSHGLFHVQTLLRVTNISAVDVTCSISIPFLGEEKIATFSLSGW

SEQ ID NO: 116155 - protein, 245 aa, Artificial Sequence
  derived and/or modified sequence
MVDFPGYNLSGAVASFLFILLTMKQSEKLQTELASLKVNGPSQPILVRVGEDIQLTCYLSPKANAQSMEVRWDRSHRYPAVHVYMDGDHVAGEQMAEYRGRTVLVSDAIDEGRLTLQILSARPSDDGQYRCLFEKDDVYQEASLDLKVVGLGSSPLITVEGQEDGEMQPMCSSDGWFPQPHVPWRDMEGKTIPSSSQALTQGSHGLFHVQTLLRVTNISAVDVTCSISIPFLGEEKIATFSLSGW

SEQ ID NO: 116156 - protein, 178 aa, Artificial Sequence
  derived and/or modified sequence
MEVRWDRSHRYPAVHVYMDGDHVAGEQMAEYRGRTVLVSDAIDEGRLTLQILSARPSDDGQYRCLFEKDDVYQEASLDLKVVGLGSSPLITVEGQEDGEMQPMCSSDGWFPQPHVPWRDMEGKTIPSSSQALTQGSHGLFHVQTLLRVTNISAVDVTCSISIPFLGEEKIATFSLSGW

SEQ ID NO: 116157 - protein, 455 aa, Artificial Sequence
  derived and/or modified sequence
MVDFPGYNLSGAVASFLFILLTMKQSEDFRVIGPAHPILAGVGEDALLTCQLLPKRTTMHVEVRWYRSEPSTPVFVHRDGVEVTEMQMEEYRGWVEWIENGIAKGNVALKIHNIQPSDNGQYWCHFQDGNYCGETSLLLKVAGLGSAPSIHMEGPGESGVQLVCTARGWFPEPQVYWEDIRGEKLLAVSEHRIQDEDGLFYAEATLVVRNASAESVSCLVHNPVLTEEKGSVISLPEKLQTELASLKVNGPSQPILVRVGEDIQLTCYLSPKANAQSMEVRWDRSHRYPAVHVYMDGDHVAGEQMAEYRGRTVLVSDAIDEGRLTLQILSARPSDDGQYRCLFEKDDVYQEASLDLKVVGLGSSPLITVEGQEDGEMQPMCSSDGWFPQPHVPWRDMEGKTIPSSSQALTQGSHGLFHVQTLLRVTNISAVDVTCSISIPFLGEEKIATFSLSGW

SEQ ID NO: 116158 - DNA, 1368 bp, Artificial Sequence
  derived and/or modified sequence
atggttgattttcctggttataatctttccggagctgttgcatcatttctctttatcctactgaccatgaagcagtctgaagacttcagagtgatcggccccgcccaccccatactggccggagtcggcgaggacgccctcctcacctgtcaactgctccctaaacgaactactatgcacgtcgaggtgagatggtaccggtcagagccctcgacccccgttttcgtgcaccgggatggagtggaagtgactgagatgcaaatggaggaataccggggctgggtggagtggatcgaaaacggcattgcgaaaggcaacgttgccctcaaaattcataacatccagcccagcgacaatgggcagtattggtgccactttcaggacggcaattattgcggtgaaacgagcttacttctgaaggtagcggggttgggaagtgcccccagtatacatatggagggacccggggagtctggggttcagctggtgtgcacagcccgcgggtggttcccggagccacaggtgtattgggaggatatccgcggggaaaaactgctagccgtcagcgaacatcggattcaggataaggacggtctcttttacgcagaggcgacattggtagttcggaatgcctccgcggaatctgtgagttgcttagtgcataaccccgtgttaacagaggagaagggctccgtgatttcactgccagagaagttgcagaccgagcttgcttccctgaaagtcaacggaccctctcaacctattctcgtacgcgttggtgaggatatacagctgacctgttacctctcacctaaagccaacgctcaatccatggaggtgcggtgggacagatcacaccggtatccagctgttcacgtgtacatggacggtgaccatgtggcaggggaacagatggccgagtacagagggaggaccgtattagtgagcgacgctatcgatgagggccggctgaccctgcagattctgtcagcccggccatccgatgacgggcaatacagatgtcttttcgagaaggacgatgtttatcaggaggcttctctggatttgaaagttgtcagtctgggtagttcgccactcattaccgtggaagggcaggaggatggggagatgcagcctatgtgctcctctgatggctggtttccccagccccacgtaccatggcgggacatggagggaaagactatcccaagctcaagccaggccctgactcagggaagccatggactctttcacgtccagaccctcctgagggtcaccaatattagtgccgtagatgtgacttgttctatttctatcccctttcttggggaagaaaagatcgctactttctcccttagcggatggtag

SEQ ID NO: 116159 - DNA, 738 bp, Artificial Sequence
  derived and/or modified sequence
atggtggattttccgggctataatctgagtggagccgtagcttcttttctttttatcttgctcactatgaagcaatcagagaaactgcagacggagctggcatcattgaaagtcaacggccctagtcagcccatattagtgagagtcggtgaggacattcaactcacctgctacctttcacccaaagcaaacgctcagagcatggaagtgcgctgggaccgatcccataggtatccagcagttcatgtttacatggatggcgaccatgtagccggggagcagatggctgagtaccgcgggaggaccgttctagtaagcgatgcgatcgacgagggtcgactgacactgcagatcctgagtgctagaccatcagatgatggccagtaccgctgcttatttgaaaaggatgacgtttatcaggaagcctccttggacctcaaagtggtttcattggggagctcccctcttattacagttgagggacaagaggacggagaaatgcaaccgatgtgttccagtgatggttggtttccccagccgcacgtcccatggagggacatggaaggcaaaaccattccgagcagttcccaggcattaacccaaggatcccacgggttgtttcatgttcagaccctgttgagagtgacgaacatttctgccgtcgatgtcacatgttcaataagcatccccttcttgggcgaagaaaaaattgcaaccttcagtctctcaggatggtag

SEQ ID NO: 116160 - DNA, 636 bp, Artificial Sequence
  derived and/or modified sequence
aaggccaacgcccaatccatggaggtgaggtgggaccgctcacacagatacccagcagtgcatgtatatatggacggagatcatgtggctggagagcagatggccgagtacagagggagaacggttttggtttctgatgctatcgacgagggacgtctgactcttcagattctgagtgctagaccttctgatgacgggcaatatcgatgtctgttcgaaaaggacgacgtctatcaggaagcttcactcgacctgaaggttgtgtctttgggatcctctcctttgatcacagtggaaggacaagaagatggggaaatgcagcccatgtgctcctctgatggttggttcccgcagccacacgtgccttggagagatatggagggtaagacgatcccaagctcctcccaggccttaactcagggtagtcatggcttgttccacgtgcagactttactgcgggtgacaaacatctctgcagtagatgtgacctgtagcatctccatccccttccttggagaggaaaagatcgctaccttcagcctgagcgagtccagaatgactttcctgtggaagacattactggtctgggggcttctgctggccgtggcagtgggacttccccgcaagcggtcatag

SEQ ID NO: 116161 - DNA, 636 bp, Artificial Sequence
  derived and/or modified sequence
aaggctaatgcacagtctatggaggtgcggtgggataggtcccaccgctacccggcagttcacgtatacatggatggggaccacgtagctggggaacagatggccgagtatcgtggacgtaccgtgctggtctccgatgccatagatgaaggccggctgactctccagattctgtccgcgcgcccttctgacgatggacagtacaggtgtctgttcgagaaggatgacgtatatcaggaagcgtctctcgacctgaaggttgtcggattaggaagcagtccactaattaccgtggaaggacaagaagatggggagatgcagcccatgtgttcaagcgacggatggtttccgcagccccatgtaccatggagagacatggaagggaaaaccatcccaagcagtagtcaagcgctgacccaggggtctcacggcttgttccatgttcaaacattgctcagagtgacaaacatttctgcagtggatgtcacctgtagcatcagcatcccttttcttggggaagagaaaatcgccactttctccctgtcagagagccggatgactttcctgtggaagacactgttagtctggggtctgctgctggctgtcgctgttggcttgcctcgaaagagaagctag

SEQ ID NO: 116162 - DNA, 636 bp, Artificial Sequence
  derived and/or modified sequence
aaggctaacgctcagtcaatggaagtgcggtgggatcgctcacaccgttacccagccgtgcacgtgtacatggacggggatcacgtggcaggcgagcagatggctgagtacaggggccggactgtcctcgtctcggacgcaatcgatgagggacgattgacactgcagattctgtctgcccgtcctagtgacgacggacagtatcggtgtctgtttgagaaagacgatgtctatcaggaggccagcctggacctgaaggttgtcgggcttggcagctccccgctgatcacggtggaaggccaggaagatggcgaaatgcagcccatgtgttctagcgatggctggttcccacaacctcacgtgccctggagagacatggagggcaaaacaatcccatcctcctctcaagcccttactcagggtagccatggcctcttccatgtccaaaccttgctgcgcgtgactaatatcagtgccgtcgacgtgacatgtagtatttccatcccgttcctgggggaagagaagatcgctacattcagcctgagcgaatcccggatgacatttctatggaaaactttgttagtgtggggacttctcttggccgtggcagtgggcttacctaggaaacggagctag

SEQ ID NO: 116163 - DNA, 636 bp, Artificial Sequence
  derived and/or modified sequence
aaggctaatgcacaaagcatggaagtacgctgggaccgcagtcaccgttacccggccgtgcacgtgtacatggatggcgatcacgtagcaggcgaacaaatggcagagtaccggggtcgcacggtgttggtatctgatgcaatcgacgagggcaggctcaccctgcagatcctgtctgccaggccgtccgatgatggccagtatagatgcttattcgaaaaagatgatgtgtaccaggaggctagcctcgacctaaaagtggtaggattgggcagctcgcccctcatcacggtggagggtcaggaggatggcgaaatgcagccaatgtgctcttccgacgggtggttcccccagccccacgtcccctggcgggatatggagggcaaaacgatccccagttcctcgcaggctctgacccaagggtctcacggcctgtttcatgtgcagactttgttgcgggttactaacattagtgcagttgatgtgacatgctctatcagtatcccctttttaggagaggaaaagattgccacctttagtctatctgaatcccggatgacgtttttgtggaagacgctactggtgtggggcctgctgttggccgtcgcagtgggcctaccccgcaaaaggtcctag

SEQ ID NO: 116164 - DNA, 636 bp, Artificial Sequence
  derived and/or modified sequence
aaagccaacgcacagtcaatggaggttaggtgggacagaagccacaggtaccccgcagtgcatgtgtatatggacggggaccatgtggcaggggagcagatggcggagtatcgcggaagaacagtgctggttagcgacgctatcgatgaaggccggcttacactccagatactttcagcccgcccgtctgatgacggacagtatcgttgtctctttgagaaagatgacgtataccaggaggcgtccttggatctcaaggttgtttctcttgggtcttccccgcttattaccgtggagggacaggaggacggtgagatgcagcccatgtgctcttcagacggttggttcccccagcctcacgtgccgtggcgcgacatggagggcaagactattccaagttcatcacaggccctgacccaggggtcccatgggcttttccatgtgcagaccctgctgcgcgtgactaacatcagcgcggttgatgttacttgttcaatatcgattccattcctaggagaggaaaaaattgccaccttttctctgtctgaaagccgcatgacatttctttggaaaaccctgctggtgtggggtctacttctggccgtcgcggtcgggctgcctcgaaagagaagctag

SEQ ID NO: 116165 - DNA, 636 bp, Artificial Sequence
  derived and/or modified sequence
aaggccaacgcccagagtatggaggttaggtgggatcggtcccaccgctatccagccgtccatgtgtacatggatggcgaccacgtcgccggagagcagatggccgaatatcgtggcaggactgtgttggtgagcgacgcaattgatgagggtcgactgacactccaaatcctgagtgctaggccatccgacgacggacaatatagatgcctatttgagaaggatgatgtgtaccaggaagcatcgctggacttgaaggtcgtgtctctgggcagttctccactcattacagtggaagggcaggaggacggggaaatgcagcctatgtgcagtagcgatggctggttcccgcagccccatgtcccatggagggacatggaaggtaagaccatcccctcctccagtcaggccctgacgcagggttcacacggcctattccacgtccagacactcctccgcgtcactaatatctctgcggtcgatgtgacctgctcaatttccatcccattccttggggaagaaaaaattgcaacgttctctctatccgaatcccggatgacctttctgtggaaaacactgctggtgtggggcttactcttggccgtggcggtagggctcccaagaaagcgctcatag

SEQ ID NO: 116166 - DNA, 636 bp, Artificial Sequence
  derived and/or modified sequence
aaagctaatgctcagagtatggaggtgcgatgggataggtcacacagataccccgccgtacacgtgtacatggacggggaccatgtcgccggggagcagatggccgaatacagaggccgaactgtgctcgtgagcgacgccatcgatgagggacgcctcactctgcaaatactttccgcccgccctagcgatgatgggcagtataggtgcttattcgaaaaggatgacgtgtaccaggaagcaagtctagatctcaaggtggtttctctagggagctcccctctaatcacagtggaagggcaggaggacggggaaatgcagcctatgtgctcatccgacggctggttccctcaaccacacgttccctggagggatatggaaggcaagaccatcccaagtagtagtcaagcgctcacacagggctctcatgggctgtttcacgtgcagactctgctgagggtgactaacatcagcgcagtcgacgtgacttgctctatatcaatacccttcctgggggaagaaaaaatcgcgaccttctccctctcagaaagtcggatgacattcctttggaagacactgctggtgtgggggctgctcttggcagttgcagtgggtttgccaaggaaaaggtcatag

SEQ ID NO: 116167 - DNA, 1449 bp, Artificial Sequence
  derived and/or modified sequence
atggtcgattttcctggatataatctgagcggggccgtggcctccttcttgtttattctgcttacgatgaaacagtcagaagattttagagtaatagggcccgcccatcctatactcgccggggtgggagaggatgcactactgacatgccagcttttgcccaagcggaccactatgcacgttgaggtgagatggtatcggtccgagcccagtacaccagtgttcgtacaccgagatggcgtggaggtgactgagatgcagatggaagagtacagaggatgggtagagtggatcgagaacgggattgcgaaagggaatgtggctttgaagatccacaacatacaacctagtgacaatggtcagtactggtgtcattttcaggacggcaattattgcggagaaaccagtctgttgctgaaagtggccggactggggagcgcaccctctattcatatggaagggcctggcgaaagcggagtacaactggtttgtaccgctcgcgggtggttccccgaacctcaggtgtactgggaagatatcaggggtgaaaaactgcttgcagtctccgagcacagaatacaggataaagacggtctattttacgctgaagcgactctcgtagtgcgcaacgcatctgctgaaagcgtaagctgtctcgttcataacccggtgttgaccgaggagaaaggctcagtcatttccctgcccgagaagctgcagacagaattagcaagtctgaaggtgaacggacctagtcagcctatactggtgagggtgggcgaggatatccaattgacttgctaccttagtccaaaagctaacgcacaaagcatggaagtgcggtgggacagaagtcatcgatatccagcggtgcatgtctatatggacggcgaccacgtcgctggcgagcagatggccgagtataggggcagaaccgttttggtgagcgacgcgatagatgagggtaggttaacacttcaaattctgagcgcccgccccagtgatgacggccagtatcgctgtctcttcgaaaaggacgatgtgtaccaagaagccagcctcgatctgaaagttgtgtcactgggctcatccccgttgatcactgtagaaggccaggaggatggcgaaatgcagccaatgtgctccagtgatgggtggttccctcagcctcacgtaccatggagagatatggaaggtaaaacaataccctcctcttcacaggcgctgacccagggatcccacggtctattccatgttcaaaccctcctgagagttacaaatatttcagccgttgacgtcacttgctccatttccataccatttcttggcgaggagaaaatagcaacattctcactaagcgaaagtaggatgacctttttgtggaaaacactgctcgtttgggggctgctgctggccgtggcggtgggactccctcgaaagcgctcatag

SEQ ID NO: 116168 - DNA, 738 bp, Artificial Sequence
  derived and/or modified sequence
atggtggatttccccggctacaatctttcaggagctgtggcttcatttctgtttattctccttacaatgaaacaatccgaccgtctggatacgccaaaggcctcgctcaaggtgaacggccctagccagccaatcctggtgcgcgtgggagaggacattcagctgacatgctacctaagccctaaggctaatgcccagtctatggaagtccgatgggatcgcagccaccgctacccagccgtgcatgtctacatggacggggaccacgtagccggcgagcaaatggctgaataccgagggcggactgttcttgtgtcagacgccatcgatgaaggccggctgactctgcagattttatccgccagaccttcagacgacgggcaataccgctgcctgttcgaaaaggatgacgtgtaccaggaagcttctctggatttaaaagtggtaagtctcggatctagccccttgatcactgtcgagggccaggaggacggtgaaatgcagcctatgtgcagctccgatggctggtttcctcagcctcacgtcccctggagggatatggaaggaaagactataccgagtagtagtcaggctcttacacaaggttcacacgggcttttccacgtgcaaactttacttagggtgacaaatatcagcgccgtagatgtcacttgttcaatcagtattccattcctgggcgaggaaaagattgccacattttcgctgagtggttggtag

SEQ ID NO: 116169 - DNA, 537 bp, Artificial Sequence
  derived and/or modified sequence
atggaggttagatgggatcggtcacatagataccccgcagtgcatgtttatatggacggcgatcatgtcgctggagagcagatggcagagtaccgcgggagaaccgtcctggtcagtgacgccatcgatgagggacgattgacactccaaatcttgtctgctcggccctccgacgacggacagtaccggtgcttgtttgagaaggacgatgtttaccaggaagcctctctggacttaaaagtggtctccctgggctcttcacccttgattaccgtcgaagggcaggaagatggtgagatgcagcccatgtgcagctctgacggatggttccctcagcctcatgtcccctggcgcgacatggaaggtaagacaattccttcgtcctcgcaggctctgacccaaggctcacatggtctttttcacgttcaaacactactgcgcgttaccaatatttccgccgtggatgtcacttgtagtatctcaattccatttctcggcgaggagaagatcgcgacctttagtttaagcggatggtag

SEQ ID NO: 116170 - DNA, 738 bp, Artificial Sequence
  derived and/or modified sequence
atggttgacttccccgggtataacctgtcaggcgccgtcgcgtcattcttatttatccttctcacgatgaaacagtccgaccggttagatactcctaaggcctcactcaaggtcaacggacccagtcagcctattttggtgcgtgtaggcgaagacattcagctcacctgctacctgtcacccaaggctaacgctcagagtatggaggtacgctgggatagatctcacaggtacccagctgtgcacgtatacatggacggagaccatgtggccggagagcagatggccgaataccgcggccggaccgttctcgtctccgacgcaattgacgaggggcgtctaacactgcagatactctctgccaggccatcagacgatgggcagtatcgctgcctcttcgaaaaagacgacgtgtatcaagaagcaagcctggatctgaaagttgtggggcttgggtcatcccctctgatcacagtcgagggccaggaggacggcgagatgcagcctatgtgtagcagcgacggttggtttccgcagccacatgtcccctggcgggatatggaagggaaaaccattcctagcagctcgcaggccttgacccaaggttcccatggcttgttccacgtccagacactgttgcgcgtaacaaatatctctgccgtcgacgtcacttgttcaatttctataccctttctgggtgaagaaaagatcgctacgttcagcctatcgggatggtag

SEQ ID NO: 116171 - DNA, 738 bp, Artificial Sequence
  derived and/or modified sequence
atggtggacttcccaggctataacctctccggcgccgtggcttctttcttgttcatcttactaacgatgaaacagagtgatagactagataccccgaaggcaagcttgaaggtcaatggcccgagccagcccatactagttagagtgggtgaggacatccagctcacctgctatctcagcccaaaggccaacgcacagtccatggaagtgcggtgggacaggagtcatcggtaccctgccgtccacgtgtacatggacggcgaccatgtggccggtgaacagatggctgaatataggggaagaacggttctcgtctcagacgctattgatgaaggtaggctaacgcttcagatactgtccgcaagaccaagcgacgatggccagtataggtgtctcttcgagaaagacgatgtttatcaggaagcatccctcgacctgaaggtggtcagtctcggaagctctcctctgattacagttgagggccaagaagacggtgagatgcagccaatgtgctcaagcgatggatggttcccgcaaccgcacgttccttggcgggatatggagggaaaaactatcccttccagctcccaagcattaacacaggggtcccacggactgtttcatgttcagaccttgctgagagtcactaacatcagcgctgtggatgtcacatgttctatctctattccttttctgggtgaggaaaagatagccactttctcactcagcggctggtag

SEQ ID NO: 116172 - DNA, 738 bp, Artificial Sequence
  derived and/or modified sequence
atggtggactttccaggttacaacctttctggcgccgtcgcatcattcctttttatcctcctgaccatgaaacaaagcgagaagcttcagacggaattggcttcactcaaggttaacgggccctcacaacctatactcgttcgggtgggcgaggacatccaactgacgtgttacctgtctcccaaggctaacgctcagtctatggaagtgagatgggatcgctcccacagatacccggcagtgcacgtctatatggacggagaccatgtggccggtgagcaaatggccgagtatcgagggaggacggtgttggtgtctgatgccatcgatgaaggcaggttgacactgcagatcctgagcgctaggccaagcgatgacgggcagtacaggtgccttttcgagaaggatgacgtgtatcaggaggcaagcttagatttgaaagttgtgggcctcggctcaagcccattaattacagtggaggggcaagaggacggcgaaatgcagccgatgtgttcatcagatggctggtttccccagccccacgtgccctggcgggacatggaggggaagaccattccaagcagctctcaggccctgacccaaggatcccatgggctatttcacgtgcagaccctgcttcgagttacgaacatcagtgcagtggatgtcacgtgttccatttccattccgttcctcggcgaagaaaagatcgccacctttagcttaagcggctggtag

SEQ ID NO: 116173 - DNA, 537 bp, Artificial Sequence
  derived and/or modified sequence
atggaagtccgatgggacaggtcgcataggtaccccgccgtgcatgtgtacatggacggagaccatgtggccggagaacagatggcggaatacaggggccggacggtgctcgtcagcgacgctatagacgaggggcgcctcactttgcagattcttagcgcaagaccctcagacgacggccaatatagatgtctgtttgaaaaggacgacgtttatcaggaggccagcctcgatttaaaagtcgtgggcctgggctcatcacccttaatcaccgtggagggtcaggaggacggcgaaatgcagcctatgtgttcctcagatggatggtttccgcagccccacgttccttggcgcgatatggaggggaaaaccataccttcaagtagtcaggccctgactcagggcagccacgggttattccatgtgcaaactctcctgcgggtgacaaacatcagcgcagtcgacgttacgtgttcgatttccattccatttctgggcgaagagaagattgccacgttctccctcagtggatggtag

SEQ ID NO: 116174 - DNA, 738 bp, Artificial Sequence
  derived and/or modified sequence
atggtggatttccctggctacaacctgtccggggccgtggccagtttcctttttatattgctgacgatgaaacagtctgaccgactggatactccaaaagcgtcgctgaaagttaacggtccctcacagcccatcttagtccgggttggagaggatatccagctcacttgctacctctcacctaaagcaaatgctcagtcaatggaggtcagatgggataggtctcatcgttatcccgcagtgcatgtctatatggatggcgatcacgtggctggcgagcagatggcagagtaccgaggccggactgtgctggtaagtgatgccatcgatgaggggaggctgaccctgcagatcctgagcgctaggcccagcgacgatgggcagtatagatgtctgttcgaaaaagatgacgtgtatcaggaggcatctctagatcttaaagtggtcagcctaggctcatctccactgatcacagttgaaggccaggaagatggcgagatgcaacctatgtgcagtagcgacggttggtttccccagccccacgtgccatggcgggacatggagggcaaaactatcccatcgtcatcacaagccctcactcaggggagtcatggactgttccacgtgcagactctcctacgagtcacaaacatttccgctgttgacgtgacgtgctcaatatcaattcccttcctgggagaggagaagatcgctactttctcgctgtccggctggtag

SEQ ID NO: 116175 - DNA, 1368 bp, Artificial Sequence
  derived and/or modified sequence
atggtggatttccctggttacaatttgtcgggcgcggttgcttcatttctttttattctgctgactatgaaacagtccgaagacttccgggtaattggccccgcccatccaatccttgccggagtaggtgaagacgcactgctgacatgtcagctgctaccaaaacgaacgactatgcacgtggaggtgagatggtacagaagcgagcccagtacgccagtgttcgtccatcgggacggtgtggaagtcaccgaaatgcagatggaggaatatcgcgggtgggtcgaatggattgagaacggaatcgccaaggggaatgtggcactcaagattcacaatattcagccgagcgacaacggacagtactggtgccattttcaggatggcaactattgcggcgaaaccagtctgctgctcaaagtggccgggttgggaagtgctccttctattcacatggagggacccggtgaatcaggcgttcaacttgtgtgtacagcgcgtgggtggtttcctgagccccaagtttactgggaggacatccgcggcgagaagctgctcgccgtgtctgagcacagaatccaggatgaagacggactgttctatgccgaagctacgctggtcgtacgtaatgcgtcagcagaatccgtctcctgtctggtccacaatcccgtcttgaccgaggaaaaggggtccgtgattagcctgccggagaaactacagactgaactcgcttcccttaaagtgaatggcccctcccagcctattctggtcagagtgggagaagatatccaactgacttgctatcttagccccaaagctaacgctcagagcatggaagtccggtgggataggtctcatagatatcccgctgtgcacgtgtacatggacggggaccatgtggccggagaacagatggcggagtaccgtggacggaccgtcctagtgtccgacgctatcgacgagggtcgactgactctgcaaattctttcagcgcggccatctgatgatggccagtataggtgtctgttcgagaaagatgacgtctatcaagaagcctcgctggatctgaaagtggtcggattggggtcaagcccgcttataaccgtcgaaggccaggaggatggcgagatgcagccgatgtgctcaagtgatggttggttcccccagccccatgtgccctggagagacatggagggcaagacgataccttcatcttcgcaggccctcacccaggggtcccatgggctgttccacgtgcagactttgctgcgggtgaccaacatttccgctgtggatgtgacgtgcagtatctcaattccattcctcggagaagaaaaaatcgctaccttctccctctcaggctggtag

SEQ ID NO: 116176 - DNA, 738 bp, Artificial Sequence
  derived and/or modified sequence
atggtggatttcccaggctacaacctgtctggtgctgtagcttcatttctgttcattttactaaccatgaagcagagcgatcgcctggatacacctaaggcctccttgaaagtgaacggaccatcacagcctatcctggtacgggtgggggaagacattcagctgacctgctacctgtcccctaaagcaaacgcacaatctatggaggtgcgatgggaccgctcccatagataccccgcggtgcacgtgtacatggatggggaccacgtggctggagaacagatggcagagtatcgggggcggacagtcctcgtttccgatgcaattgacgagggcagactgacactgcaaattctgagcgcccggccatccgatgacggacagtaccggtgcctgttcgaaaaggatgatgtgtatcaggaggcatccttagatcttaaagtcgtaagcttgggtagctctcctcttatcacagtcgagggacaggaggacggcgaaatgcaaccaatgtgcagttctgacggatggttccctcagccgcacgtcccatggcgtgatatggaggggaagacaataccaagctcatcgcaagctctgactcaggggtctcacgggctgttccatgtccagacacttttgcgagtcactaacattagcgctgtggacgtaacgtgttccatctccattcccttcctgggcgaggagaagatcgctactttcagcctgagtggctggtag

SEQ ID NO: 116177 - DNA, 738 bp, Artificial Sequence
  derived and/or modified sequence
atggtagactttcccgggtataacctgtccggagccgtggctagtttcctgtttatccttctcactatgaagcagtcggacagactggacacccccaaggccagcctgaaagtcaacgggccctcgcagccaatcctcgtgcgagtaggtgaagacatacagctcacatgctacctgagccctaaagccaacgctcagtctatggaagtcagatgggataggtctcaccgctaccccgctgttcatgtgtatatggatggcgatcatgttgcaggggagcaaatggctgagtatcgcggcaggacagtgcttgtctcagacgcgatcgatgagggccggttgaccctgcaaattcttagcgcccgcccctccgatgatggccagtacaggtgcctattcgaaaaggacgatgtctaccaggaagccagcttggatttgaaggttgtaggactgggctcaagccctttgattaccgtggagggccaggaggacggtgagatgcagccaatgtgctctagtgatggttggttcccacagccccacgtgccctggagagatatggagggcaaaacaatcccatccagctcacaggcgctcacgcagggatcccacgggctgtttcatgtgcagaccttgctgcgcgtgactaacatcagcgcggtagatgttacctgctcaatttcaattccatttctaggggaagaaaagattgccacgttcagcctcagtggctggtag

SEQ ID NO: 116178 - DNA, 738 bp, Artificial Sequence
  derived and/or modified sequence
atggtggattttcctggttacaacttaagcggagccgtcgcctcgttcctgttcatcctgctgaccatgaagcagagtgaccgactggacaccccaaaggccagcctgaaggtcaacggaccttcgcagccaatcctcgtacgcgttggtgaagatattcagctgacctgttatctgtcccctaaagcaaatgctcagtccatggaagtgcgctgggaccggtcacaccgatatcctgctgtgcatgtctacatggacggtgatcacgtggccggagaacagatggcagagtataggggaagaaccgtcttggtgagcgacgccatagacgagggacgactcaccctccagattctgtcagctagacccagcgacgatggacagtaccgatgtttatttgaaaaggacgacgtgtaccaggaagcctccttggacctgaaggttgtgagtctcgggtcttcgcctctgattactgttgaaggccaggaggacggggagatgcagccaatgtgctcctcagacggatggttcccccagccgcacgtgccctggagggacatggaggggaagaccatcccatcatcctcacaggccctaacccagggatcccacgggctgtttcacgtacaaacccttctgcgggtaaccaacatttctgctgtggatgtcacctgctccatatcaattccatttttgggcgaggaaaaaatcgctacgttcagcttaagcgggtggtag

SEQ ID NO: 116179 - DNA, 1368 bp, Artificial Sequence
  derived and/or modified sequence
atggttgacttccctgggtacaacctcagcggcgccgttgcgtcttttctgtttatcctcttgacaatgaaacagtcagaagatttccgcgtaatcggcccagcgcaccccattctcgctggggttggggaggacgcactccttacatgccagttactgcctaaacgtaccacaatgcacgtggaggtcagatggtacaggagcgaaccttctacacccgtttttgttcacagggacggggtggaagttaccgagatgcagatggaagagtatagaggatgggtggagtggatagagaatggcatcgccaaaggtaacgtggcactgaagattcataacattcagccttccgacaacggccagtactggtgccactttcaagacggcaattattgcggtgaaactagtttactcctgaaagtggctgggttaggctctgccccaagtatacacatggaaggccctggagaatcaggtgtgcagctcgtttgtacggcaagaggatggttcccagagccacaagtatactgggaagacattaggggggagaagttgcttgctgtgtctgaacataggatccaggataaggatggcttattctacgctgaggcaactctagttgtacgtaatgccagcgccgagtctgtttcatgcctggtgcacaacccagtgctgacagaagaaaagggctcggtcatctctctgcctgagaagctacaaacagagttggccagcctgaaagttaacggaccgtctcagcctatactggtgcgcgtgggcgaggatatacagcttacctgctacctttcgcccaaagccaacgctcagtcgatggaggtgcgctgggatcgctcacacaggtatccagctgtacatgtctatatggatggtgaccacgtggccggggagcaaatggcggagtaccggggccgtactgttttggtatccgatgctatcgatgagggccgtctgaccctgcagatcttgagtgctagaccctccgatgatggacagtaccgctgtctttttgaaaaggacgacgtgtaccaggaggccagcctggacttgaaggtggtgtcactgggctcctctcccctgatcaccgtggagggccaggaggatggcgagatgcagcccatgtgttcgtctgacggctggttcccacaaccccacgtgccatggcgtgacatggagggtaagactattcctagcagctcacaagccctgacccaggggagtcatggcctgttccatgttcaaacactgctacgtgtgactaacatcagcgccgtagacgtcacctgttcaatttctatacccttcctaggagaagaaaaaattgcgactttcagcttatcgggctggtag

SEQ ID NO: 116180 - DNA, 1368 bp, Artificial Sequence
  derived and/or modified sequence
atggtggatttcccagggtataatctgagtggtgcagtcgcttcttttctgttcattctgttaactatgaaacagtcagaggatttccgcgtgataggacccgctcatcccatacttgcaggggtgggcgaggatgctctccttacttgccagttgttgccaaagcgaactaccatgcacgtggaagtgagatggtatcgatccgagccctcgactcctgtttttgtgcaccgggacggggtcgaggtgaccgaaatgcagatggaggagtataggggctgggttgagtggatcgagaacggaatcgctaaggggaatgttgcattgaagatccataacatccagccaagtgataacggtcagtactggtgtcatttccaagatggaaattattgcggagagaccagcctgctcctcaaggtcgctgggttgggaagcgcccccagcattcacatggagggtcccggcgagtccggcgtgcagctagtttgtaccgctcgtggctggtttcccgaacctcaggtgtattgggaggatattcgtggtgaaaaactgctggcggtatccgaacaccgtattcaggataaggacggtctgttctacgccgaggccacacttgtagttcggaacgcctcagccgagtctgttagctgcctggttcataatccagttctaacagaggagaaaggtagtgtgataagtttgcccgaaaagctgcaaaccgagctggctagcctgaaggttaacggtccctcccaaccgattctggtcagagtgggggaggatattcagctgacctgctatttgagtccaaaagctaatgcacaaagcatggaggtgagatgggatcggagccatcgttacccagctgtgcatgtctatatggatggggaccacgtggccggcgagcagatggccgagtaccggggccggactgtgctcgtgtctgacgcgatcgatgagggaaggctgaccctgcagattcttagtgccaggccatcggatgacgggcagtaccgctgtctattcgaaaaagatgatgtgtatcaggaggcatcgcttgacctcaaagtggtctctctggggtcttctcctttaatcacagtcgaaggacaagaggatggggagatgcagccgatgtgctcgtctgatggctggttcccacagccacacgtaccgtggcgcgatatggaagggaagaccatcccctcctcgtctcaggccctgacccaggggtctcacggactgttccacgtgcaaaccctgttaagagtgacgaacatcagtgccgtcgatgtgacctgcagcatttccatacccttcttaggcgaagaaaagattgctacgtttagcctctccggctggtag

SEQ ID NO: 116181 - DNA, 537 bp, Artificial Sequence
  derived and/or modified sequence
atggaggttagatgggatcgctcccacagatatcctgctgtccacgtgtatatggatggggaccatgtagctggagagcaaatggctgaataccggggcaggacagtcctcgtgagcgacgccattgacgagggacgcctgactctccagatactcagcgctagaccttcagacgacggtcagtaccgttgtttattcgagaaagatgacgtctatcaggaagcgagccttgacctcaaggtcgtgagtctgggcagttctccgcttattaccgtggaaggtcaggaggacggggagatgcagcctatgtgttcttctgacggatggttccctcagcctcacgtgccatggcgggatatggagggcaagaccatcccctcctcctcacaggctctgactcaaggttctcatggcctctttcatgtgcagacattgttgagagtgacaaatatttcagcagtagacgtaacttgctctatctccatcccgttcctgggagaagaaaagattgccacttttagcctctcgggctggtag

SEQ ID NO: 116182 - DNA, 1368 bp, Artificial Sequence
  derived and/or modified sequence
atggttgatttcccaggctacaatctgtccggcgccgtagcttcattcttattcatactgttgaccatgaaacagtcagaagatttcagagttattgggcccgcgcaccccattctggctggagtcggcgaggatgctttactcacgtgtcaactgctgccaaaaagaactactatgcatgtggaggtgcgttggtatcgatctgaaccatcaacacctgttttcgtacatagggatggtgtggaggtgaccgagatgcagatggaagagtacagggggtgggtcgaatggatagaaaacggaatcgctaagggaaacgtggcccttaaaattcataacatccagccatccgacaacggacagtactggtgccatttccaagatggtaactattgcggtgagacctccctgctccttaaggtggcaggacttggctcggcgccctccatccacatggaaggaccaggtgagtcaggcgtgcaattggtgtgcaccgctagaggatggttccccgaacctcaagtatattgggaggatatcagaggggagaagctcttggctgtatccgagcaccggatccaggacaaggacggtttgttttatgccgaggccacgctggtcgtgcgcaatgcttccgccgagtcagtgagttgcttggtccataaccccgtcctgaccgaggaaaaaggatctgtcatttcccttccagaaaaactgcagacagagctcgcctccctgaaggtaaatggtccttctcaacctattttggtccgggtgggcgaagacatccagttgacttgctacctgtctcctaaagcaaatgcccagtctatggaagttaggtgggaccgcagccatcggtatcctgctgtgcatgtctatatggacggggaccatgtagcaggagaacagatggctgaatacagaggccgaaccgtactcgtgtcggatgccattgatgagggacgcctgaccctgcaaattctttcagcgaggccttctgacgacggacaatatagatgtctgttcgagaaagacgatgtatatcaggaagcctcactggacttgaaggtcgtgagtctcggttcaagtccattaattaccgtcgaggggcaagaagacggcgaaatgcaacctatgtgcagcagcgacggttggtttcctcaaccgcatgttccatggcgtgacatggaaggcaagactatccccagttccagtcaggccctcacccagggatcgcatggactctttcatgtgcagaccctcctgagagtgacgaacatcagcgcggtcgatgtgacatgcagcatctctatccccttccttggtgaggagaagattgcgacgttctcactgagcggttggtag

SEQ ID NO: 116183 - DNA, 1368 bp, Artificial Sequence
  derived and/or modified sequence
atggttgatttccctgggtacaatctgagtggtgccgtggcaagctttctcttcatcctgctgaccatgaaacagagcgaggattttagggtgatcggccctgcccatcccatcctcgcaggtgtgggagaggatgcattgctcacatgtcagttgcttcccaagagaacaaccatgcatgtggaagtgaggtggtatcgtagcgagccctctactcccgtgtttgtgcatcgcgacggagtcgaagtgaccgagatgcagatggaagaatataggggctgggtggagtggattgagaacggcatcgccaagggaaacgttgcactcaaaattcataacattcagccttcggacaacggacaatactggtgccacttccaggacggcaattactgtggcgagactagcctgctcctgaaggtagcaggactaggatccgccccttccatccacatggagggacccggcgagtctggtgtgcagctggtttgtaccgcccgcgggtggtttcccgaaccccaggtttattgggaggacattcgcggtgagaagctgctcgcggtttcagagcacaggattcaggatgaagatgggcttttttatgcggaagccacactggtggttagaaacgcatccgccgaatcagttagctgcttggtccacaaccccgtcctcacagaggagaaggggtctgtgatctcgctgccggaaaagctccagacagagttggcttctctgaaggtgaacgggccctctcagcccatcctggtgagagtgggtgaagacatccagctcacctgttacctctctccgaaagccaacgcacaatccatggaagttcgatgggacagatctcaccgatatccagccgtgcacgtttatatggacggcgatcatgtagccggagagcagatggccgagtatcggggacgtactgtattggtcagtgatgctatagacgaggggaggctgactttgcagatcctctctgcacggccttcagacgacggacagtaccggtgtctattcgaaaaagatgatgtgtaccaggaagcatcacttgacttgaaggtagtgggccttggaagcagcccattgataacagtggaaggtcaggaggatggagagatgcagccgatgtgctcctccgacggatggtttccacagccccatgtcccatggcgagatatggagggcaagacaatccccagttctagccaggcattaacgcagggctcgcacggtctatttcatgtgcaaactctgctgagggtaactaatatttctgccgtggatgtcacctgctctatttctatccctttcttaggtgaggaaaagatcgcgacttttagccttagcgggtggtag

SEQ ID NO: 116184 - DNA, 1368 bp, Artificial Sequence
  derived and/or modified sequence
atggttgatttccccgggtacaacctgtccggggcagtcgccagcttcttgttcatcctgctgactatgaagcagtccgaggactttcgggtaatcgggccagctcatcctatactcgctggcgtgggcgaagacgctctgcttacatgtcagctcttgcccaagcggacaaccatgcacgtggaggttcggtggtatcggtccgaacccagcacccccgtgttcgtccatcgcgacggcgtggaagttacagagatgcagatggaggaatatcggggctgggtggaatggattgagaatggtatcgctaagggaaacgttgccctcaaaatccataatattcaacccagcgataacggccaatattggtgccacttccaggatggaaattactgtggggagaccagccttctgctcaaggtggccggactgggttccgccccttccattcatatggagggtcctggagaatccggagttcaattagtgtgtactgccaggggatggtttcctgagccccaggtgtattgggaagatattcgcggagagaagcttctcgccgtgtcagaacaccggatccaggacgaggacggactcttttatgcggaggccactctggttgtacggaatgcttcagcagaatctgtgtcttgtctggtccacaaccctgtgctgacggaggagaagggaagcgtgatatcccttccagaaaagctccagactgagttggccagccttaaagtgaatggtccctcccagccaatcttggtgagggtgggcgaggatatccagttaacatgctatctgagcccgaaagctaacgctcagtccatggaggtgcggtgggatagatcacaccggtatcccgcagttcatgtgtatatggacggagatcacgtcgcaggagaacagatggctgaatatcgaggcaggacagtgttggtcagcgatgcaattgatgaggggaggctgaccctgcaaattctgtctgccaggccctccgacgacggacagtaccgatgtctattcgaaaaggacgacgtgtatcaggaggcttctctggacctgaaggttgtagggttagggtcttcgcccttaatcacggtagagggtcaggaagacggagagatgcaaccaatgtgttcttctgatggatggttcccccagccacacgtgccatggcgggacatggaagggaagacaatcccaagcagcagccaggccctgacacaggggtcccatgggttgtttcatgtgcagacccttttgagggtgaccaacataagtgcagtagatgtaacatgtagtatatccatcccatttctcggcgaggaaaagatcgctaccttcagtctttccggctggtag

SEQ ID NO: 116185 - DNA, 537 bp, Artificial Sequence
  derived and/or modified sequence
atggaagtaagatgggatcgatctcatcggtatcccgccgtgcacgtttacatggacggggaccatgtggccggtgaacagatggctgagtacagaggccgcacggtcctcgttagcgacgctatcgacgagggacgcttgactctccagatcttaagtgctagaccctctgacgacggccagtatcgatgcctgtttgaaaaggatgatgtatatcaggaggcgtcactcgatctgaaggtggtggggctgggtagttccccactcattacagtcgaggggcaagaggacggtgaaatgcaacccatgtgctccagtgatgggtggtttccccagcctcatgtgccctggagggatatggagggcaaaactatccctagcagcagccaagctctaacacaaggcagtcacgggctgttccacgtacagacactattgagggtgaccaacatcagcgccgtcgacgtgacctgctctatctctattccgttccttggtgaagaaaagatagctaccttctccttatcggggtggtag

SEQ ID NO: 116186 - DNA, 738 bp, Artificial Sequence
  derived and/or modified sequence
atggtggactttcccggatacaatttgtctggagccgtcgcctcatttctttttatactgctgacaatgaagcaaagcgagaagttgcagaccgagctggcttccctgaaggtgaatggcccttcacagccgattttagtccgcgtgggtgaggacattcagctcacttgctacttgagcccgaaggcgaacgcacagagcatggaggtgagatgggacagatctcacaggtatcctgcagtgcacgtctacatggacggtgaccatgtggcaggcgaacagatggccgaatacagaggtcgaactgtactagtcagtgacgctatcgacgagggccggttgacacttcagattctgtcagcgagaccttcagacgacggacagtacagatgtctgttcgagaaggatgatgtttatcaggaagcctccctggatctaaaggtggtggggctgggctcctctcccctcatcactgtcgaaggacaggaggacggggaaatgcagccaatgtgctcaagcgatgggtggtttccgcagcctcacgtgccttggcgtgacatggaggggaagactatcccttcaagttctcaagcgttaacacaaggctctcatggccttttccatgtccagacgctcttgcgggttaccaatatttctgcagttgatgtcacctgttcaatttcaattccctttctgggagaagaaaagatcgctaccttcagcctgtccgggtggtag

SEQ ID NO: 116187 - DNA, 738 bp, Artificial Sequence
  derived and/or modified sequence
atggttgactttccaggttacaacctctccggggcagtggcttccttcctgttcatcttgctgaccatgaaacagagcgagaaattacagacggagctggcctcattgaaagtcaacggtccatcgcagcctatactcgtgagggttggcgaggatatacagctgacctgttatctgtccccaaaggctaatgcacaaagcatggaagtgcgctgggaccggtcccatcggtatcccgcggtccatgtttatatggatggggatcacgttgccggtgagcaaatggctgagtaccgtggccgcaccgttctcgtgtccgacgccatcgatgagggtagactgaccctgcagatcttaagcgcccgcccctcagacgacggacagtatcgatgtcttttcgagaaggacgacgtgtatcaagaagcctctctggatttgaaggtcgtgagcctgggttcatccccgctcattacggtggagggccaggaagatggcgagatgcagcccatgtgttcctccgacggctggtttccacagccccacgtcccctggcgggatatggaagggaaaaccatcccttcctcatcccaggctttaacgcagggaagccatggtctttttcatgtccaaactctattgcgcgtgactaatatatctgctgtggacgtaacatgcagtatcagtataccattcctgggagaggaaaagatagccactttttccctgagcggatggtag

SEQ ID NO: 116188 - DNA, 1368 bp, Artificial Sequence
  derived and/or modified sequence
atggtggatttcccaggctacaatctctctggagccgtggcctccttcctctttatcttactgaccatgaagcagtcggaagacttccgtgtaattggcccagcacacccaattctggctggagttggcgaggatgccctgctcacatgtcagctgctccccaaacggacaacgatgcacgtagaagtgagatggtaccgctctgagccaagcacacccgtgttcgtgcatcgcgacggggtggaggtaaccgagatgcaaatggaagagtatcgcgggtgggtggaatggattgaaaacggcatcgccaaaggaaacgtcgcgctcaaaatccataatattcagccatccgataatggacaatattggtgccacttccaggacggcaactactgcggtgaaacttccctactcctcaaggtggcgggcttgggatctgctccatctatccacatggaaggccctggtgagtccggtgtgcagcttgtgtgtactgctcgcggatggtttcctgagcctcaggtatactgggaggacatcaggggtgagaaacttctcgctgtgtccgaacatcggattcaggacaaagatggactgttctacgctgaagcaacactggttgtgcgcaatgcctccgcggaatcggtgtcctgcctggtgcacaaccctgttcttacggaagaaaaaggatccgttataagtctgcctgagaaactgcagactgagttagcaagcctgaaggtgaacgggccgagccaacccatcctggtgagggtgggcgaggatatacagctcacctgctacctttccccgaaggctaatgcgcagagtatggaagtgaggtgggatcggagccacagatatccagcggttcatgtctacatggacggggaccacgtggccggggaacagatggcagagtatcgcggcaggactgttttggtgtcagacgccatagatgaaggccgcttgaccctgcaaatactttctgcccggccatctgatgacgggcagtaccggtgcctgttcgagaaagatgacgtgtaccaggaagcttctctggacctaaaagtcgtcagtcttgggtcatctccactgattactgtcgaaggccaggaagacggggagatgcagcccatgtgctcttcggatgggtggtttcctcagcctcatgtgccttggagggatatggagggtaagacgatcccctcttcttctcaggcactgacccagggctcccacggcctgtttcacgtgcaaaccctgcttagggtaactaacattagtgcggttgacgtgacgtgtagtatatctataccttttttgggtgaggaaaaaatagccactttctccttaagcggatggtag

SEQ ID NO: 116189 - DNA, 738 bp, Artificial Sequence
  derived and/or modified sequence
atggtggactttccaggctataacctctctggtgctgtggcgtctttcctcttcatccttctcaccatgaagcagtcggatcggctcgatacacctaaagcgagtctcaaggtgaatggcccatcacaacctatactggtgcgcgtgggagaggacattcagctcacatgttacctttcgccaaaagccaatgcccagagcatggaagttcgctgggatagatcccataggtaccccgccgtgcacgtttacatggacggcgaccatgtggcaggtgaacaaatggccgaatatagagggcgcactgtgctcgtgtccgatgctatcgatgaaggcaggctcacccttcagattctctcggccaggccgtctgacgatgggcaatacagatgcttgttcgaaaaggatgacgtataccaggaagctagtttggacctgaaggtcgtggggctcggatctagccccttgataacggtcgaggggcaagaggacggtgaaatgcaacctatgtgcagtagtgacggctggtttcctcaacctcacgtgccctggagagacatggaaggcaagaccattccaagcagctcgcaggcattgacccaaggctcacacggtctcttccatgttcagaccctgctgcgggtgactaatatcagcgccgtagacgtgacatgctctatctccatcccattcttgggggaagaaaagatagccaccttctccctctccggctggtag

SEQ ID NO: 116190 - DNA, 1368 bp, Artificial Sequence
  derived and/or modified sequence
atggtggacttccctggctacaacctgagcggggctgtggccagcttcctgttcatcctgctgaccatgaagcagagcgaggacttccgggtcatcggccctgcccaccccatcctggccggcgtgggggaggatgccctgctgacctgccagctgctgcccaagaggaccaccatgcacgtggaggtgcgctggtacagaagtgagcccagcacccctgtgtttgtgcacagagatggagtggaggtgacagagatgcagatggaggagtaccggggctgggtggagtggattgaaaatggcatcgccaagggaaatgtggccctgaagatccacaacatccagcccagcgacaatggccagtactggtgccacttccaggacggcaactactgtggggagaccagcctgctgctgaaggtggccggcctgggcagcgcccccagcatccacatggagggccctggagagagcggcgtgcagctggtgtgcacagcccggggctggttccctgagccccaggtgtactgggaggacatccggggggagaagctgctggccgtgtctgagcaccgcatccaggacaaggatggcctcttctacgccgaggccaccctggtggtgagaaatgccagcgctgagagcgtgtcctgcctggtgcacaaccctgtgctgacagaggagaagggcagcgtcatcagcctgcctgagaagctgcagacagagctggccagcctgaaggtgaatggccccagccagcccatcctggtgcgggtgggggaggacatccagctgacctgctacctgagccccaaggccaatgcccagagcatggaggtgcgctgggacaggagccaccgctacccagctgtgcacgtgtacatggatggagaccacgtggccggggagcagatggccgagtaccggggccgcacagtgctggtgtctgatgccattgatgagggccgcctgaccctgcagatcctgagcgcccggcccagtgatgatggccagtaccgctgcctgtttgagaaggatgatgtgtaccaggaggccagcctggacctgaaggtggtgtccctgggcagcagccccctcatcaccgtggagggccaggaggatggagagatgcagcccatgtgcagcagtgatggctggttcccccagccccacgtgccctggagggacatggagggcaagaccatccccagcagcagccaggccctgacccagggcagccacggcctcttccacgtgcagaccctgctgcgggtgaccaacatctctgctgtggatgtgacctgcagcatcagcatccccttcctgggggaggagaagatcgccaccttcagcctgagcggctggtag

SEQ ID NO: 116191 - DNA, 738 bp, Artificial Sequence
  derived and/or modified sequence
atggtggacttccctggctacaacctgagcggggctgtggccagcttcctgttcatcctgctgaccatgaagcagagcgagaagctgcagacagagctggccagcctgaaggtgaatggccccagccagcccatcctggtgcgggtgggggaggacatccagctgacctgctacctgagccccaaggccaatgcccagagcatggaggtgcgctgggacaggagccaccgctacccagctgtgcacgtgtacatggatggagaccacgtggccggggagcagatggccgagtaccggggccgcacagtgctggtgtctgatgccattgatgagggccgcctgaccctgcagatcctgagcgcccggcccagtgatgatggccagtaccgctgcctgtttgagaaggatgatgtgtaccaggaggccagcctggacctgaaggtggtgtccctgggcagcagccccctcatcaccgtggagggccaggaggatggagagatgcagcccatgtgcagcagtgatggctggttcccccagccccacgtgccctggagggacatggagggcaagaccatccccagcagcagccaggccctgacccagggcagccacggcctcttccacgtgcagaccctgctgcgggtgaccaacatctctgctgtggatgtgacctgcagcatcagcatccccttcctgggggaggagaagatcgccaccttcagcctgagcggctggtag

SEQ ID NO: 116192 - DNA, 636 bp, Artificial Sequence
  derived and/or modified sequence
aaggccaatgcccagagcatggaggtgcgctgggacaggagccaccgctacccagctgtgcacgtgtacatggatggagaccacgtggccggggagcagatggccgagtaccggggccgcacagtgctggtgtctgatgccattgatgagggccgcctgaccctgcagatcctgagcgcccggcccagtgatgatggccagtaccgctgcctgtttgagaaggatgatgtgtaccaggaggccagcctggacctgaaggtggtgtccctgggcagcagccccctcatcaccgtggagggccaggaggatggagagatgcagcccatgtgcagcagtgatggctggttcccccagccccacgtgccctggagggacatggagggcaagaccatccccagcagcagccaggccctgacccagggcagccacggcctcttccacgtgcagaccctgctgcgggtgaccaacatctctgctgtggatgtgacctgcagcatcagcatccccttcctgggggaggagaagatcgccaccttcagcctgtctgagagcaggatgaccttcctgtggaagaccctgctggtgtggggcctgctgctggccgtggccgtgggcctgcccaggaagaggagctag

SEQ ID NO: 116193 - DNA, 636 bp, Artificial Sequence
  derived and/or modified sequence
aaggccaatgcccagagcatggaggtgcgctgggacaggagccaccgctacccagctgtgcacgtgtacatggatggagaccacgtggccggggagcagatggccgagtaccggggccgcacagtgctggtgtctgatgccattgatgagggccgcctgaccctgcagatcctgagcgcccggcccagtgatgatggccagtaccgctgcctgtttgagaaggatgatgtgtaccaggaggccagcctggacctgaaggtggtgggcctgggcagcagccccctcatcaccgtggagggccaggaggatggagagatgcagcccatgtgcagcagtgatggctggttcccccagccccacgtgccctggagggacatggagggcaagaccatccccagcagcagccaggccctgacccagggcagccacggcctcttccacgtgcagaccctgctgcgggtgaccaacatctctgctgtggatgtgacctgcagcatcagcatccccttcctgggggaggagaagatcgccaccttcagcctgtctgagagcaggatgaccttcctgtggaagaccctgctggtgtggggcctgctgctggccgtggccgtgggcctgcccaggaagaggagctag

SEQ ID NO: 116194 - DNA, 1449 bp, Artificial Sequence
  derived and/or modified sequence
atggtggacttccctggctacaacctgagcggggctgtggccagcttcctgttcatcctgctgaccatgaagcagagcgaggacttccgggtcatcggccctgcccaccccatcctggccggcgtgggggaggatgccctgctgacctgccagctgctgcccaagaggaccaccatgcacgtggaggtgcgctggtacagaagtgagcccagcacccctgtgtttgtgcacagagatggagtggaggtgacagagatgcagatggaggagtaccggggctgggtggagtggattgaaaatggcatcgccaagggaaatgtggccctgaagatccacaacatccagcccagcgacaatggccagtactggtgccacttccaggacggcaactactgtggggagaccagcctgctgctgaaggtggccggcctgggcagcgcccccagcatccacatggagggccctggagagagcggcgtgcagctggtgtgcacagcccggggctggttccctgagccccaggtgtactgggaggacatccggggggagaagctgctggccgtgtctgagcaccgcatccaggacaaggatggcctcttctacgccgaggccaccctggtggtgagaaatgccagcgctgagagcgtgtcctgcctggtgcacaaccctgtgctgacagaggagaagggcagcgtcatcagcctgcctgagaagctgcagacagagctggccagcctgaaggtgaatggccccagccagcccatcctggtgcgggtgggggaggacatccagctgacctgctacctgagccccaaggccaatgcccagagcatggaggtgcgctgggacaggagccaccgctacccagctgtgcacgtgtacatggatggagaccacgtggccggggagcagatggccgagtaccggggccgcacagtgctggtgtctgatgccattgatgagggccgcctgaccctgcagatcctgagcgcccggcccagtgatgatggccagtaccgctgcctgtttgagaaggatgatgtgtaccaggaggccagcctggacctgaaggtggtgtccctgggcagcagccccctcatcaccgtggagggccaggaggatggagagatgcagcccatgtgcagcagtgatggctggttcccccagccccacgtgccctggagggacatggagggcaagaccatccccagcagcagccaggccctgacccagggcagccacggcctcttccacgtgcagaccctgctgcgggtgaccaacatctctgctgtggatgtgacctgcagcatcagcatccccttcctgggggaggagaagatcgccaccttcagcctgtctgagagcaggatgaccttcctgtggaagaccctgctggtgtggggcctgctgctggccgtggccgtgggcctgcccaggaagaggagctag

SEQ ID NO: 116195 - DNA, 738 bp, Artificial Sequence
  derived and/or modified sequence
atggtggacttccctggctacaacctgagcggggctgtggccagcttcctgttcatcctgctgaccatgaagcagagcgaccggctggacacccccaaggccagcctgaaggtgaatggccccagccagcccatcctggtgcgggtgggggaggacatccagctgacctgctacctgagccccaaggccaatgcccagagcatggaggtgcgctgggacaggagccaccgctacccagctgtgcacgtgtacatggatggagaccacgtggccggggagcagatggccgagtaccggggccgcacagtgctggtgtctgatgccattgatgagggccgcctgaccctgcagatcctgagcgcccggcccagtgatgatggccagtaccgctgcctgtttgagaaggatgatgtgtaccaggaggccagcctggacctgaaggtggtgtccctgggcagcagccccctcatcaccgtggagggccaggaggatggagagatgcagcccatgtgcagcagtgatggctggttcccccagccccacgtgccctggagggacatggagggcaagaccatccccagcagcagccaggccctgacccagggcagccacggcctcttccacgtgcagaccctgctgcgggtgaccaacatctctgctgtggatgtgacctgcagcatcagcatccccttcctgggggaggagaagatcgccaccttcagcctgagcggctggtag

SEQ ID NO: 116196 - DNA, 537 bp, Artificial Sequence
  derived and/or modified sequence
atggaggtgcgctgggacaggagccaccgctacccagctgtgcacgtgtacatggatggagaccacgtggccggggagcagatggccgagtaccggggccgcacagtgctggtgtctgatgccattgatgagggccgcctgaccctgcagatcctgagcgcccggcccagtgatgatggccagtaccgctgcctgtttgagaaggatgatgtgtaccaggaggccagcctggacctgaaggtggtgtccctgggcagcagccccctcatcaccgtggagggccaggaggatggagagatgcagcccatgtgcagcagtgatggctggttcccccagccccacgtgccctggagggacatggagggcaagaccatccccagcagcagccaggccctgacccagggcagccacggcctcttccacgtgcagaccctgctgcgggtgaccaacatctctgctgtggatgtgacctgcagcatcagcatccccttcctgggggaggagaagatcgccaccttcagcctgagcggctggtag

SEQ ID NO: 116197 - DNA, 738 bp, Artificial Sequence
  derived and/or modified sequence
atggtggacttccctggctacaacctgagcggggctgtggccagcttcctgttcatcctgctgaccatgaagcagagcgaccggctggacacccccaaggccagcctgaaggtgaatggccccagccagcccatcctggtgcgggtgggggaggacatccagctgacctgctacctgagccccaaggccaatgcccagagcatggaggtgcgctgggacaggagccaccgctacccagctgtgcacgtgtacatggatggagaccacgtggccggggagcagatggccgagtaccggggccgcacagtgctggtgtctgatgccattgatgagggccgcctgaccctgcagatcctgagcgcccggcccagtgatgatggccagtaccgctgcctgtttgagaaggatgatgtgtaccaggaggccagcctggacctgaaggtggtgggcctgggcagcagccccctcatcaccgtggagggccaggaggatggagagatgcagcccatgtgcagcagtgatggctggttcccccagccccacgtgccctggagggacatggagggcaagaccatccccagcagcagccaggccctgacccagggcagccacggcctcttccacgtgcagaccctgctgcgggtgaccaacatctctgctgtggatgtgacctgcagcatcagcatccccttcctgggggaggagaagatcgccaccttcagcctgagcggctggtag

SEQ ID NO: 116198 - DNA, 738 bp, Artificial Sequence
  derived and/or modified sequence
atggtggacttccctggctacaacctgagcggggctgtggccagcttcctgttcatcctgctgaccatgaagcagagcgagaagctgcagacagagctggccagcctgaaggtgaatggccccagccagcccatcctggtgcgggtgggggaggacatccagctgacctgctacctgagccccaaggccaatgcccagagcatggaggtgcgctgggacaggagccaccgctacccagctgtgcacgtgtacatggatggagaccacgtggccggggagcagatggccgagtaccggggccgcacagtgctggtgtctgatgccattgatgagggccgcctgaccctgcagatcctgagcgcccggcccagtgatgatggccagtaccgctgcctgtttgagaaggatgatgtgtaccaggaggccagcctggacctgaaggtggtgggcctgggcagcagccccctcatcaccgtggagggccaggaggatggagagatgcagcccatgtgcagcagtgatggctggttcccccagccccacgtgccctggagggacatggagggcaagaccatccccagcagcagccaggccctgacccagggcagccacggcctcttccacgtgcagaccctgctgcgggtgaccaacatctctgctgtggatgtgacctgcagcatcagcatccccttcctgggggaggagaagatcgccaccttcagcctgagcggctggtag

SEQ ID NO: 116199 - DNA, 537 bp, Artificial Sequence
  derived and/or modified sequence
atggaggtgcgctgggacaggagccaccgctacccagctgtgcacgtgtacatggatggagaccacgtggccggggagcagatggccgagtaccggggccgcacagtgctggtgtctgatgccattgatgagggccgcctgaccctgcagatcctgagcgcccggcccagtgatgatggccagtaccgctgcctgtttgagaaggatgatgtgtaccaggaggccagcctggacctgaaggtggtgggcctgggcagcagccccctcatcaccgtggagggccaggaggatggagagatgcagcccatgtgcagcagtgatggctggttcccccagccccacgtgccctggagggacatggagggcaagaccatccccagcagcagccaggccctgacccagggcagccacggcctcttccacgtgcagaccctgctgcgggtgaccaacatctctgctgtggatgtgacctgcagcatcagcatccccttcctgggggaggagaagatcgccaccttcagcctgagcggctggtag

SEQ ID NO: 116200 - DNA, 1368 bp, Artificial Sequence
  derived and/or modified sequence
atggtggacttccctggctacaacctgagcggggctgtggccagcttcctgttcatcctgctgaccatgaagcagagcgaggacttccgggtcatcggccctgcccaccccatcctggccggcgtgggggaggatgccctgctgacctgccagctgctgcccaagaggaccaccatgcacgtggaggtgcgctggtacagaagtgagcccagcacccctgtgtttgtgcacagagatggagtggaggtgacagagatgcagatggaggagtaccggggctgggtggagtggattgaaaatggcatcgccaagggaaatgtggccctgaagatccacaacatccagcccagcgacaatggccagtactggtgccacttccaggacggcaactactgtggggagaccagcctgctgctgaaggtggccggcctgggcagcgcccccagcatccacatggagggccctggagagagcggcgtgcagctggtgtgcacagcccggggctggttccctgagccccaggtgtactgggaggacatccggggggagaagctgctggccgtgtctgagcaccgcatccaggatgaagatggcctcttctacgccgaggccaccctggtggtgagaaatgccagcgctgagagcgtgtcctgcctggtgcacaaccctgtgctgacagaggagaagggcagcgtcatcagcctgcctgagaagctgcagacagagctggccagcctgaaggtgaatggccccagccagcccatcctggtgcgggtgggggaggacatccagctgacctgctacctgagccccaaggccaatgcccagagcatggaggtgcgctgggacaggagccaccgctacccagctgtgcacgtgtacatggatggagaccacgtggccggggagcagatggccgagtaccggggccgcacagtgctggtgtctgatgccattgatgagggccgcctgaccctgcagatcctgagcgcccggcccagtgatgatggccagtaccgctgcctgtttgagaaggatgatgtgtaccaggaggccagcctggacctgaaggtggtgggcctgggcagcagccccctcatcaccgtggagggccaggaggatggagagatgcagcccatgtgcagcagtgatggctggttcccccagccccacgtgccctggagggacatggagggcaagaccatccccagcagcagccaggccctgacccagggcagccacggcctcttccacgtgcagaccctgctgcgggtgaccaacatctctgctgtggatgtgacctgcagcatcagcatccccttcctgggggaggagaagatcgccaccttcagcctgagcggctggtag

SEQ ID NO: 116201 - DNA, 1368 bp, Artificial Sequence
  derived and/or modified sequence
atggtggacttccccggctacaacctgagcggcgccgtggccagcttcttgttcatcctgctcacaatgaagcagtctgaagacttccgggtgattgggccggcccatccaatcctagccggcgtgggcgaggacgcactcttgacttgtcagctgcttcccaagcggacaaccatgcatgtggaagtccgctggtatagaagtgagcctagtacacccgttttcgttcacagggatggcgtagaagttaccgaaatgcaaatggaggagtatcgtggctgggtcgaatggatcgaaaacgggattgctaaaggtaacgtagcactgaaaatccacaacatccagccaagcgataacggtcagtactggtgccactttcaggatggaaattattgcggcgagactagcttgctactaaaggtggctggactcggctccgccccatctatacacatggagggtcccggagagtcaggagtgcagctggtttgcacggcccgcggatggttcccagagccccaggtctattgggaagacatccgcggagagaagctgttggccgtgtccgagcacagaattcaggacaaggatggtctgttctatgccgaagctaccctggtggtgagaaacgctagtgcagaatccgtctcttgcctagtacataatcccgtgttgacagaagagaaagggtctgtcatttcactgcccgagaagttgcagacagagcttgcctcgctcaaagtaaacgggccttcacagcctatccttgttagggtcggcgaagatatccagctgacgtgttacttgtctccaaaggcaaacgcccagtcaatggaggtccggtgggataggtctcatagatatccagccgtgcatgtctatatggacggggaccacgtcgcaggagagcagatggccgagtaccgcggaagaactgtacttgtgtccgacgccatcgacgagggtcgtctgacgctgcagatccttagcgccaggccttccgatgacgggcagtatcggtgtctgtttgaaaaagatgacgtgtaccaggaagcctcattagatttgaaagtggtgtcgttgggatccagtcctctcatcacagtggaggggcaggaagatggggagatgcagcccatgtgctcctcagacgggtggttcccgcaacctcatgtgccttggagagatatggaggggaagacaattccgagtagctcgcaggccctcacacaaggatcccacggattgttccacgttcaaactctgctgcgggttaccaatattagcgccgtggatgtcacctgttcaatctccatcccgtttctgggggaggagaagatcgcaactttttcactgagcggatggtag

SEQ ID NO: 116202 - DNA, 738 bp, Artificial Sequence
  derived and/or modified sequence
atggtggacttccccggctacaacctgagcggcgccgtggccagcttccttttcatattactgaccatgaagcaaagcgaaaaattacagacggaattggcatctctcaaggtgaacgggccaagtcagcccatcttggttagagtaggtgaagacatccagcttacatgctacctctcaccgaaggccaacgcgcagagcatggaagttagatgggatcgtagccacaggtatcctgcagtccatgtgtatatggatggagatcacgttgcgggagaacagatggccgaatatcggggccgaactgttctggtcagcgatgctatcgacgaaggcagactcacactccagattctgtcagctcggcctagtgacgatggacagtacaggtgcttgtttgaaaaagatgacgtatatcaggaggcgtcattagacctaaaagtcgtttcactgggcagctccccactgataacagtggagggccaggaggatggagagatgcagccaatgtgctcctccgacggatggtttcctcagccccatgttccatggcgggatatggagggcaagactatcccgtcatcttctcaagccctgactcagggcagtcatggcctgttccacgtgcaaactctcctgcgcgtgaccaacatctcagcagtagatgtaacctgtagcattagtatacccttcctcggggaagaaaagattgccacattttctctatcaggatggtag

SEQ ID NO: 116203 - DNA, 636 bp, Artificial Sequence
  derived and/or modified sequence
aaggccaacgcccagagcatggaggtgcggtgggaccggagccacagatatccagcagtccatgtttacatggacggggaccatgtggcaggcgaacagatggccgagtatagagggaggacagtgctggtgagtgatgctattgacgagggacgtctcaccctgcaaattttgagtgctagacccagcgacgatggccagtatagatgcttatttgagaaggatgacgtctaccaggaagcctccctggatttgaaggtagtcagtttaggttcatcaccactcataaccgtagaaggtcaggaggacggggagatgcagcccatgtgttcaagcgatggttggttccctcaaccgcatgttccatggcgcgacatggagggaaaaacaatcccctcaagcagccaggcccttacccagggcagccatggcctatttcatgttcagacccttctgcgcgtcactaacatttccgccgtggatgtgacttgcagtatatcaatcccatttttaggcgaagaaaaaattgccaccttttccctctccgagtcgagaatgacatttctctggaaaacgctgttggtctggggcctgcttctggccgtcgccgtagggttacctaggaaacgcagttag

SEQ ID NO: 116204 - DNA, 636 bp, Artificial Sequence
  derived and/or modified sequence
aaggccaacgcccagagcatggaggtgcggtgggaccggagccacagatacccagccgtacacgtatatatggacggcgaccatgtagccggcgaacagatggccgagtataggggtagaaccgtgctcgtatctgacgccattgatgaaggcaggttaaccctgcagattctaagtgcaaggccatcagacgatggccagtatagatgtctgtttgagaaagacgacgtctatcaagaggcctccctcgatttaaaagtcgtcgggctgggtagctcccctctcatcacagtggaagggcaggaggatggtgagatgcagcctatgtgttcctccgacggatggttcccgcagccccacgtgccttggcgtgacatggaagggaaaacaataccttccagctcccaggctctgacacagggcagtcacggattgttccacgtccagacccttctgcgtgtaacaaacatttctgcggtagacgtgacctgctcaatcagcattccattcttgggcgaggagaaaatcgcaacttttagcctctctgagagccgcatgactttcttgtggaaaacgttactggtatggggcctgctgctggccgttgccgtgggcctgcctcgaaagaggagctag

SEQ ID NO: 116205 - DNA, 636 bp, Artificial Sequence
  derived and/or modified sequence
aaggccaacgcccagagcatggaggtgcggtgggaccggagccacaggtaccccgccgtgcacgtctatatggatggagaccacgttgccggagaacagatggctgagtatcgggggcgcacagtcctggtgagtgatgctatcgatgagggtagactgacgctgcagatccttagtgccagaccttcagacgacggccaataccggtgcctgtttgaaaaggacgacgtctaccaggaggcttcactcgacctgaaagtggtgggactcggttccagtccgctgataactgtggaaggccaggaggatggagaaatgcagcccatgtgctcatccgatggatggtttccccaaccacatgtgccttggcgggacatggaaggcaagaccattccttctagctctcaggcactgacgcagggctcacacggcttgttccacgtgcagacccttttgagggtgaccaatatcagcgccgtggatgttacctgttctatctctatccccttcttgggcgaagagaagattgccacgttctccctttccgaaagccggatgacattcctgtggaagacactcttggtgtggggactgttgctggcagtggccgtgggactccccagaaagcggtcatag

SEQ ID NO: 116206 - DNA, 636 bp, Artificial Sequence
  derived and/or modified sequence
aaggccaacgcccagagcatggaggtgcggtgggaccggagccaccgttatccagctgttcacgtgtatatggacggcgaccacgtggctggtgaacagatggccgagtaccgtggacggactgtactcgtcagtgacgctatcgatgagggtcgactgactctgcagatcctgtcagcacggccttctgacgacggacaatatcgctgtctatttgaaaaggacgatgtatatcaagaggcaagcctggacctaaaggtggttggtctgggcagctcacccctgattactgtcgagggacaggaggatggtgagatgcaacctatgtgcagttcagatggctggttcccacagccacacgtgccttggagagatatggagggaaaaaccatccctagttcgtcgcaggcgctgacccaggggtcccatggcttattccacgtgcagaccttgctgcgcgttaccaacatcagtgctgtcgatgtgacatgctcaatctctattccttttctgggggaagagaagattgccacttttagtctgtccgaaagtaggatgacatttctttggaaaacactgttagtgtgggggttgctactggcagtggctgtggggctgccacgcaaaagatcttag

SEQ ID NO: 116207 - DNA, 636 bp, Artificial Sequence
  derived and/or modified sequence
aaggccaacgcccagagcatggaggtgcggtgggaccggagccacaggtatcccgctgtgcacgtctacatggatggggatcacgtcgcgggggagcaaatggcagaatatagaggccggacagtgttggtgtcagacgctatcgatgagggcaggctaacacttcagatattatcggccaggccatcggatgatggccagtaccggtgcctgttcgaaaaggacgacgtataccaggaagcgtcccttgacttgaaagttgttagtctcggatccagtcccctcatcactgtagagggccaggaagacggcgagatgcagccaatgtgcagcagcgacggatggttcccccagcctcatgtgccatggagagacatggagggtaaaacaattcccagctctagccaggcgctaacacagggcagccacggcctctttcacgttcagacgttgttgcgcgtaaccaacatatcagccgtggacgtaacttgcagtattagcattccctttctgggggaagaaaaaatcgctactttctccctaagtgagtctaggatgacctttctttggaagaccttgcttgtatggggtctccttttggctgtggcggtcggcctcccccgaaagcgatcatag

SEQ ID NO: 116208 - DNA, 636 bp, Artificial Sequence
  derived and/or modified sequence
aaggccaacgcccagagcatggaggtgcggtgggaccggagccaccgttatccagctgtgcatgtctacatggatggcgatcacgtggcaggagaacaaatggccgaataccgaggacgaaccgtgctcgtatctgatgctatcgatgagggacggctgacactccagatcctctccgccagaccttccgacgacggacagtatcgttgcctcttcgaaaaggacgacgtctaccaggaagcttcgttggatctaaaggtggtcagtctcgggtcctcccccctgataactgtggagggtcaagaggacggtgaaatgcagccaatgtgtagtagcgacggctggtttccccaaccacacgtaccatggagggacatggaaggaaaaacaatcccttctagttcccaagcactgacgcaggggtcccacggactcttccatgtccagacactactgagggtgacaaacataagcgccgtggacgttacatgcagtattagcatcccgtttctcggggaggaaaagatagccaccttttcgctgtctgagtcccggatgacctttttgtggaaaacactgctggtgtggggcctactgctcgccgtcgccgtgggactgccaaggaaacgaagctag

SEQ ID NO: 116209 - DNA, 636 bp, Artificial Sequence
  derived and/or modified sequence
aaggccaacgcccagagcatggaggtgcggtgggaccggagccacaggtatcccgctgtacatgtgtatatggacggcgaccacgttgccggcgaacaaatggctgagtaccgaggccgtactgtgcttgtcagtgatgctatagacgaaggccgactaaccctgcagattttgagtgccagaccgagcgatgatggacagtacaggtgtctctttgaaaaggacgatgtctaccaggaagcgagcttagatttaaaggtggtgtcactaggctcaagccctctcatcaccgttgaaggccaggaggacggggaaatgcaacctatgtgcagttcggatgggtggtttccacaaccacacgttccatggcgagatatggagggcaagacgattcccagctcatcccaggcgttgacacagggaagccacggtctgtttcacgtgcagaccctgcttagagttactaacatctcagcggtggacgtgacatgctctatttccatcccgttccttggcgaagagaaaatcgctactttctcgctgtctgaatcccggatgactttcttgtggaaaaccctcctggtctggggtctgctgctggcggttgccgttgggctcccacgcaagcgctcgtag

SEQ ID NO: 116210 - DNA, 1449 bp, Artificial Sequence
  derived and/or modified sequence
atggtggacttccccggctacaacctgagcggcgccgtggccagctttctgttcattcttttgaccatgaagcaaagtgaggatttcagggtgattggtccagctcaccctatattggccggagtgggcgaggacgcccttttgacctgccagttactgcccaaaagaaccactatgcatgtcgaggttcgctggtatcgctcagagccatctacacccgtcttcgtacaccgggatggagtggaagttaccgaaatgcagatggaagaatatcgcggctgggtggagtggatcgaaaacggcatcgcgaagggtaatgtcgcgctgaaaatacataatatccagccgagtgataatggacagtactggtgccattttcaagacgggaactactgcggagaaacatcactgctgctaaaggtggctggcctaggcagcgctcctagcatccacatggaggggcccggagagtccggggtgcagcttgtttgtacagctagggggtggtttccagagccccaagtgtactgggaggacattcgaggcgaaaaacttctggccgtgtcggagcaccgaatccaggataaagacgggctcttttatgccgaggcaacattagtggtcaggaatgcctcggcagagagtgtgtcatgtctggtgcacaatcctgtgctcaccgaagagaagggttccgtcatcagcctccctgagaaactgcagaccgaactggcatccttaaaagttaatggcccctcgcagccgattctcgttcgtgttggtgaggacattcagttgacttgttatctgagtcccaaagccaatgcccagtctatggaggtacgatgggataggtctcaccggtatcctgccgtccatgtttatatggatggggaccacgtggctggcgaacagatggctgaataccgaggaagaactgttctagtcagcgacgcaatcgatgaaggaagacttacgctccagattttgagcgccagaccctcagacgacggtcagtacaggtgccttttcgagaaggacgacgtctatcaggaggcaagtctcgacttgaaggttgtcagcctcgggagttcaccactgatcacagtggagggtcaggaggacggcgaaatgcagccaatgtgttcgtctgacggctggtttccacagcctcacgtgccttggcgggatatggagggcaagaccataccttccagttctcaagccctgacccagggctctcacggtctctttcacgtccagacccttcttagagtcacaaatatctccgctgtggatgtaacctgtagcatctctattccttttctgggggaggaaaaaattgccacgttctccttgtctgagtccagaatgaccttcctttggaagacccttctggtgtggggcctgctgctggctgtggctgtggggctccccagaaagcgctcatag

SEQ ID NO: 116211 - DNA, 738 bp, Artificial Sequence
  derived and/or modified sequence
atggtggacttccccggctacaacctgagcggcgccgtggccagctttctttttatcctgctgacaatgaaacagagcgaccgtctggatacccctaaggcctcactgaaagttaacgggccaagccagccaattcttgttcgagtcggcgaggacatacagctgacttgctatctgtccccaaaggcaaacgcccagtcaatggaggttaggtgggacagaagccatcgctaccccgctgtccatgtgtacatggacggcgaccatgtcgccggcgagcagatggccgaataccggggaaggacggtcctagtgagcgatgctatcgatgagggccgccttacactgcaaatactttcagcgcgcccgagtgacgacggccaatatagatgcctttttgaaaaagatgatgtgtatcaagaggctagtttagacttgaaggttgtgtcgctgggaagttcacccctgatcactgtcgaaggccaggaggatggtgaaatgcagcccatgtgttcttcagatggatggttcccacagccacacgtgccctggcgggacatggaagggaaaaccattccatctagttcccaggcactaacgcaaggctcgcacgggcttttccacgtacagaccttactgcgtgtgacaaacatctccgcggtcgatgtaacttgttctatctctattccctttttgggagaagaaaagatcgctaccttctcgctgagcggctggtag

SEQ ID NO: 116212 - DNA, 537 bp, Artificial Sequence
  derived and/or modified sequence
atggaggtgcggtgggaccggagccaccggtaccccgccgtgcacgtgtacatggacggtgaccacgtggctggcgagcagatggccgagtacagaggccgcactgtcctagtgtccgatgctatcgacgagggtagactcacactgcaaattttgtctgctagaccctcagatgatggccagtatcgctgcctgtttgaaaaagacgatgtataccaggaggcctcactcgacctgaaggtggtgtctctgggtagctcccctctgataactgtcgaaggtcaggaggatggagagatgcaaccgatgtgttcttccgacgggtggtttcctcagccccacgttccttggagagatatggagggcaaaactatcccttcttcctctcaggcactgacccagggcagccatggtttgtttcacgtgcaaacactgcttcgagttacaaatattagcgccgtagatgtgacttgttcaattagcataccttttcttggggaggaaaaaattgccaccttctccctgagcggctggtag

SEQ ID NO: 116213 - DNA, 738 bp, Artificial Sequence
  derived and/or modified sequence
atggtggacttccccggctacaacctgagcggcgccgtggccagcttcttattcattttacttaccatgaaacagtctgaccgcctggacactccaaaagcatctttaaaagtaaacggaccaagtcagcccatcctcgtacgagtcggggaggacatccagttaacatgttacctgtcccccaaagcgaatgcccagtccatggaggtgaggtgggaccgctctcaccggtaccctgcagtgcacgtgtacatggacggtgatcatgtggccggtgaacagatggccgagtacagaggcagaaccgtccttgtatcagacgccattgacgagggccgactgaccctgcagattctcagcgctcgcccaagcgacgatggccagtatagatgcctgtttgaaaaggacgacgtataccaggaagcctccctcgatctcaaagttgtggggctgggatctagtccactgatcacagttgagggccaggaggatggcgaaatgcagccgatgtgcagttcagatgggtggtttccccagccacacgtgccgtggcgggacatggagggaaaaactatcccaagtagctctcaggccctgacccagggttcacatggcctgtttcacgtacagacactgttgagagtgacaaatatctcagccgtggacgtgacatgtagcattagtattccttttctgggggaggaaaaaatagcaactttcagtctttccggatggtag

SEQ ID NO: 116214 - DNA, 738 bp, Artificial Sequence
  derived and/or modified sequence
atggtggacttccccggctacaacctgagcggcgccgtggccagcttcctgttcattttactcacaatgaagcagtccgatagattggacactcctaaggcaagcttaaaggtcaacggaccaagccagccaattcttgtccgggttggggaagatattcaactgacttgctatctctctccaaaagctaatgctcagagtatggaggtaaggtgggatcgctcgcatcgctaccccgctgttcatgtctatatggatggcgaccacgtcgctggagagcagatggccgagtaccggggacggactgtcctcgttagtgacgccattgatgaaggtcggttgacgcttcagatcttgagcgctaggccatctgatgacggacagtacaggtgcttgttcgagaaggacgacgtctaccaggaggcctctttggacttaaaagttgtttcgctcgggtctagccccctcattacagtagaggggcaggaggacggcgagatgcagcctatgtgttcctcagacggttggtttcctcagccccacgttccatggagagacatggaaggtaagacgatcccttcctcctcacaggccctgactcaaggaagccatgggctttttcacgtgcaaaccctgttaagggtcacaaacatttccgctgtcgacgtcacctgcagcattagcatacccttcttaggagaagaaaaaatcgcaacattctctctgtcaggttggtag

SEQ ID NO: 116215 - DNA, 738 bp, Artificial Sequence
  derived and/or modified sequence
atggtggacttccccggctacaacctgagcggcgccgtggccagcttcttgttcatactgctaaccatgaagcagagcgagaaattgcagactgaactggcttccttgaaagttaatgggccttctcaaccaattcttgtgcgagtgggcgaggatatacaactgacctgttatttgtccccaaaagccaatgcccagagcatggaggtgcggtgggatagatctcaccgttaccctgccgtgcacgtgtacatggatggggaccacgtcgctggagaacaaatggcagaatatcgcgggagaaccgtgctcgtgagcgacgccattgacgaaggcaggctgacgctgcagatactgtcagcccgaccctccgacgacggacaatatcgatgtctcttcgagaaagatgacgtctatcaggaagctagtctggacctcaaagtagttggactgggaagcagtccccttattaccgttgagggacaagaggatggggaaatgcagcctatgtgctcgagtgacggttggttccctcaaccccatgttccttggcgggatatggagggcaaaaccataccttccagctctcaagctcttactcagggcagccacggcctcttccacgtccaaacgctcctgcgcgttacaaatattagcgccgttgatgttacctgttctatctccattccatttctgggcgaagagaaaatagcaaccttctcgttatccggctggtag

SEQ ID NO: 116216 - DNA, 537 bp, Artificial Sequence
  derived and/or modified sequence
atggaggtgcggtgggaccggagccaccggtaccccgccgtgcacgtctatatggacggagatcatgttgctggggagcagatggccgagtaccgaggccggactgtattggtcagcgacgctatcgacgagggtcggctcactctacagatcctgtctgcccggccgtccgacgatggtcagtaccgttgcctcttcgagaaagatgatgtatatcaagaagccagcctggacctgaaggtggtcgggcttggcagttcacctctgatcacggtcgaaggccaagaagacggggaaatgcagcccatgtgtagtagcgacggctggtttccacaacctcacgtgccgtggagagatatggagggaaagaccataccatcgtcttctcaagccttgacacagggcagccacgggttgtttcacgttcaaactctgcttagggtgaccaacatttccgccgtcgatgtgacttgtagcatatccatccctttcctgggtgaggagaaaattgccacattctctctgtctgggtggtag

SEQ ID NO: 116217 - DNA, 738 bp, Artificial Sequence
  derived and/or modified sequence
atggtggacttccccggctacaacctgagcggcgccgtggccagcttcctctttatcttgctcacgatgaaacagtccgatcgactcgacactcctaaggctagtctgaaggtcaacggtccttcccagccaatattggtgcgcgtgggtgaggacattcagttaacatgctacctttctcctaaagcaaacgcccagagtatggaagtgagatgggaccgtagccaccgatacccagccgtgcacgtgtatatggacggagaccatgtggccggcgaacagatggccgagtatagaggacgcactgtccttgtttcggatgctatcgacgagggcagactcacgctccagatactttccgcacggccctcagacgatggtcaatacaggtgcctctttgagaaagacgatgtttaccaggaggctagcctggatctgaaagtggttagtctggggagctcccccctcattactgtggaaggtcaggaagacggtgagatgcagccgatgtgctccagtgacgggtggtttccgcagccccatgtgccatggcgcgatatggagggcaaaaccatcccgagttcttctcaggctctgacgcaaggcagccacggtctgtttcatgtgcagactctgttacgggttactaatatctcagctgtcgatgtgacgtgcagcatcagtatcccctttttgggcgaggaaaaaattgcaactttctctctcagcgggtggtag

SEQ ID NO: 116218 - DNA, 1368 bp, Artificial Sequence
  derived and/or modified sequence
atggtggacttccccggctacaacctgagcggcgccgtggccagcttcctattcatcctgctgacaatgaaacagtcagaggactttcgggttatagggccggctcaccctattctcgcgggtgtgggagaggacgcactcttaacctgccaactcctgccaaagcggacaacgatgcacgtagaggttcgttggtatagatccgagccatcgactcctgtctttgtccatagagatggtgtggaggtgactgagatgcaaatggaagaatacagagggtgggtggagtggattgagaacggcatcgcaaaaggtaacgtggcgctgaaaattcataatatacagcccagtgacaacggacagtattggtgccatttccaagatggcaactactgtggagagacttcccttttactaaaagtggccggtctgggtagtgctcccagcatacacatggaaggtcccggcgaatccggagtgcaacttgtttgtacagcccgaggctggtttccagaacctcaagtatattgggaggatatccgaggagaaaagctgcttgctgtgtctgaacacagaatccaggacgaagatgggctgttttatgctgaagctacccttgtcgttcgtaatgcgtctgcagaaagcgtctcctgcctggtgcataacccggtcttgactgaagagaaaggcagtgtcatctccctgccagaaaagctgcaaactgaactggcaagcctcaaggtgaatggaccatctcaacccatcctcgtccgggtcggtgaggatatacagttaacctgctacctctctccgaaggctaatgcccaatccatggaagtgcgctgggatcggtctcatcgctatccagcagtgcacgtgtacatggatggtgaccacgtggcgggagagcaaatggccgagtaccgcgggcggaccgtgctcgtgagcgatgctattgatgagggtcggttaactctgcagatactgtcagctcggccctcagacgatggacagtaccggtgcctgttcgaaaaagatgacgtctaccaggaggcgtccctggacctgaaagtcgttgggctggggagttcacctctgattacagttgaggggcaggaagacggggaaatgcagccgatgtgcagcagcgacggctggttcccccagccacatgtgccctggagggacatggaaggcaagaccatcccctcctcctcgcaggccctcacccaaggatcgcatgggctgtttcacgtccaaacactgctgcgggtgactaacatcagcgctgtggacgtgacatgcagcattagtataccctttcttggtgaagaaaaaatcgctacattcagcctatcaggatggtag

SEQ ID NO: 116219 - DNA, 738 bp, Artificial Sequence
  derived and/or modified sequence
atggtggacttccccggctacaacctgagcggcgccgtggccagctttctctttattcttttaacgatgaagcagtccgaccggttggacactccgaaagcatcactgaaggtgaatggcccaagtcagcctattctggtgcgggtgggtgaggatatacaactgacatgttatctgtctcctaaggcgaatgcacagtcaatggaggtgcggtgggaccgtagccaccgctatcctgcagttcacgtatatatggacggcgatcacgtcgccggggagcagatggcggagtatcgtgggagaactgtgttagtgtcagatgcgatcgacgagggacggctgacccttcagatcctgtctgctaggccttctgatgatggtcagtataggtgcctctttgaaaaagatgacgtttatcaggaggccagtcttgacctgaaagtcgtgtctctgggttcgagcccactgattacagtagagggtcaggaagatggagagatgcaacctatgtgtagctccgacgggtggtttcctcagccccacgtcccttggagggatatggaaggaaagactatcccctcgtcatcccaggctcttacacaggggtcccacggcttatttcatgtccagacgttgttacgcgtgaccaacataagcgcagttgacgtgacttgttccatctcaatcccctttcttggggaggaaaaaattgccacgttctccctgtccggctggtag

SEQ ID NO: 116220 - DNA, 738 bp, Artificial Sequence
  derived and/or modified sequence
atggtggacttccccggctacaacctgagcggcgccgtggccagctttttgtttatcttattaaccatgaagcagtccgaccgccttgacaccccaaaggcctccctgaaggtgaacggccccagccagcccatccttgtgagggtgggcgaggacatccagctgacatgctacctctcacccaaggcgaatgcgcagagtatggaagtgaggtgggatcgaagtcaccgatacccggctgtacacgtgtacatggacggagaccacgtggcaggcgaacagatggctgaatatcgcggtcgaaccgtactggtttctgatgccatagacgagggaagactgacgctgcagattctgtccgcccggcccagcgacgacggccaatatcgatgtctttttgaaaaagacgatgtttatcaggaggcttcactggatttgaaggtggtaggccttggctcttcccccttgattacagttgaggggcaggaggatggcgaaatgcagcctatgtgctcttccgacggatggttccctcagccccacgtgccctggcgcgatatggagggcaagactataccttcatcttcccaagctcttacccagggaagccacgggcttttccatgttcaaacccttctccgggtgactaatatcagtgccgtggacgttacctgtagtatctctattcccttccttggcgaagagaaaattgctactttttcactgagcggatggtag

SEQ ID NO: 116221 - DNA, 738 bp, Artificial Sequence
  derived and/or modified sequence
atggtggacttccccggctacaacctgagcggcgccgtggccagcttcctgtttatcctgctcaccatgaagcagtccgacagactagacactcctaaggcatccttaaaagtcaacggcccaagccagcccatcttggtgagggtcggagaggatatacaactgacatgttatctctccccaaaagctaacgcgcagtctatggaggttcggtgggatcgctcccatcggtaccctgccgtccatgtgtatatggatggggatcacgtggcaggcgaacaaatggccgaatatcgcggccgaacagtcctagtatccgacgcgattgatgaagggagactgaccttgcagatcctgtccgcacgcccctctgacgatggccagtaccgctgtctctttgagaaggacgacgtgtaccaggaagcttctttggacctcaaggtggtgagccttggctcatctccactaattaccgtagagggacaggaggacggggaaatgcaacccatgtgttctagcgatggatggtttccacagcctcatgtgccctggcgagatatggagggaaaaaccattcctagttcttcccaggccttaacacagggttcccacggcttatttcatgtccagacactgctccgcgtcaccaacatatcggctgtcgacgtaacctgcagtatcagcataccatttctcggggaggaaaagatcgccactttctcactcagcggatggtag

SEQ ID NO: 116222 - DNA, 1368 bp, Artificial Sequence
  derived and/or modified sequence
atggtggacttccccggctacaacctgagcggcgccgtggccagctttctttttatattgctaaccatgaagcagtcagaagacttccgcgtcattggtcccgcacacccgattttagccggtgtcggagaggatgctctactgacgtgccagctgctgccaaagcgaaccactatgcatgtggaagtgaggtggtaccgttcagagccatctactcctgtgtttgttcacagggatggcgtggaagtcacagaaatgcagatggaggagtacagagggtgggtggagtggatcgaaaacggtatcgccaaggggaacgtagccctaaagatccacaacatacaacctagcgacaatggccagtactggtgccatttccaagatggaaactactgcggcgaaacctcacttctcctgaaagtcgctggcctgggctctgctcctagcatccatatggaggggcctggcgaatcgggtgtgcagctggtctgtactgcccgtgggtggtttccagagcctcaggtgtattgggaagacatcaggggggagaaactactagccgtgtctgagcaccggatccaggacaaggacgggctcttttatgccgaggcaacactggtagtaagaaatgcaagcgctgagtccgtgtcctgtctcgtgcacaacccagttctgactgaggagaagggctcagtgatctctcttcccgaaaagcttcaaacagagctcgcatctctgaaagttaacggacctagtcagcctattcttgtacgcgtgggagaggatattcagcttacatgctacttgtcccccaaagctaacgcccagagtatggaagtgcgttgggataggagtcatcgctatccagccgtccacgtctacatggacggggatcatgtggccggggagcagatggcggagtatcgcggccgcactgtgctcgtgagtgatgccatagatgagggtcggctcactctgcagattttgtcagccaggccaagcgatgatggtcaataccgttgtctgttcgagaaagatgatgtataccaggaggccagtctggatctcaaggtcgtgtctcttggttcaagtcccctgattaccgtagaggggcaagaggacggagagatgcagccaatgtgctcatccgatgggtggtttccacagcctcacgtaccctggcgagacatggagggtaagaccatcccgtcttccagtcaggccttgacgcaagggtcccatggactgttccacgtccagaccctgctacgagtaactaatatctcggcagttgacgtgacctgctcaatcagcatacccttcctaggagaggagaagatagccaccttttccctgagtgggtggtag

SEQ ID NO: 116223 - DNA, 1368 bp, Artificial Sequence
  derived and/or modified sequence
atggtggacttccccggctacaacctgagcggcgccgtggccagcttcctctttatcctgctgactatgaagcagtccgaggattttcgagtgatagggcccgcgcatcctatcctagccggagtgggcgaagacgctctgttaacatgccaacttctgccaaaaagaacaaccatgcacgtagaagtaagatggtaccgctcagaacctagcacccccgtgtttgtccatcgggatggtgtggaggtgacagaaatgcaaatggaggaatataggggatgggtcgaatggatcgagaacgggatcgcaaaggggaacgtcgcactcaaaattcacaatattcagccgtccgataacggacagtattggtgtcactttcaggacggaaattactgtggcgaaacgagcctgctcttgaaagtggctggcctggggagtgccccgtcaatccatatggaaggtcctggtgagagtggtgtgcaactagtttgtacagctcgggggtggttccccgagccacaggtgtactgggaggatatcaggggcgagaagttgctggcagtgtcagaacaccggatccaagataaagatggcttgttttacgcggaggccacacttgtggtgcgcaacgcaagtgccgaatctgtgtcctgtctggtccacaatccagtactgactgaggagaaaggcagtgtaatatctctgccggaaaaattgcagacagaattggccagcctgaaggtgaacgggccttctcagcctattctcgtgcgggtcggagaggatatccagctgacttgctatctatctcccaaagccaatgcccagagtatggaagttagatgggacaggtcgcaccggtatcctgctgtgcacgtctatatggatggcgaccatgtggcaggcgagcagatggccgagtatcgaggacggaccgtattggttagcgatgcgatcgatgaaggtaggctgacactccaaatcctgtccgcccgaccatcagatgacggacagtataggtgtctcttcgagaaggacgacgtgtatcaggaagcatctctcgatctgaaggtggtatccctgggatccagcccgttaatcacggtggaggggcaggaggacggcgagatgcagcctatgtgtagtagcgatggctggtttccccagccccacgtgccttggcgcgacatggaaggcaaaaccattccttcttcttctcaggctctcacccaaggcagccatggtctgttccatgtccagactctgctcagagtaacgaatatttctgccgtcgatgtgacctgttctatttcaatcccctttctgggcgaggaaaaaatcgcaacattcagtctcagcggatggtag

SEQ ID NO: 116224 - DNA, 537 bp, Artificial Sequence
  derived and/or modified sequence
atggaggtgcggtgggaccggagccaccggtaccccgccgtgcacgtgtacatggacggagatcacgtagctggcgagcagatggccgaatatcgcggccggaccgtgttggtgtccgacgctatcgacgaaggaagactgacactacaaatcctgtctgcccggccttccgacgacggtcagtatagatgccttttcgagaaggacgacgtctaccaagaggcgagtctggacctgaaggttgtgtctcttggaagttcgcccctcatcacagttgagggacaggaggacggtgagatgcagcccatgtgtagctctgatggttggtttccacaaccccacgtgccttggcgtgacatggagggcaaaaccataccctccagctcacaggctctcacacaaggaagtcatggcttatttcacgtccaaaccctcctgcgggtgaccaacatttccgccgtggatgttacttgtagcatcagcattccattcttgggcgaggaaaaaattgccactttcagcctgagcggctggtag

SEQ ID NO: 116225 - DNA, 1368 bp, Artificial Sequence
  derived and/or modified sequence
atggtggacttccccggctacaacctgagcggcgccgtggccagcttcttatttattctcttgaccatgaaacagtccgaggactttcgtgtgatcggaccagcgcaccctatccttgcaggggtgggcgaggacgccctgctgacttgccagctgctgcccaaaagaaccacgatgcacgtggaagtgaggtggtaccgctcagagccttctacccctgtgttcgtgcatagggacggggttgaagtgaccgaaatgcagatggaggagtataggggctgggtggaatggatcgagaacgggattgctaagggaaatgtggcattgaaaatccacaatattcagccgtcagataacggtcagtattggtgccatttccaggatgggaactactgcggtgagacctcactgttgctgaaggtggccggtctgggttcagctcccagtattcacatggagggccccggagagagcggagtccaacttgtttgtaccgccaggggctggttccccgagccccaagtttattgggaggacataaggggtgagaagctgttggctgtttccgagcatcgaattcaggacaaggacggattattttacgctgaggccacactggtggttcgcaacgcctccgccgagtctgtgagttgtcttgtgcacaatccagtgcttaccgaggagaaagggagtgtcattagtctgcccgagaagctacagaccgaactggcaagcttaaaggtgaacggaccttcccaacccattctagtgcgggttggcgaagacattcagctgacctgctacctgtctccaaaggcgaacgctcagagcatggaggtgaggtgggaccggagccaccggtacccagcagttcacgtgtacatggatggggaccatgtagctggagaacagatggcagaataccggggcaggaccgtgctcgttagcgatgctatcgacgagggccgcttgaccctgcagatcctatctgcacggcctagtgatgacggacagtatcgctgcctgttcgagaaggacgatgtgtaccaggaggcctctctcgacctcaaagtcgtttcgcttggctcttcccctctgatcactgtggagggccaagaggacggcgagatgcaaccgatgtgtagctccgatggatggttcccccagccccacgttccttggcgcgatatggaaggaaaaaccattcctagctcctcccaggccctcacgcagggcagccatggcctcttccacgtccagaccctgcttcgggtgacaaatatatcagctgttgacgtgacctgcagcatctccatacctttcttgggagaagagaaaatagctacctttagtctcagtggatggtag

SEQ ID NO: 116226 - DNA, 1368 bp, Artificial Sequence
  derived and/or modified sequence
atggtggacttccccggctacaacctgagcggcgccgtggccagctttctgtttatattgctcaccatgaagcagagtgaagacttcagagtgattggccccgcacatcctatcctggccggggttggagaggacgctttgttgacctgtcagttgctgcccaagcgcaccaccatgcatgtcgaggtccggtggtacagatcagagccctccactcccgtctttgtgcaccgagatggagttgaagttaccgagatgcaaatggaggaatacagagggtgggtggagtggatagaaaatggaatagctaaaggcaacgtcgcactgaagattcataacatccagccaagtgacaacggccagtattggtgccatttccaagacgggaactattgtggggagacgtcactgctgctcaaggtagccgggctgggaagtgcaccatccatccatatggagggcccgggtgaaagcggagtgcagctggtgtgcacagcccgggggtggtttcccgagccgcaggtgtactgggaggacattagaggagaaaagctcctagccgtatctgaacataggatccaggacgaagacggcctgttctatgccgaagctacgcttgtggtgagaaacgcgagcgcggaatcagtctcttgcttggtgcataatccagtccttaccgaagaaaagggctctgttatctctctgccagagaagttgcaaactgagctggcttctctcaaggttaacgggccttctcaaccaatattggtaagggtcggggaggatatccagcttacttgctacctcagcccaaaggctaacgcccaatctatggaggtgcggtgggatcggtctcatcggtatcccgccgtgcatgtttatatggatggggaccatgtagcgggcgaacaaatggccgagtatagaggtaggactgtactggtctctgatgcgattgacgagggccgcctgaccctgcaaattctgagtgctagacctagtgacgatggacaatatagatgcctgttcgaaaaggatgatgtttaccaagaggcaagtctcgatctgaaagtcgtaggtctggggtcatcaccgttgatcactgtggaaggacaggaggatggagagatgcagcctatgtgctccagcgatgggtggtttccacagccacacgtcccctggagagacatggagggaaagacgatccctagctcttcccaagctctcacgcaaggcagccacggtctgtttcacgtccagaccctcctacgagttacaaacattagtgccgtagatgtgacgtgttctatctcaattccattcttaggggaagaaaagattgcaacgttcagtctgagcggatggtag

SEQ ID NO: 116227 - DNA, 1368 bp, Artificial Sequence
  derived and/or modified sequence
atggtggacttccccggctacaacctgagcggcgccgtggccagctttctgtttatccttctcacaatgaaacagagcgaggattttagggtgatcggaccagcacaccctatcctggctggagtgggggaggacgcattgctaacttgccagttgctgcccaagcgcacgacaatgcacgttgaggttcgctggtacaggtcagaaccctccactcccgtgttcgtccatagagatggggtggaggttactgagatgcagatggaagagtaccgcggctgggtggagtggatcgaaaacgggatagccaagggaaatgtggccctaaagattcacaatatccaacctagcgacaacggccagtattggtgtcacttccaggatggaaactattgcggggaaaccagtcttctccttaaagtggcgggtttgggtagtgcaccttccatccacatggaggggccaggagaatctggcgttcagctcgtttgtactgcgcgtggttggttccctgagccgcaggtgtactgggaagatatcaggggcgagaaactgcttgccgtaagtgagcacagaatccaggatgaagacggtctgttctatgctgaggctaccctggtggttagaaatgcctcagccgagtccgtctcctgccttgtgcataatcccgtactgactgaagagaaaggctcagtaatctccctccccgagaaactccagacagagctggccagcttaaaggtcaacggccccagtcagcctatcctggtgagggtcggcgaagacatccagttgacatgctatctgagccctaaggcaaatgcccaatccatggaggtgcgctgggatcgctcacataggtaccctgcagtgcacgtgtacatggatggggatcatgtcgctggggaacagatggctgaatacaggggaaggacagttctggtgtccgatgccattgatgaggggaggctgaccctccaaattttgtcagccaggcccagcgacgatggtcagtacagatgcctcttcgagaaggatgatgtataccaggaagccagtctggacctgaaagtcgtcggtttgggctcatcacctctgatcacggtggagggtcaggaagacggggaaatgcagcctatgtgcagttcagatggttggtttcctcagccacatgttccgtggcgcgacatggaaggcaagaccatcccctcctctagccaggccctgacccaggggtcccacggtttgttccacgtgcagacattattgcgagtaacgaacatttctgccgtggatgtgacctgttccatctctattccgttccttggagaagaaaagattgccaccttttcactctctggttggtag

SEQ ID NO: 116228 - DNA, 537 bp, Artificial Sequence
  derived and/or modified sequence
atggaggtgcggtgggaccggagccaccggtaccccgccgtgcacgtttacatggatggtgaccacgtggcaggagagcagatggccgagtatagagggcgcacggtgctggtgtctgacgctattgacgaaggccgtttaacactgcagatacttagcgcgaggccgtccgatgatggccaatatcgatgtctcttcgaaaaagacgatgtgtatcaggaggcatccctggatctaaaggtggtggggttgggcagctcgcctctcattacagtggagggacaggaagacggcgaaatgcagcccatgtgctccagcgacggatggttcccccagcctcatgttccctggcgggatatggagggcaagacaattccctcatcaagccaggctttaacacagggatcccatggtctgttccatgtgcagacactcctgcgggtgaccaacatcagcgctgtagatgtaacctgctcgatcagcatcccttttctgggagaggagaaaattgccacctttagtctctctggatggtag

SEQ ID NO: 116229 - DNA, 738 bp, Artificial Sequence
  derived and/or modified sequence
atggtggacttccccggctacaacctgagcggcgccgtggccagcttcctgtttattcttctgaccatgaagcagtctgagaaattacaaacagaactggccagcctgaaggtgaacggtccaagccagccgatcctggtgagggttggggaagatatccagttgacttgttatctttcacccaaggccaacgctcagagcatggaggtgcgctgggacaggtcacaccggtatcctgccgtccacgtctatatggacggagaccacgtcgcgggggaacagatggcagaatatagaggccgaacggtgctagtcagtgacgctattgatgaagggcgtttgaccttacaaattctgtccgctcgaccctcagatgacgggcagtacagatgtctgtttgaaaaggacgacgtctatcaagaggctagcctcgacctcaaagtcgtgggcctaggttcctctccgctaattaccgttgaaggacaggaagacggtgagatgcagccaatgtgcagtagcgatggttggtttccccaaccccatgtgccatggagagacatggagggaaagaccattccctcctcttcccaggcgctgacccaggggtctcacggattgttccatgtccagactctgctgcgtgtcaccaacatctcagctgtggatgttacatgtagcatctctatcccattcctcggtgaggagaaaatcgcgaccttttcacttagtggctggtag

SEQ ID NO: 116230 - DNA, 738 bp, Artificial Sequence
  derived and/or modified sequence
atggtggacttccccggctacaacctgagcggcgccgtggccagctttctgttcatacttttaacgatgaagcaatccgaaaaattacagacagaacttgcaagcctgaaggtgaatggaccctcgcaacccatccttgtgcgggtgggcgaggacattcaactgacctgttatctttcacccaaggcaaacgcccagtccatggaggtgcggtgggaccggtcacaccgctaccctgcggtgcatgtctacatggatggcgaccacgtcgccggagagcagatggccgagtaccgcggacgaaccgttctggtgtccgatgccatagatgaaggacggctgaccttacagattctcagcgctcgtcctagcgatgatggacaatataggtgcctcttcgaaaaggatgatgtctatcaggaggcatccctcgacctgaaggtggtatcgttggggagctcacctcttattaccgtggaggggcaggaagacggcgaaatgcagcccatgtgttcctccgatggctggttcccccagccacacgtgccgtggcgagacatggaaggtaagaccataccctcctctagccaggcacttactcaggggtcccacggactctttcacgttcaaactttactgcgagtaacgaatatttcagccgtcgacgttacatgctccatcagtattccattcctgggggaggaaaagattgccacattcagcttaagcgggtggtag

SEQ ID NO: 116231 - DNA, 1368 bp, Artificial Sequence
  derived and/or modified sequence
atggtggacttccccggctacaacctgagcggcgccgtggccagctttttgttcattctgcttacaatgaagcagtccgaagatttcagagtcatcggacctgcccatcctatcctggctggcgtgggtgaagacgccctgctgacatgccaactcctgccaaagagaaccacgatgcacgtggaggtgaggtggtacagatctgaacctagcaccccagtgtttgtccatcgagacggtgtggaagtgacagagatgcaaatggaggaatatcggggctgggtggagtggatagagaacgggattgccaaaggaaatgtcgcgctgaagattcataatatacagccaagcgataacggtcaatattggtgtcacttccaggatggcaattattgtggggaaacttcccttctgctcaaagttgctggacttgggtctgcaccctctattcatatggagggcccaggcgaatctggtgttcagctggtttgcactgcccgtggatggttccctgagccccaagtgtactgggaggatatccgaggcgaaaagcttttggccgtgtccgagcacaggattcaggacaaggatgggctgttttacgctgaagccacactggttgtgcggaatgccagcgccgagtccgtgagttgtctggtccacaaccctgtactcaccgaagaaaaagggagtgtcatcagcctccctgagaagctgcagacagagctggcctctttgaaagtcaatggacccagccagccaatcctggtccgcgtcggcgaagacattcagttgacttgctacctaagccctaaggcgaacgcccagtccatggaggtgcggtgggataggagtcaccgctatcccgctgtccacgtctatatggacggagaccatgtggccggtgagcaaatggctgagtaccgcggtaggactgttctggtatccgacgctattgatgaagggcgacttaccttgcaaatcctctctgcccgaccatctgatgatggccagtacaggtgcctatttgaaaaggatgacgtataccaggaggcctccctggacctgaaggttgtatcattggggtccagcccactaattaccgtagagggtcaggaggacggggagatgcagccaatgtgtagctcagatggttggtttcctcagcctcacgtgccctggcgggatatggaaggaaaaactattccatcatcctctcaggctctgacacagggttctcatggactttttcatgttcagacgctgttgagagtcacaaacatctctgctgtggatgtaacgtgcagcatttccattcccttccttggcgaggaaaagatcgcgacattttctttgagcggctggtag

SEQ ID NO: 116232 - DNA, 738 bp, Artificial Sequence
  derived and/or modified sequence
atggtggacttccccggctacaacctgagcggcgccgtggccagctttttgttcatactcctcacaatgaaacaaagtgatagactggacacacccaaggcgtctctaaaagtgaacggaccatctcagcctatcctggtgcgcgtgggagaggacatccagctcacctgctacttgtctcctaaagctaacgcccaaagtatggaggtgagatgggatcgcagccacaggtacccagccgtgcacgtttatatggacggagaccatgtagctggggaacagatggccgaatacaggggacggactgtcttagtctccgatgcaatcgacgaaggccgccttaccctacagattctttccgccaggccaagtgatgacggacagtatagatgtcttttcgagaaggacgatgtgtaccaagaagccagcctcgatctgaaagtcgtgggcctggggtcctcacccctcattacagtggaagggcaggaggacggcgaaatgcaaccaatgtgctcctcggatggctggtttccccagccccatgttccctggcgtgacatggaaggaaaaaccattcctagctcctcccaggctctaacgcaggggtcacacggcttatttcacgtccagaccctgctgcgggtgaccaatatttccgcagttgacgtgacttgtagtatctccattccttttttgggagaggaaaagatcgccacctttagtctatcaggatggtag

SEQ ID NO: 116233 - DNA, 1368 bp, Artificial Sequence
  derived and/or modified sequence
atggtggactttcccggttacaatctgtcgggcgcagtggcttcttttctattcatcctgctgacaatgaaacagagcgaggactttagagttattggcccagctcatcctatactggccggagtgggcgaggatgcgctcctgacgtgccagctgctgcctaagagaaccaccatgcacgtcgaggttcgctggtatcgctctgagcctagtactcccgtgttcgtgcatcgggacggcgtggaggtgacagaaatgcagatggaggaataccggggatgggtggagtggatagagaacggaatcgctaaaggaaacgtcgccttaaagattcataacattcaaccttcagataatggacagtactggtgtcactttcaagacgggaactactgtggcgaaactagcctcttgctgaaagtcgccggtttaggaagcgccccttccatacacatggaagggcctggcgagtcaggtgtacaattagtgtgcactgccaggggttggttcccagagccccaggtgtactgggaggacatccgcggtgagaagttacttgcagtgtcagagcatcgcatccaggacaaagatgggctgttctacgcggaagcaactttggtggtgagaaatgcatcagcagagtcagtcagctgcctcgttcataatcccgtgctaactgaagagaaaggctctgtcatcagccttcccgagaaactgcagaccgaattagccagcttgaaagttaacgggccaagccaaccgattctggtaagagtgggcgaggacattcagcttacgtgctacttgagcccaaaggcgaatgcccagtccatggaggttcgatgggacaggtcacatcgctaccctgccgtgcacgtgtacatggatggtgaccatgtggctggggagcaaatggctgaataccgtggcaggacagttcttgtgagcgacgcaattgacgaagggcgacttacactgcagattctgagcgccaggcccagcgacgacggacagtaccgatgcctcttcgaaaaagatgacgtatatcaggaggcctctctcgatcttaaagtggtgtctctaggtagttcccccctgattaccgtggaaggccaggaggacggcgagatgcagccaatgtgtagttccgacggctggtttcctcagccacatgttccgtggcgcgacatggaggggaaaaccatcccttcctccagccaggctctgacccaggggtcacacgggctgtttcacgtgcagaccttgctgagagtgactaatatctccgcagtagacgtgacctgttcaatctcaatcccatttttgggggaagagaaaattgccacgttctcactgagtggttggtag

SEQ ID NO: 116234 - DNA, 738 bp, Artificial Sequence
  derived and/or modified sequence
atggtggattttccagggtacaacctgagcggggcagtggccagcttcttatttatcctgcttactatgaaacagagcgaaaaactgcagacagagttagcaagccttaaggtgaacgggccatctcagcccatactggtcagggtgggcgaagacatccagctgacttgttacctgagtccaaaggcgaacgcccagagtatggaagttaggtgggacaggtcccaccgttatcccgctgtgcacgtttacatggacggcgatcacgtggcgggtgaacagatggcagagtacaggggcagaacagttctggtctctgatgcaatcgatgagggcagattgactctgcagatcctcagcgcccgtccaagcgatgacggccagtatcggtgcctattcgagaaagatgacgtctaccaagaagcttccttagacctcaaggttgtctcattggggtctagcccccttatcacagtcgaggggcaggaggacggcgagatgcaacctatgtgttccagtgacggctggttcccccagccgcacgtaccctggcgagatatggaaggaaagactattcctagtagcagccaggcattgacccaagggtcacatggtctgttccatgtgcagaccctcctacgggtgacaaacattagcgctgtggatgttacttgtagcatatccatacccttcctgggggaagagaaaattgcaacattttctctgtccggatggtag

SEQ ID NO: 116235 - DNA, 636 bp, Artificial Sequence
  derived and/or modified sequence
aaagcaaatgcccagagcatggaggttcggtgggatagatcacatcgatacccagcggtgcatgtctatatggatggggatcacgtggctggcgagcagatggccgagtaccgagggcgtacagtgcttgtgtcggacgctatagatgaaggacgcttgacgctccagattctgagcgccaggcctagtgacgatgggcagtatcggtgcctctttgagaaggacgacgtttatcaggaggcctcattagatcttaaagtcgtgtctttgggttcatccccgctgattactgtggagggtcaagaagacggtgagatgcagccgatgtgttcttccgatggctggttcccccaacctcatgtgccctggcgggacatggaggggaaaaccatccccagctcaagtcaggccctaacgcaagggagtcatggcctgtttcatgtacagactttactgcgcgtgaccaatatttccgctgtggatgtcacatgctccatctctattccatttctaggggaggaaaaaatcgctacattctccctgtccgagtcacgaatgacttttttatggaaaactctactggtgtggggcctgttgttggctgtggctgtgggcctccctcgaaagaggtcttag

SEQ ID NO: 116236 - DNA, 636 bp, Artificial Sequence
  derived and/or modified sequence
aaagccaacgcccagagtatggaggttcggtgggataggtcccatcgctaccctgccgtgcacgtttacatggatggggatcacgtggccggagagcaaatggccgagtatcgcggaaggaccgtgctcgtgagtgatgccatcgacgaagggagactcacactgcagatactctccgctcggccatcagacgatggtcagtacagatgcctcttcgagaaagacgatgtctaccaggaagcttctttagacttgaaagtggtcgggctgggctcttcacctctgattacagtcgaagggcaggaagatggggaaatgcagccaatgtgttcatcagacggatggtttccgcagccacacgtaccttggcgagacatggaaggcaagactatcccctcttcttcacaggccttgacgcaaggatctcatggattgttccatgtgcagactctgctgcgcgtcacaaatatttccgcggtggatgtgacttgcagcatctccatacccttcctgggggaggaaaagatcgctaccttttccctgtctgaaagccgaatgaccttcctgtggaaaaccctgctggtgtgggggctgctgctggctgttgcagttggacttccccgaaagagaagctag

SEQ ID NO: 116237 - DNA, 636 bp, Artificial Sequence
  derived and/or modified sequence
aaggcaaatgcacaaagcatggaagtgcgatgggatcggtcccatcgataccccgcagtgcacgtctacatggacggtgaccatgtagcgggagagcagatggccgagtacagaggtcggactgttctggttagcgacgccattgatgagggaagattgacactccagatcctgagcgcacggcctagcgatgatggtcaataccggtgcctgttcgaaaaggacgatgtgtatcaggaagccagcctagatctcaaagtggtcggattgggttcctcccccctaattacagtcgagggacaggaggacggtgaaatgcaaccgatgtgctcttccgatgggtggtttccacagccccacgtgccatggcgcgacatggaggggaagaccataccttccagcagtcaagccttaactcaaggttctcatggactctttcatgtgcaaacattgctgcgcgttactaacatatctgcagtagatgtcacctgttcaatttctatcccatttcttggcgaggaaaagatagcaaccttctctctctctgagagccgcatgaccttcctgtggaaaaccttgcttgtatggggcctcctcttggcagtagctgtgggcttgccgagaaagaggtcttag

SEQ ID NO: 116238 - DNA, 636 bp, Artificial Sequence
  derived and/or modified sequence
aaggccaacgctcagagtatggaagttcgatgggatcgctcccaccgctatccggctgttcacgtgtacatggacggtgatcatgtggctggagagcaaatggcagagtacaggggaaggaccgtgttggtgtctgacgcaattgacgaaggtaggctcactttgcaaattctttctgcaagacccagtgacgacggacagtaccgctgtctgttcgaaaaagacgacgtgtatcaagaagcttctttggacctgaaagtggtcggcttgggtagctcccccctgatcaccgtggagggacaggaagatggcgagatgcagccgatgtgctctagcgacggttggttcccgcagccacacgtgccttggagagatatggaaggcaaaactattccttcatcctctcaggccctaacgcaagggagtcacgggcttttccatgtgcagaccctgcttcgtgtgacaaatatcagcgccgttgacgttacatgttctatctcaattccattcttgggggaggaaaaaatcgctacttttagcttgtctgagagtcgaatgacatttttgtggaagactctgctagtatggggtctgctgctggcggtcgcagtcgggctcccgcgaaagcgaagttag

SEQ ID NO: 116239 - DNA, 636 bp, Artificial Sequence
  derived and/or modified sequence
aaagccaatgcacagagtatggaagttcgttgggaccgtagccaccggtatccggcagtacacgtttatatggatggagaccacgtagccggagagcagatggcggaatacagaggtaggacggtcttggtcagcgacgctattgatgagggcaggttgaccttgcaaattctgtcagcacgtcccagtgacgacgggcagtaccgctgtctcttcgagaaggatgacgtgtaccaagaagctagtctggacctcaaggtggtgtccctgggatccagtcccctgatcactgtagagggtcaagaagacggtgagatgcagcccatgtgttcgtccgatggttggtttccacaaccccatgtgccttggcgtgacatggaaggcaagaccattccttccagcagccaggcacttacacagggctcgcacggtctgttccacgttcagacactgctcagggtgaccaacatttcagccgtggacgttacatgctccatttccattccatttctcggggaagaaaagatcgccaccttcagcctatcagaaagccgaatgacattcctctggaagaccctgctcgtgtgggggcttttattagcagttgccgtgggactgcctaggaagaggtcatag

SEQ ID NO: 116240 - DNA, 636 bp, Artificial Sequence
  derived and/or modified sequence
aaggcaaacgcgcagtccatggaggtgcgatgggacagaagtcacaggtatccagcagttcatgtgtacatggacggagatcatgtagctggcgagcagatggccgagtacagggggagaacggttctggtgagcgacgccatcgatgaggggcgattaacactccagatcctttcagctcggcctagcgacgacggccagtaccgctgcttgtttgagaaggatgatgtgtaccaggaggcttcactcgatctgaaggttgtgagcctgggcagctctcccctgattactgtcgaggggcaggaagacggcgaaatgcaacccatgtgctccagtgatggttggtttccgcagccccacgtcccctggagagacatggagggtaagaccattccaagctcaagccaagcacttactcagggctcccatgggctgtttcacgttcagacactactccgggttactaacatttctgccgtcgacgtcacttgctctatcagcatcccttttctgggggaagagaaaatcgctaccttcagcctatcagaaagtcggatgacgttcctgtggaagactctgttggtatggggcctcctccttgcagtggcagttggcctgccacgcaaaaggtcttag

SEQ ID NO: 116241 - DNA, 636 bp, Artificial Sequence
  derived and/or modified sequence
aaggctaacgcacagagcatggaagtacgctgggacaggtctcaccggtacccggcagttcacgtttacatggatggcgatcacgtggccggtgagcagatggctgaataccgcggaagaacagttcttgtaagcgacgcgattgatgagggacggctcactttgcaaattttgagcgcgcgaccgagcgatgatggccagtataggtgcctgttcgaaaaggacgacgtctaccaggaagccagtctggatctcaaggtcgtgtcactgggcagctctccattaattactgtggaggggcaagaggacggagagatgcagcccatgtgctcctcagatgggtggttcccacaaccacatgtgccctggcgggatatggaaggcaagaccatcccatcctcttcgcaggccctgacgcaggggtctcatggactcttccatgtgcagacacttctgcgggtgactaacattagtgcagttgatgtcacatgttcaatcagcattccattcctgggggaggaaaaaatcgcaacatttagtcttagcgagtctcgaatgactttcttgtggaaaacccttctcgtctggggtctccttctggccgtcgctgttggcctgcccagaaagcggagctag

SEQ ID NO: 116242 - DNA, 1449 bp, Artificial Sequence
  derived and/or modified sequence
atggtggacttccctggatacaacctgtcaggagccgtagcgagtttcctcttcatactgctcacgatgaagcagagcgaagactttagagtgatcggcccagcccatccaatcctcgccggagtcggggaagacgccttgttgacctgtcagctgctgcctaagaggaccaccatgcatgttgaagtgcgctggtacagaagcgagcctagtacacccgtgttcgtgcaccgtgacggtgtcgaagtgaccgagatgcagatggaggagtaccggggttgggtcgagtggatcgagaacggcatcgctaaggggaacgtggctctaaaaattcacaatatacagccatccgataacgggcagtactggtgtcactttcaggacggcaactattgcggggaaacatctttactgctgaaggttgccggactcggcagcgcaccaagtatacacatggaagggcctggggaatcaggagtccagttggtgtgtacagccagaggatggttcccagagcctcaggtctactgggaggatatccggggagagaagctcctggctgtgtcagaacaccgtattcaagataaggacgggttattctatgcagaagctacattagtggtgagaaacgccagcgccgaatccgtatcctgcttggtccacaacccagtcctgactgaagagaaaggatcagtgatctccctgccggagaagctgcagaccgaactggcgagcctgaaggtgaatggtcctagtcagcctatattagtacgagtgggggaggatatccagctgacttgttatctgtccccaaaggcaaacgcacagtccatggaagtgagatgggacagaagtcatcgatacccggcagttcacgtgtatatggacggggaccacgtggcgggagagcaaatggctgagtaccgaggccgtacagtgctggttagcgatgcgattgacgaggggagactgacacttcagatcctgagcgcgaggccatcagatgatggtcagtatagatgtcttttcgagaaggacgacgtttatcaggaggcttcactggacctgaaagtggtgagtcttgggtccagtcctctgattaccgtggagggtcaggaagatggggaaatgcaacctatgtgttccagtgacggttggttccctcagcctcacgtcccttggcgcgacatggaaggcaaaaccattccatcttcaagtcaggccctgacacagggatcccacggcctcttccatgtgcagacactcctgagggtaactaatatctcagcagtcgacgtcacatgcagcatctctattccattcctgggtgaggagaagattgctaccttttctttaagcgagtcacgtatgacatttctatggaaaaccttgctggtttggggcctcctgctcgctgtagccgtcgggctgcctcgcaagcggagttag

SEQ ID NO: 116243 - DNA, 738 bp, Artificial Sequence
  derived and/or modified sequence
atggtggatttccctggatacaatttgagcggggcagtggccagttttctttttatcttgctgacaatgaaacagagcgaccggctggatacccctaaggcttctcttaaagttaacggaccctcgcaaccaattttggtcagggtcggtgaagacatacaacttacctgttacctgtcaccaaaggctaacgcccagtcaatggaggtacggtgggatcggagccacagatacccggcagtccacgtgtatatggatggcgatcatgtggcgggagagcagatggctgaatatcgaggtaggaccgtcctcgtgtcagacgcaattgatgaaggtcgattaacccttcaaatcctttcggctagaccgagcgatgacggacagtatagatgtcttttcgaaaaagatgatgtgtaccaggaagcgagtttggatctgaaagttgttagccttggaagcagtcccctgattaccgttgagggccaggaggatggtgaaatgcaacccatgtgctcctcggacggatggttcccccagccacatgtcccttggcgggatatggaggggaaaactataccgtcaagttcacaggctctcacccagggaagccacggcctattccacgttcagacactgcttcgtgtgactaacatatctgccgtggacgttacctgttcaatcagcatcccttttttaggtgaggaaaagattgccactttctctctgagcgggtggtag

SEQ ID NO: 116244 - DNA, 537 bp, Artificial Sequence
  derived and/or modified sequence
atggaagtcagatgggatagatctcaccggtacccggctgtgcacgtgtacatggatggggaccatgtagctggcgagcagatggccgagtacagagggcgtacagtgctcgtgtcagatgccattgacgaaggtcgccttaccctgcagattctctcagccaggcccagcgacgacgggcagtatagatgcctttttgaaaaagacgatgtttaccaggaagcatcattggacctgaaagtggtctctctgggctctagtccactcattaccgtcgaagggcaggaagatggtgagatgcagcctatgtgcagcagtgacgggtggtttccacagccacacgttccatggcgggatatggaagggaagaccataccgagttctagccaggcactgacccaaggaagccacgggctttttcacgtccagacccttctccgtgtgacaaatatatcggcagttgacgtgacttgtagcatctcgatcccattcctcggtgaggagaaaatcgcaactttctctttatcagggtggtag

SEQ ID NO: 116245 - DNA, 738 bp, Artificial Sequence
  derived and/or modified sequence
atggtggattttcccggatacaatctatcaggcgctgtagccagctttctctttatcctgctgacaatgaagcagtccgaccgattagacacacccaaagcctcgttgaaggtgaatgggccttcccaacccattcttgttagggtgggcgaggacatccaacttacatgctatttgagcccgaaagcaaacgcacagagtatggaggttcgctgggaccgcagccacaggtacccggctgttcatgtgtacatggacggggatcacgtggccggagagcagatggccgagtacagaggcaggaccgtgctggtctctgacgccattgacgagggacgactcactctacaaattctctccgcccgaccctcggatgacggacagtaccgatgtctgtttgaaaaggatgatgtgtaccaagaggctagcctggatcttaaggtcgtgggcctcggctctagccctctgataactgtggagggccaagaagacggcgaaatgcaacctatgtgctcttctgatggttggtttccacagccacacgttccctggagagacatggaggggaaaacaattccgagttctagccaggctttaacacaaggtagccatggtttatttcacgttcagactctgttgagggtaaccaatatttccgctgtggatgtcacctgttccatctctattccattcctgggcgaggaaaaaatcgctacctttagcctgtctggatggtag

SEQ ID NO: 116246 - DNA, 738 bp, Artificial Sequence
  derived and/or modified sequence
atggtagactttccaggatataacctgtcaggagcggtcgccagctttctattcatcttattgacaatgaagcagtctgatcggctcgacacgcccaaggcctcattgaaagtaaatgggccttcacaacctatcctagttcgcgtgggggaggatatacagctgacatgttatctgtctccaaaggccaatgctcaaagtatggaagtgcgctgggacaggtcgcatagatatccagcagtgcacgtgtacatggacggtgaccatgtggctggagagcagatggcggagtaccgcggaaggaccgtgttggtttcagacgccatcgatgagggtagactgactttgcagatcttgtcggcaagacccagcgatgacgggcagtaccgctgcctgttcgaaaaggacgatgtataccaggaagcctcactcgatttaaaagtggtgagcctgggcagcagtcctctgattaccgtagaagggcaagaggatggcgagatgcaaccaatgtgctcctccgacggatggtttcctcagccccacgttccatggagagacatggagggtaagaccattccatcctccagtcaggctctaacccagggctcacatggtctcttccatgtgcagaccctgctcagagtcaccaatatatcagcagtggatgtaacctgctctatatctataccgttcttgggcgaggaaaagatcgcaaccttctcgctgagtggctggtag

SEQ ID NO: 116247 - DNA, 738 bp, Artificial Sequence
  derived and/or modified sequence
atggtggatttccccggttataacttatcgggcgctgttgccagcttcttgttcattctcctcactatgaaacagtccgagaagctccagacggagctggcttccttgaaagtgaatggcccttcccaaccaattctcgtccgggtgggggaagatattcagttgacatgttacctttccccaaaagccaatgcccagagtatggaggtccgatgggacaggtctcaccgttacccagcagtccacgtttatatggatggggaccatgtagcgggtgagcagatggccgaatatcgcggtagaaccgttctggtatctgacgccattgacgagggcaggctcaccctgcagatcctgagtgctcgtccatcggacgacgggcaatatcggtgcctattcgagaaagatgatgtctaccaggaggccagcctagacctgaaagtcgtcggccttggctccagcccactgatcactgtggaaggacaggaggatggggaaatgcagcctatgtgcagctctgatggatggtttccacagcctcatgtgccttggcgggacatggaggggaaaaccatcccctcatccagccaagccctaacccagggttctcacggcttgtttcatgtgcaaactctactgcgtgtaacaaatattagtgctgtcgatgtgacttgttctattagtataccttttctgggcgaggagaagattgcaaccttttccttgagcgggtggtag

SEQ ID NO: 116248 - DNA, 537 bp, Artificial Sequence
  derived and/or modified sequence
atggaggtacgatgggataggtcccaccggtatcctgcggtccatgtgtatatggacggcgaccatgtggcgggagagcagatggccgagtaccgaggtaggactgtactggtcagcgatgcgatcgacgaagggcgactgacactgcagattctgtccgcacggccatccgatgacggacagtacagatgtctgtttgagaaggacgacgtatatcaggaagcttctcttgatctaaaagtagttggtcttggatcgagcccactcatcaccgttgaaggccaagaggacggcgaaatgcaacccatgtgcagtagtgacggctggtttcctcagccacatgtcccctggagggacatggagggaaagacaatcccgtcctcctctcaggctctgacccaggggtcacatggactcttccatgttcagacactgctccgcgtcacgaacatctccgccgtggatgtgacgtgtagcatctccattccttttctcggggaagaaaaaatcgctaccttttcgctgtccggatggtag

SEQ ID NO: 116249 - DNA, 738 bp, Artificial Sequence
  derived and/or modified sequence
atggtggacttcccaggctataatctgtccggcgctgtggctagctttctgttcatcctgctgactatgaaacagtcggacagattagacacacccaaggcttccctaaaagttaatgggccatcacagccgatcctggttcgcgtgggcgaggatatacagttaacctgctatttatctcctaaggctaatgcccagtcaatggaagtgcggtgggaccgcagccacaggtatcccgcagtacatgtgtacatggatggagaccatgtcgccggagaacagatggccgagtaccgaggccgaactgttttggtctcagacgctatagacgaagggagactgacactccaaattctgtccgccaggccttcagacgatgggcagtatagatgtctttttgagaaggatgatgtttatcaggaggcctctcttgacctaaaggtagtctctttaggctcatctcctctgatcacagtcgagggccaagaagatggagagatgcaaccaatgtgtagcagcgatggatggtttccgcagccgcatgtgccttggcgggatatggaggggaagaccattccgtcgtcctcacaggccctgacccagggctcacatggcctgtttcacgtacaaactctgttgcgtgttacaaatatctcagcggtggacgtgacttgttctatctctataccctttttgggcgaggaaaagatcgctaccttctcattgagtggctggtag

SEQ ID NO: 116250 - DNA, 1368 bp, Artificial Sequence
  derived and/or modified sequence
atggttgattttcctggctacaatctgagcggcgctgtcgcttcgttcctgtttatactgctgacaatgaagcagagcgaggacttcagagtgatcgggccagcccacccaatactggcaggcgtgggcgaagatgccctccttacttgccagctgctaccaaagcgaacaaccatgcacgtagaagttagatggtatagaagtgagccgtcgaccccagtctttgtacaccgcgatggcgtggaagttacggaaatgcaaatggaggaatacagaggttgggtggagtggattgaaaacggcatcgcaaaaggaaatgtggccttaaaaatccataacatccagccctcagataacggacagtactggtgtcactttcaggatgggaattattgtggtgaaactagtctcctattgaaagttgcaggcctaggctcggcacctagtattcatatggagggcccaggggaatccggcgttcagctggtgtgcaccgcccgtggatggtttcccgaacctcaggtatactgggaggatatcaggggagagaagttactggcggtaagcgagcatcggattcaagatgaagatggcctgttctacgctgaggccactctggttgtgcgcaatgccagcgccgagtccgtgtcatgcctcgtgcacaatccggtcttaactgaagaaaagggatccgtcatctcgctgcccgagaagctccagacagagctggcttcattgaaggttaacggcccaagccagccaatattggtgcgggtgggagaagatatacagctgacctgctatctgagccctaaggccaacgcgcagagcatggaagtaaggtgggatagatcacatcgctatcccgcagtccatgtctacatggacggcgatcatgtggccggagaacagatggccgagtatcggggtagaaccgttctggtgtcagacgctatcgatgagggacgcttaacattacagatcctgtccgccagaccttcagatgacggccaatacaggtgcttgtttgagaaggacgatgtctatcaggaagcgtctctagatctaaaggtcgtgggtctgggatcaagtcctttgataaccgtggagggacaagaggatggggagatgcagcctatgtgtagtagcgatggctggttcccccagccccatgtgccttggagggatatggaggggaagacaatcccctctagttcacaggccctgacccagggcagtcatggtctgttccacgttcagactttactgcgcgtcaccaacatcagcgccgtagacgtaacgtgtagcatttccatacccttcctcggcgaggaaaaaatcgccactttcagcctaagtggatggtag

SEQ ID NO: 116251 - DNA, 738 bp, Artificial Sequence
  derived and/or modified sequence
atggtggatttcccagggtacaatctctctggtgccgtggcttcctttctcttcattctactgaccatgaagcaaagcgatagactggatacaccaaaagcatcactgaaagtcaacggccctagccagcccatcctggtgcgcgttggggaggatattcagctgacctgctatctctcccccaaggcaaatgctcagagtatggaggtgagatgggataggtcccacaggtaccccgcagttcacgtgtatatggacggggaccatgttgcaggtgagcagatggctgagtacagaggaagaaccgtgctggtgagcgacgctatcgatgagggccgactgacactccagatactgtcagctcgcccttcagacgatggccagtatagatgcttgttcgaaaaggatgatgtgtatcaggaggcgagcctggatctcaaggtcgtctccctaggatcaagccctttgattaccgtcgagggacaggaggacggggagatgcagccgatgtgctcttctgacggatggtttccccagccccacgtgccatggagggacatggaaggcaagacaattccctcatcttcccaggcgctgacgcaaggatcgcatggcctgttccatgtgcagacactgttaagagttaccaacatttctgcagtggatgtcacttgctcgatttctatcccattcttgggcgaggaaaagatcgcaacattctcccttagcggctggtag

SEQ ID NO: 116252 - DNA, 738 bp, Artificial Sequence
  derived and/or modified sequence
atggtggattttccagggtacaatctgtctggggctgttgcttcatttttgtttatccttctcaccatgaaacaaagcgaccggctggatacaccaaaggcctccttgaaagtgaatgggccatctcagcccattcttgtgcgcgtaggggaagatattcagctgacgtgttatctaagtccaaaagcaaatgcccagtccatggaggtacgctgggaccgctcacacaggtaccccgcagtgcatgtgtatatggatggcgatcacgttgcaggggagcagatggccgagtatcgcggaaggacagtgttggttagcgatgccatcgatgaggggagattgactctgcagatcttgtcagctcgaccctcagacgatggacagtaccgttgtctttttgagaaagacgacgtgtatcaagaggctagtctggaccttaaagttgtggggttaggttcctccccactgataactgtggaaggacaggaagacggagagatgcagccaatgtgtagctccgatgggtggttcccccaacctcacgtcccatggagggacatggaaggcaaaacgatccccagtagttcccaggccttgacccagggtagccatggactgtttcatgtgcaaacactcttgcgggtcacaaatatctcagccgtagacgtgacctgttctatatctattcctttccttggggaggagaagatcgccacattttcactgtcagggtggtag

SEQ ID NO: 116253 - DNA, 738 bp, Artificial Sequence
  derived and/or modified sequence
atggttgacttccccggatacaacctgtctggcgctgtggctagcttcctgtttatcctcctgaccatgaaacagtcagacaggttagataccccaaaagcgtccctgaaagttaatggtccttctcagccaattttagtccgagtaggggaggatatacaactaacgtgttatctgtctccaaaggctaatgcgcagagcatggaggtgcgctgggatcgtagccaccggtacccagctgttcacgtctacatggatggcgaccacgtggccggagagcagatggccgaatatcggggtaggacggtgcttgtgagcgacgcaattgacgaggggaggctgacgttgcaaatactgtctgccaggccctccgacgacgggcagtaccggtgtctgttcgaaaaggatgacgtataccaggaggcaagcctggatcttaaagttgtgagtttggggtcatccccactcattaccgtcgagggccaggaagatggagagatgcagcctatgtgttctagcgacggatggttcccccaacctcatgtgccatggagggacatggaaggaaagacaattcctagctcttcccaggccctgacccagggctcccacggtctgtttcatgtccaaacgctgctgagggtgactaacatatctgcagtggatgttacttgtagcatctctatccccttcctaggcgaggaaaagatcgccacgttcagcctgtcaggatggtag

SEQ ID NO: 116254 - DNA, 1368 bp, Artificial Sequence
  derived and/or modified sequence
atggtcgattttcctggatacaatctgtccggagcggtagcatcattcttattcattttgctcactatgaagcaatcagaagattttcgggttatcggacccgcacacccaatactggcaggcgttggagaggatgccttgctcacctgccagctgctgccaaagagaactacaatgcatgtagaagtccggtggtaccgatcagaaccctcaacccccgtttttgtgcatagggacggggtggaggtcaccgagatgcagatggaagaatacagagggtgggtggagtggatcgagaatgggattgccaaaggcaatgtagccttgaaaatccataacatccagccttccgataacggtcagtactggtgtcactttcaagacgggaactactgcggggaaacatcgctactgctgaaagtggcagggctaggcagcgccccatccattcatatggaggggcctggcgaatcaggtgtccagcttgtctgcacagcgcgtggctggttccccgaacctcaagtttattgggaggacatccggggagagaagttgcttgctgtcagtgagcaccggatccaggataaggacggattgttctatgcggaagcgaccttggttgtcaggaacgcctccgctgagagtgtcagctgccttgttcacaatcctgtgctcacagaagaaaagggtagcgttataagtctgcccgagaagctgcaaactgagctcgcatctttgaaggtcaatgggccttcacagccaatcctcgtgcgtgttggcgaggacatccaactgacttgttacctttcccctaaggctaatgctcagagcatggaggtccgctgggatagaagtcaccgctatccagccgtccacgtttatatggacggggaccacgtggctggcgaacaaatggctgagtaccgcggacggactgtgctggtgagcgatgccattgatgaaggaagactcaccctccagatactgtcagccaggccaagcgacgacggccaataccggtgcctgtttgagaaggacgatgtgtaccaggaagccagtctcgacctaaaggtggtgtccctggggagttcacctctgattactgtggaagggcaggaggacggtgaaatgcagccaatgtgctcaagtgacggctggttcccacaaccccacgttccgtggcgtgacatggaaggcaaaactattccaagctcatcgcaggccctcacgcagggcagccacgggctgttccacgttcagacacttctaagggtcaccaacattagcgccgtagacgtgacatgcagcatctctataccattcctgggagaggagaagatcgccaccttttcgttgtccggttggtag

SEQ ID NO: 116255 - DNA, 1368 bp, Artificial Sequence
  derived and/or modified sequence
atggtggacttccccggttacaatctgtctggagcagtcgctagtttcttgttcattcttctcaccatgaagcagtccgaagactttcgcgtgattggaccggcacacccaattctggctggcgtgggtgaggatgcgctgctgacctgccaactgctccctaaacgtactaccatgcatgtggaagtccgctggtatcgctctgagcctagcactcctgttttcgtgcatcgtgatggagtggaggtgacggagatgcagatggaggagtacaggggctgggtggaatggatcgagaatggtattgcaaaggggaatgtggccctaaagatccataacatccagcccagcgataatggtcagtactggtgtcattttcaagacggcaactactgtggggagacttccttgttgctgaaagtagctggtctaggatctgctccctctatccacatggaggggcctggagagtcaggcgtgcagctggtgtgcactgcacgtggatggttccccgagccacaggtctactgggaagacattaggggagaaaagctgctcgcagtgtctgaacatcggatacaagataaggatggcttgttttatgccgaggccacgttagtggtgagaaacgcctctgccgagtcggtgtcatgtctggtacacaacccggtcttaacagaggaaaagggtagcgtgatctcacttcccgagaaactccagacggaactcgcatctctgaaagtgaacgggcctagccagcccatcttagtgcgagttggagaagacattcagcttacgtgctatctgtcacctaaggctaatgcgcagtcgatggaagtaagatgggatcgtagccaccgctaccccgctgtgcatgtgtatatggacggggatcatgtggccggtgagcaaatggccgagtacaggggcagaacagtcctggtatctgacgccattgacgaaggcagacttacccttcagatcctatcggcacgcccaagcgatgatggacagtacaggtgtttgtttgagaaggatgacgtttaccaggaagccagtctcgacctgaaggttgtctcactgggctccagccctctgatcacggtcgagggccaggaggatggagagatgcagcctatgtgcagttccgacgggtggttcccccagccacatgtgccatggcgagacatggagggtaagactattcccagtagcagccaggccttaactcaggggagtcacggactgtttcacgttcagacgctcttgcgggttactaacatctctgccgtggatgtgacttgttcaatctctattcctttcttgggggaagagaaaatagccacgttcagcctctccggctggtag

SEQ ID NO: 116256 - DNA, 537 bp, Artificial Sequence
  derived and/or modified sequence
atggaagtccgctgggaccggagccaccggtaccccgcagtgcacgtgtatatggacggcgatcacgtcgctggcgaacagatggccgagtacaggggcagaaccgtgctggtgagcgacgcaattgatgagggcaggctcactctgcaaatacttagcgccagaccaagtgatgatgggcaatatcggtgcctttttgaaaaagatgacgtttaccaggaggcttcactagacctgaaggttgtctcccttggatcatcacctctgattaccgttgaaggacaagaggacggagagatgcaacctatgtgctcatctgacgggtggtttccgcagcctcatgtaccttggcgagacatggagggtaaaacgatacctagttcctcccaggctctgacccagggtagtcatggcctttttcacgtgcagaccctcctgcgggtcaccaacatctccgctgtggacgtgacctgtagcatctccattccattcctaggtgaagaaaagattgctacgttcagtctgtcaggatggtag

SEQ ID NO: 116257 - DNA, 1368 bp, Artificial Sequence
  derived and/or modified sequence
atggtcgatttccctggatataaccttagcggggctgtggcatcgttccttttcatcctgcttacaatgaaacagtctgaggacttcagagtaattggtccagcacatcccattctcgccggagttggcgaagatgccctgctgacatgccaacttttgcctaaacggaccaccatgcacgtggaagtcagatggtatcgctcagaaccatccacccctgtctttgtacatcgggatggggtagaggtgacagagatgcagatggaggagtaccgtggatgggtggaatggatcgagaacggcattgcaaagggaaatgtcgccttaaaaatccacaacatccaaccttccgataatgggcagtactggtgccactttcaggacggtaattattgtggggagacctcccttctactgaaggtggcgggtttgggctcggctcctagtatacacatggagggaccaggggaatccggcgtgcagcttgtatgcaccgctcgaggatggttccctgaaccacaagtatactgggaggacatccgaggcgagaaactcctggctgtgtctgaacaccgcattcaggacaaggacggactcttttacgctgaagctacccttgtagtgcgaaatgcctcagcggaatcggtgtcatgcctggtgcataatccagttctgaccgaggagaagggcagtgtaatcagcttgcctgagaaacttcagactgaactcgcctcactaaaggttaacggcccatcccaaccaattttggtgagggttggggaggacattcagttaacgtgctatctttcacccaaagccaatgcgcagtctatggaagtcagatgggacaggtcgcatcggtaccccgcagtccacgtttacatggacggcgatcacgtcgccggtgaacaaatggccgagtatcgtggacgtacagtgctcgtcagcgacgctattgatgaaggacggctgacgttacaaattctgtccgcacggccttctgacgacggacagtatcggtgtttgttcgagaaggatgacgtctaccaggaggcgagccttgacttgaaggtggtttctttgggatcgagtccgctgataacagtcgagggccaggaagacggcgaaatgcagccaatgtgcagcagcgacggctggttccctcaaccccatgtcccatggagggacatggaggggaaaaccatccctagttccagccaggcgttgactcagggtagtcacgggctgtttcatgttcagaccctgttacgcgtaacgaacataagtgctgttgatgtgacctgttcaatcagcataccctttttgggtgaggaaaagatcgctacattcagtttgtccgggtggtag

SEQ ID NO: 116258 - DNA, 1368 bp, Artificial Sequence
  derived and/or modified sequence
atggtcgactttcccggatacaacctgtccggggcagtagcgtcctttctgttcatacttctgactatgaagcaatcagaagacttcagggtgataggcccagcgcacccgatcctcgcaggcgtgggcgaagacgctctcttgacctgtcagctgctacccaagcggacaaccatgcacgtggaagtccggtggtatcgctcggagccttcaaccccggtgttcgtgcaccgtgatggagtggaggtgacagagatgcagatggaggaataccggggatgggtggagtggatcgaaaatggaatagccaaagggaacgtcgccttaaagatacataatattcagccgtctgacaatgggcagtactggtgtcactttcaggatggtaactactgtggcgagaccagcttgctgttgaaggtggctggcttagggtccgctccctctatacacatggagggaccaggagagagtggagtccagttggtatgtaccgctagaggatggtttcctgaacctcaggtttattgggaggacatccgaggggagaagctccttgctgtgtccgagcatcgaatccaggatgaggacggcttattttacgccgaggccacactggttgtccgcaacgcctctgccgaatctgtttcatgcctggtgcacaaccctgtcctcacagaagaaaaaggttccgtcatctccttacctgagaaactgcagacagaactggcgtcactaaaagtaaacggtccgtcacagcctatcctggtgcgtgtgggcgaagacattcagctcacttgctatctctcccctaaagccaatgcccagtcaatggaggtacgctgggatcgaagccatagatatccagctgttcacgtgtatatggacggagaccatgttgccggagagcagatggcagaatatcggggtaggactgtgcttgtctcagatgccattgacgaaggtaggttgacactccagattttgagcgctcggccatccgatgacggccagtaccgctgtctctttgagaaagatgatgtgtatcaggaagccagcttagaccttaaggtagtgggccttggatctagcccacttatcacggtcgaagggcaggaagatggggagatgcaaccaatgtgcagcagcgatggatggtttccacagccccatgttccctggagagacatggagggcaagacaatcccatcaagctcccaggccctgacacagggctctcatggcctctttcatgttcaaactctattacgcgtgacaaacatcagtgcagtggacgtgacatgtagtatttcgattccatttcttggcgaagagaaaattgctacctttagcctcagcgggtggtag

SEQ ID NO: 116259 - DNA, 1368 bp, Artificial Sequence
  derived and/or modified sequence
atggtagactttcctgggtacaatctctctggggcagtcgccagttttcttttcatactactgaccatgaaacaatctgaagatttcagggtgatcggcccagcccaccctattctggcaggtgttggagaggacgccctgctgacctgccagctgctgcccaaacgtaccactatgcacgtagaagtgcgctggtatcgatctgaacctagtacaccagtgtttgtacaccgtgatggggtggaggttaccgaaatgcagatggaggagtatcggggatgggtggaatggattgagaatgggattgccaaagggaacgtggctctgaagatccataacattcagccgtctgacaacggacagtactggtgccacttccaggacggcaactattgcggagaaacaagcctcttgctaaaggtggctggcttaggttctgcacccagtatccacatggaaggcccaggggaatcaggtgtccaattagtatgcaccgctcggggatggtttcccgaacctcaagtctattgggaggacatccgcggtgagaaactgctggcagtgtccgaacaccggatccaggacgaggatggactattctacgcagaagcaacattagtcgttcgtaatgcttctgccgagtctgtgtcatgcctggtccataatccagtgctgaccgaagagaaaggctccgttataagtttgcccgagaagctccagactgaacttgccagccttaaggtgaatggcccttcacagcctatcctggtcagggttggtgaggacatccagctcacttgttatctcagccccaaggctaacgcccagtccatggaggtccgctgggacaggagtcatcgctaccctgcagtgcacgtgtacatggacggcgaccacgtggccggtgaacaaatggccgaatacagaggcaggaccgttctggtgtctgacgctatcgacgagggccgactgaccttacagatcctgtctgctcgaccttccgatgatgggcagtatcgttgtctctttgagaaggacgatgtatatcaagaggccagtcttgacctaaaagtggtcgggctgggctcttcccccttgataaccgtcgagggtcaagaggatggggaaatgcaacccatgtgctcttctgatggctggttccctcagccgcacgtgccatggagggacatggagggcaaaaccatcccatcttcctcacaggcccttacccaaggctctcacggactattccacgtccagaccctgctgcgcgtgacaaacatcagcgctgtggatgttacctgtagcatctccatacccttcttgggtgaagaaaagatagccaccttcagtttgagcggctggtag

SEQ ID NO: 116260 - DNA, 537 bp, Artificial Sequence
  derived and/or modified sequence
atggaggtgcggtgggatcggtctcacaggtaccccgctgtgcacgtgtatatggacggtgaccatgtggctggcgagcagatggctgagtatcgcggtagaactgtgctggtttcagacgccattgacgagggcagactcacactgcagatcctgtccgccaggcctagcgatgacggtcaatatcggtgcctctttgagaaggatgacgtgtatcaagaggcgtccctggacttgaaggtggtaggactgggaagttcccctctgatcacggtagagggccaagaagatggcgaaatgcagccaatgtgttcctcggacggctggttccctcagccccacgtgccctggcgggacatggagggtaagacaatcccatccagcagtcaagcactgactcaggggagccacggcttattccatgttcagacactgctgagggtcacaaacatttcagcggtcgacgtgacatgcagcatctccatcccctttctcggagaggaaaaaatcgccacattcagtctgtctggatggtag

SEQ ID NO: 116261 - DNA, 738 bp, Artificial Sequence
  derived and/or modified sequence
atggtcgacttccccggttataacttgtccggggctgtggcaagctttctatttatcctgctcaccatgaagcaatctgaaaagctgcagacagagctcgctagccttaaggtgaatggcccaagtcagccaatcctggtgagagtgggtgaggacattcagctgacctgttacctgagccctaaagcgaacgctcagagcatggaagtgaggtgggatcgaagtcacagataccctgctgtccatgtttatatggatggcgatcacgtagctggcgagcagatggctgaataccgagggagaacagtccttgtgagcgatgccatcgacgaaggcagactcactctccagattcttagtgcgaggccctctgacgacggacaataccgttgcctctttgaaaaggacgatgtgtaccaagaggcttcactcgacctcaaagtggtcggactcggctcttcccccctaatcactgtggaaggccaggaggacggagagatgcagcccatgtgtagctccgatgggtggtttccccagccacatgtgccgtggcgcgacatggaggggaagaccataccctctagcagccaggctctgactcagggttcacatggactgtttcatgtgcagactcttctgagggtgaccaacatatcagccgtggatgtcacctgttccatttctataccattccttggcgaggaaaaaattgccaccttctctctgtctgggtggtag

SEQ ID NO: 116262 - DNA, 738 bp, Artificial Sequence
  derived and/or modified sequence
atggttgatttccctggatacaacctgagtggagccgttgcaagtttcctgttcatcttactgactatgaaacaatccgagaaactgcagacagaactcgcttctctgaaagttaacgggcctagccagcctatcctggtgagagtcggtgaggacattcagcttacctgctatctgtcccccaaagcaaacgcacagtccatggaagtgcgttgggaccggtcccacaggtacccagccgtccacgtgtacatggacggtgaccatgtagcgggagaacagatggcagagtatcgcggtaggaccgtactggtatcagacgccatcgatgagggccgtcttacactgcagatcctgtcagcaagaccttctgatgatggtcagtaccgctgcctgttcgaaaaagatgacgtgtaccaggaggcctctcttgacctcaaagtggtctctctggggtcttccccgctaataactgtggaggggcaggaggacggcgagatgcagcccatgtgctcttcggatggctggtttccgcaaccacacgttccgtggcgtgatatggagggtaagactattccaagcagtagtcaggctctcacacaaggttctcacggattgtttcatgtgcagacactgcttagggtgacgaacattagcgcagttgacgtcacgtgcagtatctcgattccgttcctgggtgaggagaaaatcgcaactttctcacttagcgggtggtag

SEQ ID NO: 116263 - DNA, 1368 bp, Artificial Sequence
  derived and/or modified sequence
atggtggactttcccggatataatttgtccggagccgtagcctcctttctgtttatactacttactatgaagcaatcggaggatttccgcgtaattggcccagcccaccccattcttgccggtgtgggtgaggatgccctgctgacatgtcaacttcttcccaaaaggacaaccatgcacgtggaggttagatggtatcgcagcgagccttcgaccccagtcttcgtacaccgtgatggtgtagaggtcacggaaatgcagatggaggagtatagaggctgggtggaatggatcgagaacgggattgccaaagggaatgtggcgctgaagatccacaacatccagccgtccgataacgggcaatactggtgtcatttccaggacggcaactattgtggggaaacttcgctccttctgaaggtggccggtttgggcagcgcccctagtatccacatggagggacccggagaaagcggcgttcagctggtatgcaccgctcgcggatggttcccggagccacaggtgtattgggaggatatcaggggcgagaaactgctcgccgttagcgagcatcgcattcaggacaaagacggcctgttctacgcagaggccactcttgtggtgcgcaatgcttctgccgaatcggtatcctgtttggttcataatcctgttctgacagaagagaagggtagcgtcattagtctgccagagaagttacaaaccgagctcgctagtttaaaagttaacggccctagtcaaccaatcctggtacgtgtcggcgaggatatacaactgacctgctatctgagccccaaagctaatgcacaatccatggaggtgcgctgggataggtcacacaggtatccagccgtgcacgtgtatatggatggcgatcatgttgccggagaacagatggccgagtatcgaggcagaacggtgctcgtatcagacgccattgacgaaggtcgactcactttgcagattctaagcgcgcgtcctagcgatgatggacagtaccgctgcttgtttgagaaggatgacgtttaccaggaggcttccctggatctgaaggtcgtgtcactcggttcatcacccctaataacagtggagggacaggaagacggcgagatgcagccaatgtgtagctccgatggatggttcccccagccccatgtgccatggcgcgacatggagggcaagacaatcccctcttctagtcaggcactgacccagggcagccatggactgttccatgtacagacgttgctgcgagtcactaacattagcgccgtcgacgtgacatgcagcatctccatccctttcctaggtgaagaaaaaattgcgactttcagcctgtctggatggtag

SEQ ID NO: 116264 - DNA, 738 bp, Artificial Sequence
  derived and/or modified sequence
atggtggatttccccggatacaacctcagtggagcggttgcgtcatttcttttcattctgctcactatgaaacaaagtgatcgcctggacacacccaaggcttccttaaaggttaatggcccatcacagcctattctcgtgcgtgttggtgaggacatccagctcacgtgctacctgagcccaaaggccaatgcccagtcgatggaggtaaggtgggacaggagccacagatatccggctgtccatgtgtatatggatggggaccatgtcgcaggggaacagatggcagagtaccgcggacgcaccgtgttagtctcagatgccattgatgagggtagattaactctgcagatcctgagcgcccgaccctcagatgacggacagtaccggtgcctttttgagaaagatgacgtctatcaagaggccagccttgaccttaaggtcgtcggcctcggaagcagcccccttatcacggtggaggggcaagaggatggcgagatgcaacctatgtgcagctctgacgggtggtttccccagcctcatgtcccatggagagacatggaaggaaagacaatcccaagttccagccaggcccttacacagggatcgcacggtttgtttcacgtgcaaactttgctgcgtgtcacaaatataagtgccgtcgatgtcacatgctccatctcaatacctttcctgggagaggagaaaattgctacattctcattgagcggctggtag

SEQ ID NO: 116265 - DNA, 1368 bp, Artificial Sequence
  derived and/or modified sequence
atggtggattttccaggctacaatctgtctggtgcagtcgcctccttcctattcatcctgctgacaatgaagcagtcagaagactttagagtcattggccctgctcatcctatcctggccggggttggggaagatgccctgttaacctgccagctactccccaagaggaccacaatgcacgtggaggtgaggtggtaccgctcagagcccagcacacctgtgtttgtgcacagggatggagtggaggtgactgagatgcagatggaggagtacagaggctgggtagagtggatagagaatggcattgcaaagggaaatgtggcactgaagatacacaacatccagccctccgacaatggacaatactggtgccatttccaggatgggaactactgtggagaaacaagcttgctgctcaaagtagcaggtctggggtctgcccctagcatccacatggagggacctggggagagtggagtccagcttgtgtgcactgcaaggggctggttcccagagccccaggtgtattgggaagacatccggggagagaagctgctggccgtgtctgagcatcgcatccaagataaagatggcctgttctatgcggaagccaccctggtggtcaggaacgcctctgcagagtctgtgtcctgcttggtccacaaccccgtcctcactgaggagaaggggtcggtcatcagcctcccagagaaactccagactgagctggcttctttaaaagtgaatggaccttcccagcccatcctcgtcagagtgggagaagatatacagctaacctgttacctgtcccccaaggcgaatgcacagagcatggaggtgaggtgggaccgatcccaccgttaccctgctgtgcatgtgtatatggatggggaccatgtggctggagagcagatggcagagtacagagggaggactgtactggtgagtgacgccattgacgagggcagactgaccctgcagatactcagtgccagaccttcggacgacgggcagtaccgctgcctttttgaaaaagatgatgtctaccaggaggccagtttggatctgaaggtggtaagtctgggttcttccccactgatcactgtggaggggcaagaagatggagaaatgcagccgatgtgctcttcagatgggtggttcccacagccccacgtgccatggagggacatggaaggaaagacgataccatcatcttcccaggccctgactcaaggcagccacgggctgttccacgtgcagacattgctaagggtcacaaacatctccgctgtggacgtcacttgttccatcagcatcccctttttgggcgaggagaaaatcgcaactttttctctctcaggttggtga

SEQ ID NO: 116266 - DNA, 738 bp, Artificial Sequence
  derived and/or modified sequence
atggtggattttccaggctacaatctgtctggtgcagtcgcctccttcctattcatcctgctgacaatgaagcagtcagagaaactccagactgagctggcttctttaaaagtgaatggaccttcccagcccatcctcgtcagagtgggagaagatatacagctaacctgttacctgtcccccaaggcgaatgcacagagcatggaggtgaggtgggaccgatcccaccgttaccctgctgtgcatgtgtatatggatggggaccatgtggctggagagcagatggcagagtacagagggaggactgtactggtgagtgacgccattgacgagggcagactgaccctgcagatactcagtgccagaccttcggacgacgggcagtaccgctgcctttttgaaaaagatgatgtctaccaggaggccagtttggatctgaaggtggtaagtctgggttcttccccactgatcactgtggaggggcaagaagatggagaaatgcagccgatgtgctcttcagatgggtggttcccacagccccacgtgccatggagggacatggaaggaaagacgataccatcatcttcccaggccctgactcaaggcagccacgggctgttccacgtgcagacattgctaagggtcacaaacatctccgctgtggacgtcacttgttccatcagcatcccctttttgggcgaggagaaaatcgcaactttttctctctcaggttggtga

SEQ ID NO: 116267 - DNA, 688 bp, Artificial Sequence
  derived and/or modified sequence
aaggcgaatgcacagagcatggaggtgaggtgggaccgatcccaccgttaccctgctgtgcatgtgtatatggatggggaccatgtggctggagagcagatggcagagtacagagggaggactgtactggtgagtgacgccattgacgagggcagactgaccctgcagatactcagtgccagaccttcggacgacgggcagtaccgctgcctttttgaaaaagatgatgtctaccaggaggccagtttggatctgaaggtggtaagtctgggttcttccccactgatcactgtggaggggcaagaagatggagaaatgcagccgatgtgctcttcagatgggtggttcccacagccccacgtgccatggagggacatggaaggaaagacgataccatcatcttcccaggccctgactcaaggcagccacgggctgttccacgtgcagacattgctaagggtcacaaacatctccgctgtggacgtcacttgttccatcagcatcccctttttgggcgaggagaaaatcgcaactttttctctctcagagtccaggatgacatttttgtggaaaacactgcttgtttggggattgcttcttgctgtggctgtaggcctgcccaggaagaggagctgaaaagaggtaagttctctggacattttttctgtacccacaagaacatctccaa

SEQ ID NO: 116268 - DNA, 688 bp, Artificial Sequence
  derived and/or modified sequence
aaggcgaatgcacagagcatggaggtgaggtgggaccgatcccaccgttaccctgctgtgcatgtgtatatggatggggaccatgtggctggagagcagatggcagagtacagagggaggactgtgctggtgagtgacgccattgacgagggcagactgaccctgcagatactcagtgccagaccttcggacgacgggcagtaccgctgcctttttgaaaaagatgatgtctaccaagaggccagtttggatctgaaggtggtaggtctgggttcttccccactgatcactgtggaggggcaagaagatggagaaatgcagccgatgtgctcttcagatgggtggttcccacagccccacgtgccatggagggacatggaaggaaagacgataccatcatcttcccaggccctgactcaaggcagccacgggctgttccacgtgcagacattgctaagggtcacaaacatctccgctgtggacgtcacttgttccatcagcatcccctttttgggcgaggagaaaatcgcaactttttctctctcagagtccaggatgacgtttttgtggaaaacactgcttgtttggggattgcttcttgctgtggctgtaggcctgcccaggaagaggagctgaaaagaggtaagttctctggacattttttctgtacccacaagaacatctccaa

SEQ ID NO: 116269 - DNA, 688 bp, Artificial Sequence
  derived and/or modified sequence
aaggcgaatgcacagagcatggaggtgaggtgggaccgatcccaccgttaccctgctgtgcatgtgtatatggatggggaccatgtggctggagagcagatggcagagtacagagggaggactgtactggtgagtgacgccattgacgagggcagactgaccctgcagatactcagtgccagaccttcggacgacgggcagtaccgctgcctttttgaaaaagatgatgtctaccaggaggccagtttggatctgaaggtggtaagtctgggttcttccccactgatcactgtggaggggcaagaagatggagaaatgcagccgatgtgctcttcagatgggtggttcccacagccccacgtgccatggagggacatggaaggaaagacgataccatcatcttcccaggccctgactcaaggcagccacgggctgttccacgtgcagacattgctaagggtcacaaacatctccgctgtggacgtcacttgttccatcagcatcccctttttgggcgaggagaaaatcgcaactttttctctctcagagtccaggatgacgtttttgtggaaaacactgcttgtttggggattgcttcttgctgtggctgtaggcctgcccaggaagaggagctgaaaagaggtaagttctctggacattttttctgtacccacaagaacatctccaa

SEQ ID NO: 116270 - DNA, 3182 bp, Artificial Sequence
  derived and/or modified sequence
gtccccggagtttcactgttgagaggattatagctgttaggaggtgaatgtgctattctgattttcagaatgcaatctcattttcacagggcctccgggatttggctctgccttcaactggggtgagacggcttaaatcctccttcacccaaagtcctggaggaggcctccacactctctggctctcccacagttctgtctttgatcagcacaccccagggctctgacctgtttctgaccacctgctatgtggatgaagatacatctggggctaaggaggatggtggattttccaggctacaatctgtctggtgcagtcgcctccttcctattcatcctgctgacaatgaagcagtcagaagactttagagtcattggccctgctcatcctatcctggccggggttggggaagatgccctgttaacctgccagctactccccaagaggaccacaatgcacgtggaggtgaggtggtaccgctcagagcccagcacacctgtgtttgtgcacagggatggagtggaggtgactgagatgcagatggaggagtacagaggctgggtagagtggatagagaatggcattgcaaagggaaatgtggcactgaagatacacaacatccagccctccgacaatggacaatactggtgccatttccaggatgggaactactgtggagaaacaagcttgctgctcaaagtagcaggtctggggtctgcccctagcatccacatggagggacctggggagagtggagtccagcttgtgtgcactgcaaggggctggttcccagagccccaggtgtattgggaagacatccggggagagaagctgctggccgtgtctgagcatcgcatccaagataaagatggcctgttctatgcggaagccaccctggtggtcaggaacgcctctgcagagtctgtgtcctgcttggtccacaaccccgtcctcactgaggagaaggggtcggtcatcagcctcccagagaaactccagactgagctggcttctttaaaagtgaatggaccttcccagcccatcctcgtcagagtgggagaagatatacagctaacctgttacctgtcccccaaggcgaatgcacagagcatggaggtgaggtgggaccgatcccaccgttaccctgctgtgcatgtgtatatggatggggaccatgtggctggagagcagatggcagagtacagagggaggactgtactggtgagtgacgccattgacgagggcagactgaccctgcagatactcagtgccagaccttcggacgacgggcagtaccgctgcctttttgaaaaagatgatgtctaccaggaggccagtttggatctgaaggtggtaagtctgggttcttccccactgatcactgtggaggggcaagaagatggagaaatgcagccgatgtgctcttcagatgggtggttcccacagccccacgtgccatggagggacatggaaggaaagacgataccatcatcttcccaggccctgactcaaggcagccacgggctgttccacgtgcagacattgctaagggtcacaaacatctccgctgtggacgtcacttgttccatcagcatcccctttttgggcgaggagaaaatcgcaactttttctctctcagagtccaggatgacgtttttgtggaaaacactgcttgtttggggattgcttcttgctgtggctgtaggcctgcccaggaagaggagctgaaaagaggttctctggacattttttctgtacccacaagaacatctccaacgtatcaggaaaataacaatctgggattctggaaaccagaatgatattctgagtcctgatcatttctcatttctctaactgcttgaagggggctgccatgatcattgaagtactaactcaaggtgttttaattctactcaggaaaatctgctggagactgatcttttcagagacctatcctgttccaggttctctgagatccggcctatcaatcacaatctgacatctgataatcaaggacccttagaaaatcccatgggaaatacaatttagcctacaggaagaaatgaaaggaataatcaaggatttggtcagtttctttttttttttttttttcttttctttttttttttttttttttttttctgagacaaagtctcactctgtcacccaggctggagtgcagtggcatgatctcagctgactgcaacctctgcctcccgggttcaagcaattctcttgcctcagtctcatgagtagctgggattacaggcatgtgccaccatgcccagcctatttttgtatttttagtagagatggggtttcactttgttggccaggctggtctcaaacttctggcctcaaatgatccactcgcctcggcctcccaaagtgctggaattacaggcatgagccaccacacctggcctgatcagtttatttaagatggtgacaattaattgtccacataggtggaactgagaaaataaaaaatatatatatacagttaaaaaaaagtgaaagaaaatacagctgcataagggggagaaaaatctgatcactaaaatataatcttgaaaatcttatgaagtgttgtaaaatccctcctccagactttttgagaaagttgatacaggaaattgagtcaggaaaaaaattttacactttccgatccaagcgaaaaattatgtatcatctatacgaacatgtcaattttattgttagagcaaaataaagtgcacaatttaaaattaataattataaaataaacaaatataagcagtacatgtaacacagtaaaaatattttaaagttataatgagttcaagaagataaactatatgtggaagacagaagaatgtcaacaagacttttggaaagaatgttatgaagtgagaagacgaggacctgctagtgacgctctgctgctctccaggatggcagacgtcagaggcatcgcggtcccatgcggatcactcatgaacagcactctgaacttgctcttctgggccatcatttttttttctatttttaaactcataaatttaaacacataaatgttagaaactacacattattcttccacaaatgtttacacattaattttaataaacatttttttcaattgtggtaaaatacataacataaaataaaaccctttaaccattttaaagtgtacagttct

SEQ ID NO: 116271 - DNA, 738 bp, Artificial Sequence
  derived and/or modified sequence
atggtggattttccaggctacaatctgtctggtgcagtcgcctccttcctattcatcctgctgacaatgaagcagtcagacaggctggacaccccaaaagcttctttaaaagtgaatggaccttcccagcccatcctcgtcagagtgggagaagatatacagctaacctgttacctgtcccccaaggcgaatgcacagagcatggaggtgaggtgggaccgatcccaccgttaccctgctgtgcatgtgtatatggatggggaccatgtggctggagagcagatggcagagtacagagggaggactgtactggtgagtgacgccattgacgagggcagactgaccctgcagatactcagtgccagaccttcggacgacgggcagtaccgctgcctttttgaaaaagatgatgtctaccaggaggccagtttggatctgaaggtggtaagtctgggttcttccccactgatcactgtggaggggcaagaagatggagaaatgcagccgatgtgctcttcagatgggtggttcccacagccccacgtgccatggagggacatggaaggaaagacgataccatcatcttcccaggccctgactcaaggcagccacgggctgttccacgtgcagacattgctaagggtcacaaacatctccgctgtggacgtcacttgttccatcagcatcccctttttgggcgaggagaaaatcgcaactttttctctctcaggttggtga

SEQ ID NO: 116272 - DNA, 845 bp, Artificial Sequence
  derived and/or modified sequence
atggtggattttccaggctacaatctgtctggtgcagtcgcctccttcctattcatcctgctgacaatgaagcagtcagaagactttagagtcattggccctgctcatcctatcctggccggggttggggaagatgccctgttaacctgccagctactccccaagaggaccacaatgcacgtggagagaaactccagactgagctggcttctttaaaagtgaatggaccttcccagcccatcctcgtcagagtgggagaagatatacagctaacctgttacctgtcccccaaggcgaatgcacagagcatggaggtgaggtgggaccgatcccaccgttaccctgctgtgcatgtgtatatggatggggaccatgtggctggagagcagatggcagagtacagagggaggactgtactggtgagtgacgccattgacgagggcagactgaccctgcagatactcagtgccagaccttcggacgacgggcagtaccgctgcctttttgaaaaagatgatgtctaccaggaggccagtttggatctgaaggtggtaagtctgggttcttccccactgatcactgtggaggggcaagaagatggagaaatgcagccgatgtgctcttcagatgggtggttcccacagccccacgtgccatggagggacatggaaggaaagacgataccatcatcttcccaggccctgactcaaggcagccacgggctgttccacgtgcagacattgctaagggtcacaaacatctccgctgtggacgtcacttgttccatcagcatcccctttttgggcgaggagaaaatcgcaactttttctctctcaggttggtga

SEQ ID NO: 116273 - DNA, 738 bp, Artificial Sequence
  derived and/or modified sequence
atggtggattttccaggctacaatctgtctggtgcagtcgcctccttcctattcatcctgctgacaatgaagcagtcagacaggctggacaccccaaaagcttctttaaaagtgaatggaccttcccagcccatcctcgtcagagtgggagaagatatacagctaacctgttacctgtcccccaaggcgaatgcacagagcatggaggtgaggtgggaccgatcccaccgttaccctgctgtgcatgtgtatatggatggggaccatgtggctggagagcagatggcagagtacagagggaggactgtgctggtgagtgacgccattgacgagggcagactgaccctgcagatactcagtgccagaccttcggacgacgggcagtaccgctgcctttttgaaaaagatgatgtctaccaagaggccagtttggatctgaaggtggtaggtctgggttcttccccactgatcactgtggaggggcaagaagatggagaaatgcagccgatgtgctcttcagatgggtggttcccacagccccacgtgccatggagggacatggaaggaaagacgataccatcatcttcccaggccctgactcaaggcagccacgggctgttccacgtgcagacattgctaagggtcacaaacatctccgctgtggacgtcacttgttccatcagcatcccctttttgggcgaggagaaaatcgcaactttttctctctcaggttggtga

SEQ ID NO: 116274 - DNA, 738 bp, Artificial Sequence
  derived and/or modified sequence
atggtggattttccaggctacaatctgtctggtgcagtcgcctccttcctattcatcctgctgacaatgaagcagtcagagaaactccagactgagctggcttctttaaaagtgaatggaccttcccagcccatcctcgtcagagtgggagaagatatacagctaacctgttacctgtcccccaaggcgaatgcacagagcatggaggtgaggtgggaccgatcccaccgttaccctgctgtgcatgtgtatatggatggggaccatgtggctggagagcagatggcagagtacagagggaggactgtgctggtgagtgacgccattgacgagggcagactgaccctgcagatactcagtgccagaccttcggacgacgggcagtaccgctgcctttttgaaaaagatgatgtctaccaagaggccagtttggatctgaaggtggtaggtctgggttcttccccactgatcactgtggaggggcaagaagatggagaaatgcagccgatgtgctcttcagatgggtggttcccacagccccacgtgccatggagggacatggaaggaaagacgataccatcatcttcccaggccctgactcaaggcagccacgggctgttccacgtgcagacattgctaagggtcacaaacatctccgctgtggacgtcacttgttccatcagcatcccctttttgggcgaggagaaaatcgcaactttttctctctcaggttggtga

SEQ ID NO: 116275 - DNA, 845 bp, Artificial Sequence
  derived and/or modified sequence
atggtggattttccaggctacaatctgtctggtgcagtcgcctccttcctattcatcctgctgacaatgaagcagtcagaagactttagagtcattggccctgctcatcctatcctggccggggttggggaagatgccctgttaacctgccagctactccccaagaggaccacaatgcacgtggagagaaactccagactgagctggcttctttaaaagtgaatggaccttcccagcccatcctcgtcagagtgggagaagatatacagctaacctgttacctgtcccccaaggcgaatgcacagagcatggaggtgaggtgggaccgatcccaccgttaccctgctgtgcatgtgtatatggatggggaccatgtggctggagagcagatggcagagtacagagggaggactgtgctggtgagtgacgccattgacgagggcagactgaccctgcagatactcagtgccagaccttcggacgacgggcagtaccgctgcctttttgaaaaagatgatgtctaccaagaggccagtttggatctgaaggtggtaggtctgggttcttccccactgatcactgtggaggggcaagaagatggagaaatgcagccgatgtgctcttcagatgggtggttcccacagccccacgtgccatggagggacatggaaggaaagacgataccatcatcttcccaggccctgactcaaggcagccacgggctgttccacgtgcagacattgctaagggtcacaaacatctccgctgtggacgtcacttgttccatcagcatcccctttttgggcgaggagaaaatcgcaactttttctctctcaggttggtga

SEQ ID NO: 116276 - DNA, 1368 bp, Artificial Sequence
  derived and/or modified sequence
atggtggattttccaggctacaatctgtctggtgcagtcgcctccttcctattcatcctgctgacaatgaagcagtcagaagactttagagtcattggccctgctcatcctatcctggccggggttggggaagatgccctgttaacctgccagctactccccaagaggaccacaatgcacgtggaggtgaggtggtaccgctcagagcccagcacacctgtgtttgtgcacagggatggagtggaggtgactgagatgcagatggaggagtacagaggctgggtagagtggatagagaatggcattgcaaagggaaatgtggcactgaagatacacaacatccagccctccgacaatggacaatactggtgccatttccaggatgggaactactgtggagaaacaagcttgctgctcaaagtagcaggtctggggtctgcccctagcatccacatggagggacctggggagagtggagtccagcttgtgtgcactgcaaggggctggttcccagagccccaggtgtattgggaagacatccggggagagaagctgctggccgtgtctgagcatcgcatccaagatgaagatggcctgttctatgcggaagccaccctggtggtcaggaacgcctctgcagagtctgtgtcctgcttggtccacaaccccgtcctcactgaggagaaggggtcggtcatcagcctcccagagaaactccagactgagctggcttctttaaaagtgaatggaccttcccagcccatcctcgtcagagtgggagaagatatacagctaacctgttacctgtcccccaaggcgaatgcacagagcatggaggtgaggtgggaccgatcccaccgttaccctgctgtgcatgtgtatatggatggggaccatgtggctggagagcagatggcagagtacagagggaggactgtgctggtgagtgacgccattgacgagggcagactgaccctgcagatactcagtgccagaccttcggacgacgggcagtaccgctgcctttttgaaaaagatgatgtctaccaagaggccagtttggatctgaaggtggtaggtctgggttcttccccactgatcactgtggaggggcaagaagatggagaaatgcagccgatgtgctcttcagatgggtggttcccacagccccacgtgccatggagggacatggaaggaaagacgataccatcatcttcccaggccctgactcaaggcagccacgggctgttccacgtgcagacattgctaagggtcacaaacatctccgctgtggacgtcacttgttccatcagcatcccctttttgggcgaggagaaaatcgcaactttttctctctcaggttggtga

SEQ ID NO: 116277 - DNA, 1368 bp, Artificial Sequence
  derived and/or modified sequence
atggtggacttccccggctacaacctgagcggcgccgtggccagcttcctgttcatcctgctgaccatgaagcagagcgaggacttcagagtgatcggccccgcccaccccatcctggccggcgtgggcgaggacgccctgctgacctgccagctgctgcccaagagaaccaccatgcacgtggaggtgagatggtacagaagcgagcccagcacccccgtgttcgtgcacagagacggcgtggaggtgaccgagatgcagatggaggagtacagaggctgggtggagtggatcgagaacggcatcgccaagggcaacgtggccctgaagatccacaacatccagcccagcgacaacggccagtactggtgccacttccaggacggcaactactgcggcgagaccagcctgctgctgaaggtggccggcctgggcagcgcccccagcatccacatggagggccccggcgagagcggcgtgcagctggtgtgcaccgccagaggctggttccccgagccccaggtgtactgggaggacatcagaggcgagaagctgctggccgtgagcgagcacagaatccaggacaaggacggcctgttctacgccgaggccaccctggtggtgagaaacgccagcgccgagagcgtgagctgcctggtgcacaaccccgtgctgaccgaggagaagggcagcgtgatcagcctgcccgagaagctgcagaccgagctggccagcctgaaggtgaacggccccagccagcccatcctggtgagagtgggcgaggacatccagctgacctgctacctgagccccaaggccaacgcccagagcatggaggtgagatgggacagaagccacagataccccgccgtgcacgtgtacatggacggcgaccacgtggccggcgagcagatggccgagtacagaggcagaaccgtgctggtgagcgacgccatcgacgagggcagactgaccctgcagatcctgagcgccagacccagcgacgacggccagtacagatgcctgttcgagaaggacgacgtgtaccaggaggccagcctggacctgaaggtggtgagcctgggcagcagccccctgatcaccgtggagggccaggaggacggcgagatgcagcccatgtgcagcagcgacggctggttcccccagccccacgtgccctggagagacatggagggcaagaccatccccagcagcagccaggccctgacccagggcagccacggcctgttccacgtgcagaccctgctgagagtgaccaacatcagcgccgtggacgtgacctgcagcatcagcatccccttcctgggcgaggagaagatcgccaccttcagcctgagcggctggtag

SEQ ID NO: 116278 - DNA, 738 bp, Artificial Sequence
  derived and/or modified sequence
atggtggacttccccggctacaacctgagcggcgccgtggccagcttcctgttcatcctgctgaccatgaagcagagcgagaagctgcagaccgagctggccagcctgaaggtgaacggccccagccagcccatcctggtgagagtgggcgaggacatccagctgacctgctacctgagccccaaggccaacgcccagagcatggaggtgagatgggacagaagccacagataccccgccgtgcacgtgtacatggacggcgaccacgtggccggcgagcagatggccgagtacagaggcagaaccgtgctggtgagcgacgccatcgacgagggcagactgaccctgcagatcctgagcgccagacccagcgacgacggccagtacagatgcctgttcgagaaggacgacgtgtaccaggaggccagcctggacctgaaggtggtgagcctgggcagcagccccctgatcaccgtggagggccaggaggacggcgagatgcagcccatgtgcagcagcgacggctggttcccccagccccacgtgccctggagagacatggagggcaagaccatccccagcagcagccaggccctgacccagggcagccacggcctgttccacgtgcagaccctgctgagagtgaccaacatcagcgccgtggacgtgacctgcagcatcagcatccccttcctgggcgaggagaagatcgccaccttcagcctgagcggctggtag

SEQ ID NO: 116279 - DNA, 636 bp, Artificial Sequence
  derived and/or modified sequence
aaggccaacgcccagagcatggaggtgagatgggacagaagccacagataccccgccgtgcacgtgtacatggacggcgaccacgtggccggcgagcagatggccgagtacagaggcagaaccgtgctggtgagcgacgccatcgacgagggcagactgaccctgcagatcctgagcgccagacccagcgacgacggccagtacagatgcctgttcgagaaggacgacgtgtaccaggaggccagcctggacctgaaggtggtgagcctgggcagcagccccctgatcaccgtggagggccaggaggacggcgagatgcagcccatgtgcagcagcgacggctggttcccccagccccacgtgccctggagagacatggagggcaagaccatccccagcagcagccaggccctgacccagggcagccacggcctgttccacgtgcagaccctgctgagagtgaccaacatcagcgccgtggacgtgacctgcagcatcagcatccccttcctgggcgaggagaagatcgccaccttcagcctgagcgagagcagaatgaccttcctgtggaagaccctgctggtgtggggcctgctgctggccgtggccgtgggcctgcccagaaagagaagctag

SEQ ID NO: 116280 - DNA, 636 bp, Artificial Sequence
  derived and/or modified sequence
aaggccaacgcccagagcatggaggtgagatgggacagaagccacagataccccgccgtgcacgtgtacatggacggcgaccacgtggccggcgagcagatggccgagtacagaggcagaaccgtgctggtgagcgacgccatcgacgagggcagactgaccctgcagatcctgagcgccagacccagcgacgacggccagtacagatgcctgttcgagaaggacgacgtgtaccaggaggccagcctggacctgaaggtggtgggcctgggcagcagccccctgatcaccgtggagggccaggaggacggcgagatgcagcccatgtgcagcagcgacggctggttcccccagccccacgtgccctggagagacatggagggcaagaccatccccagcagcagccaggccctgacccagggcagccacggcctgttccacgtgcagaccctgctgagagtgaccaacatcagcgccgtggacgtgacctgcagcatcagcatccccttcctgggcgaggagaagatcgccaccttcagcctgagcgagagcagaatgaccttcctgtggaagaccctgctggtgtggggcctgctgctggccgtggccgtgggcctgcccagaaagagaagctag

SEQ ID NO: 116281 - DNA, 1449 bp, Artificial Sequence
  derived and/or modified sequence
atggtggacttccccggctacaacctgagcggcgccgtggccagcttcctgttcatcctgctgaccatgaagcagagcgaggacttcagagtgatcggccccgcccaccccatcctggccggcgtgggcgaggacgccctgctgacctgccagctgctgcccaagagaaccaccatgcacgtggaggtgagatggtacagaagcgagcccagcacccccgtgttcgtgcacagagacggcgtggaggtgaccgagatgcagatggaggagtacagaggctgggtggagtggatcgagaacggcatcgccaagggcaacgtggccctgaagatccacaacatccagcccagcgacaacggccagtactggtgccacttccaggacggcaactactgcggcgagaccagcctgctgctgaaggtggccggcctgggcagcgcccccagcatccacatggagggccccggcgagagcggcgtgcagctggtgtgcaccgccagaggctggttccccgagccccaggtgtactgggaggacatcagaggcgagaagctgctggccgtgagcgagcacagaatccaggacaaggacggcctgttctacgccgaggccaccctggtggtgagaaacgccagcgccgagagcgtgagctgcctggtgcacaaccccgtgctgaccgaggagaagggcagcgtgatcagcctgcccgagaagctgcagaccgagctggccagcctgaaggtgaacggccccagccagcccatcctggtgagagtgggcgaggacatccagctgacctgctacctgagccccaaggccaacgcccagagcatggaggtgagatgggacagaagccacagataccccgccgtgcacgtgtacatggacggcgaccacgtggccggcgagcagatggccgagtacagaggcagaaccgtgctggtgagcgacgccatcgacgagggcagactgaccctgcagatcctgagcgccagacccagcgacgacggccagtacagatgcctgttcgagaaggacgacgtgtaccaggaggccagcctggacctgaaggtggtgagcctgggcagcagccccctgatcaccgtggagggccaggaggacggcgagatgcagcccatgtgcagcagcgacggctggttcccccagccccacgtgccctggagagacatggagggcaagaccatccccagcagcagccaggccctgacccagggcagccacggcctgttccacgtgcagaccctgctgagagtgaccaacatcagcgccgtggacgtgacctgcagcatcagcatccccttcctgggcgaggagaagatcgccaccttcagcctgagcgagagcagaatgaccttcctgtggaagaccctgctggtgtggggcctgctgctggccgtggccgtgggcctgcccagaaagagaagctag

SEQ ID NO: 116282 - DNA, 738 bp, Artificial Sequence
  derived and/or modified sequence
atggtggacttccccggctacaacctgagcggcgccgtggccagcttcctgttcatcctgctgaccatgaagcagagcgacagactggacacccccaaggccagcctgaaggtgaacggccccagccagcccatcctggtgagagtgggcgaggacatccagctgacctgctacctgagccccaaggccaacgcccagagcatggaggtgagatgggacagaagccacagataccccgccgtgcacgtgtacatggacggcgaccacgtggccggcgagcagatggccgagtacagaggcagaaccgtgctggtgagcgacgccatcgacgagggcagactgaccctgcagatcctgagcgccagacccagcgacgacggccagtacagatgcctgttcgagaaggacgacgtgtaccaggaggccagcctggacctgaaggtggtgagcctgggcagcagccccctgatcaccgtggagggccaggaggacggcgagatgcagcccatgtgcagcagcgacggctggttcccccagccccacgtgccctggagagacatggagggcaagaccatccccagcagcagccaggccctgacccagggcagccacggcctgttccacgtgcagaccctgctgagagtgaccaacatcagcgccgtggacgtgacctgcagcatcagcatccccttcctgggcgaggagaagatcgccaccttcagcctgagcggctggtag

SEQ ID NO: 116283 - DNA, 537 bp, Artificial Sequence
  derived and/or modified sequence
atggaggtgagatgggacagaagccacagataccccgccgtgcacgtgtacatggacggcgaccacgtggccggcgagcagatggccgagtacagaggcagaaccgtgctggtgagcgacgccatcgacgagggcagactgaccctgcagatcctgagcgccagacccagcgacgacggccagtacagatgcctgttcgagaaggacgacgtgtaccaggaggccagcctggacctgaaggtggtgagcctgggcagcagccccctgatcaccgtggagggccaggaggacggcgagatgcagcccatgtgcagcagcgacggctggttcccccagccccacgtgccctggagagacatggagggcaagaccatccccagcagcagccaggccctgacccagggcagccacggcctgttccacgtgcagaccctgctgagagtgaccaacatcagcgccgtggacgtgacctgcagcatcagcatccccttcctgggcgaggagaagatcgccaccttcagcctgagcggctggtag

SEQ ID NO: 116284 - DNA, 738 bp, Artificial Sequence
  derived and/or modified sequence
atggtggacttccccggctacaacctgagcggcgccgtggccagcttcctgttcatcctgctgaccatgaagcagagcgacagactggacacccccaaggccagcctgaaggtgaacggccccagccagcccatcctggtgagagtgggcgaggacatccagctgacctgctacctgagccccaaggccaacgcccagagcatggaggtgagatgggacagaagccacagataccccgccgtgcacgtgtacatggacggcgaccacgtggccggcgagcagatggccgagtacagaggcagaaccgtgctggtgagcgacgccatcgacgagggcagactgaccctgcagatcctgagcgccagacccagcgacgacggccagtacagatgcctgttcgagaaggacgacgtgtaccaggaggccagcctggacctgaaggtggtgggcctgggcagcagccccctgatcaccgtggagggccaggaggacggcgagatgcagcccatgtgcagcagcgacggctggttcccccagccccacgtgccctggagagacatggagggcaagaccatccccagcagcagccaggccctgacccagggcagccacggcctgttccacgtgcagaccctgctgagagtgaccaacatcagcgccgtggacgtgacctgcagcatcagcatccccttcctgggcgaggagaagatcgccaccttcagcctgagcggctggtag

SEQ ID NO: 116285 - DNA, 738 bp, Artificial Sequence
  derived and/or modified sequence
atggtggacttccccggctacaacctgagcggcgccgtggccagcttcctgttcatcctgctgaccatgaagcagagcgagaagctgcagaccgagctggccagcctgaaggtgaacggccccagccagcccatcctggtgagagtgggcgaggacatccagctgacctgctacctgagccccaaggccaacgcccagagcatggaggtgagatgggacagaagccacagataccccgccgtgcacgtgtacatggacggcgaccacgtggccggcgagcagatggccgagtacagaggcagaaccgtgctggtgagcgacgccatcgacgagggcagactgaccctgcagatcctgagcgccagacccagcgacgacggccagtacagatgcctgttcgagaaggacgacgtgtaccaggaggccagcctggacctgaaggtggtgggcctgggcagcagccccctgatcaccgtggagggccaggaggacggcgagatgcagcccatgtgcagcagcgacggctggttcccccagccccacgtgccctggagagacatggagggcaagaccatccccagcagcagccaggccctgacccagggcagccacggcctgttccacgtgcagaccctgctgagagtgaccaacatcagcgccgtggacgtgacctgcagcatcagcatccccttcctgggcgaggagaagatcgccaccttcagcctgagcggctggtag

SEQ ID NO: 116286 - DNA, 537 bp, Artificial Sequence
  derived and/or modified sequence
atggaggtgagatgggacagaagccacagataccccgccgtgcacgtgtacatggacggcgaccacgtggccggcgagcagatggccgagtacagaggcagaaccgtgctggtgagcgacgccatcgacgagggcagactgaccctgcagatcctgagcgccagacccagcgacgacggccagtacagatgcctgttcgagaaggacgacgtgtaccaggaggccagcctggacctgaaggtggtgggcctgggcagcagccccctgatcaccgtggagggccaggaggacggcgagatgcagcccatgtgcagcagcgacggctggttcccccagccccacgtgccctggagagacatggagggcaagaccatccccagcagcagccaggccctgacccagggcagccacggcctgttccacgtgcagaccctgctgagagtgaccaacatcagcgccgtggacgtgacctgcagcatcagcatccccttcctgggcgaggagaagatcgccaccttcagcctgagcggctggtag

SEQ ID NO: 116287 - DNA, 1368 bp, Artificial Sequence
  derived and/or modified sequence
atggtggacttccccggctacaacctgagcggcgccgtggccagcttcctgttcatcctgctgaccatgaagcagagcgaggacttcagagtgatcggccccgcccaccccatcctggccggcgtgggcgaggacgccctgctgacctgccagctgctgcccaagagaaccaccatgcacgtggaggtgagatggtacagaagcgagcccagcacccccgtgttcgtgcacagagacggcgtggaggtgaccgagatgcagatggaggagtacagaggctgggtggagtggatcgagaacggcatcgccaagggcaacgtggccctgaagatccacaacatccagcccagcgacaacggccagtactggtgccacttccaggacggcaactactgcggcgagaccagcctgctgctgaaggtggccggcctgggcagcgcccccagcatccacatggagggccccggcgagagcggcgtgcagctggtgtgcaccgccagaggctggttccccgagccccaggtgtactgggaggacatcagaggcgagaagctgctggccgtgagcgagcacagaatccaggacgaggacggcctgttctacgccgaggccaccctggtggtgagaaacgccagcgccgagagcgtgagctgcctggtgcacaaccccgtgctgaccgaggagaagggcagcgtgatcagcctgcccgagaagctgcagaccgagctggccagcctgaaggtgaacggccccagccagcccatcctggtgagagtgggcgaggacatccagctgacctgctacctgagccccaaggccaacgcccagagcatggaggtgagatgggacagaagccacagataccccgccgtgcacgtgtacatggacggcgaccacgtggccggcgagcagatggccgagtacagaggcagaaccgtgctggtgagcgacgccatcgacgagggcagactgaccctgcagatcctgagcgccagacccagcgacgacggccagtacagatgcctgttcgagaaggacgacgtgtaccaggaggccagcctggacctgaaggtggtgggcctgggcagcagccccctgatcaccgtggagggccaggaggacggcgagatgcagcccatgtgcagcagcgacggctggttcccccagccccacgtgccctggagagacatggagggcaagaccatccccagcagcagccaggccctgacccagggcagccacggcctgttccacgtgcagaccctgctgagagtgaccaacatcagcgccgtggacgtgacctgcagcatcagcatccccttcctgggcgaggagaagatcgccaccttcagcctgagcggctggtag

SEQ ID NO: 116288 - protein, 236 aa, Artificial Sequence
  derived and/or modified sequence
MTSEKGPSTGDPTLRRRIEPWEFDVFYDPRELRKEACLLYEIKWGMSRKIWRSSGKNTTNHVEVNFIKKFTSERDFHPSMSCSITWFLSWSPCWECSQAIREFLSRHPGVTLVIYVARLFWHMDQQNRQGLRDLVNSGVTIQIMRASEYYHCWRNFVNYPPGDEAHWPQYPPLWMMLYALELHCIILSLPPCLKISRRWQNHLTFFRLHLQNCHYQTIPPHILLATGLIHPSVAWR

SEQ ID NO: 116289 - DNA, 711 bp, Artificial Sequence
  derived and/or modified sequence
atgacaagtgaaaaggggccctccacgggtgaccccaccctgaggcgtcggattgagccatgggagttcgacgtattctatgacccacgcgagttgagaaaggaggcctgcctgctctatgagatcaagtggggcatgtcccgaaagatttggcgcagctcaggaaagaacacaacgaatcatgtcgaagtgaacttcatcaaaaagtttacctccgaacgggatttccacccatcaatgagttgctctattacctggttcctcagttggagcccctgctgggagtgctcccaagccatccgggagtttcttagcaggcacccaggtgtcaccctcgtgatctacgtggccagactgttctggcacatggaccagcaaaatcgccagggtctaagagacttagtcaactctggagtgacaattcagatcatgcgcgcctccgaatactatcattgctggcgtaactttgtgaattatccccccggcgacgaggcccattggccccagtatccccccctgtggatgatgctgtatgccttagagttgcattgtatcatcctgtcactgccaccttgtctgaaaattagcaggcgctggcaaaaccaccttacattcttcaggctgcacttgcagaattgccactatcagaccataccccctcacatccttctcgcgaccggactgatccatccgagtgtcgcctggaggtag

SEQ ID NO: 116290 - DNA, 711 bp, Artificial Sequence
  derived and/or modified sequence
atgaccagcgagaagggccccagcactggagaccccaccctgcggcggcgcatcgagccctgggagtttgatgtgttctatgacccccgggagctgaggaaggaggcctgcctgctgtatgagatcaagtggggcatgagcaggaagatctggaggagcagcggcaagaacaccaccaaccacgtggaggtgaacttcatcaagaagttcaccagcgagcgggacttccaccccagcatgagctgcagcatcacctggttcctgtcctggagcccctgctgggagtgcagccaggccatccgggagttcctgagccgccaccctggggtgaccctggtgatctacgtggcccggctcttctggcacatggaccagcagaaccggcagggcctgcgggacctggtgaacagcggcgtgaccatccagatcatgagggccagcgagtactaccactgctggaggaactttgtgaactacccacctggagatgaggcccactggccccagtacccacccctgtggatgatgctgtatgccctggagctgcactgcatcatcctgagcctgcccccctgcctgaagatcagccgccgctggcagaaccacctgaccttcttccggctgcacctgcagaactgccactaccagaccatccccccccacatcctgctggccaccggcctcatccaccccagcgtggcctggaggtag

SEQ ID NO: 116291 - DNA, 711 bp, Artificial Sequence
  derived and/or modified sequence
atgaccagcgagaagggccccagcaccggcgaccccaccctgcggcgccgcatagagccgtgggagttcgatgtattctatgacccaagagagcttagaaaggaagcttgtcttctgtacgagataaagtggggtatgtcccggaaaatttggaggtccagtggaaaaaacactactaatcacgtcgaggtaaatttcattaagaaattcacctcagagcgagatttccatccctccatgtcctgcagtatcacctggtttttgagctggtccccatgttgggaatgttctcaggctatacgtgaattcttaagtcggcatcctggcgtgacactggtgatatacgtcgcccgactcttctggcatatggaccagcagaaccgacaagggctacgggatttggtgaactctggcgtgaccatccagatcatgcgtgcctctgagtactatcactgctggagaaacttcgtgaactacccccctggtgacgaggcgcactggccacaatatcctccgctctggatgatgctatatgcactggagctccattgcattattctctctctgcccccttgtctaaaaattagccgtaggtggcaaaatcacctcaccttcttcaggcttcatttgcagaactgccattatcaaacaataccaccccatatattgctggcgacggggctgatccaccctagtgtggcttggcggtag

SEQ ID NO: 116292 - DNA, 711 bp, Artificial Sequence
  derived and/or modified sequence
atgaccagcgagaaagggccatccaccggagaccccactttaaggcgtcgaatcgagccatgggaatttgatgtcttttacgatccgagggagctgcgaaaagaggcttgcctgctgtacgagattaaatggggaatgagccgtaagatctggagatcttccggaaagaacactaccaatcacgtcgaggtcaatttcatcaaaaagttcacttcagagagggattttcatccaagcatgagttgctccataacatggttcttgtcctggtcgccatgttgggagtgctctcaggccattcgcgagttcctgtctagacacccgggagtgacactggtgatttacgttgccaggttgttttggcatatggatcagcagaaccggcagggacttcgggaccttgtcaacagtggtgtaaccattcagatcatgcgcgcatccgaatactaccactgctggaggaactttgtgaactatcccccaggagatgaggcccactggcctcagtatccacctctttggatgatgctgtacgctctcgagcttcactgcataattctgtcattgccaccatgcctgaagatttctaggcgttggcagaatcacctgacttttttcaggctgcacctacaaaactgtcactatcagactatcccacctcacatccttctcgcgacggggcttatccacccaagcgtggcctggcgatag

SEQ ID NO: 116293 - DNA, 711 bp, Artificial Sequence
  derived and/or modified sequence
atgaccagcgagaagggccccagcaccggcgaccccaccctgagaagaagaatcgagccctgggagttcgacgtgttctacgaccccagagagctgagaaaggaggcctgcctgctgtacgagatcaagtggggcatgagcagaaagatctggagaagcagcggcaagaacaccaccaaccacgtggaggtgaacttcatcaagaagttcaccagcgagagagacttccaccccagcatgagctgcagcatcacctggttcctgagctggagcccctgctgggagtgcagccaggccatcagagagttcctgagcagacaccccggcgtgaccctggtgatctacgtggccagactgttctggcacatggaccagcagaacagacagggcctgagagacctggtgaacagcggcgtgaccatccagatcatgagagccagcgagtactaccactgctggagaaacttcgtgaactacccccccggcgacgaggcccactggccccagtacccccccctgtggatgatgctgtacgccctggagctgcactgcatcatcctgagcctgcccccctgcctgaagatcagcagaagatggcagaaccacctgaccttcttcagactgcacctgcagaactgccactaccagaccatccccccccacatcctgctggccaccggcctgatccaccccagcgtggcctggagatag

SEQ ID NO: 116294 - DNA, 879 bp, Artificial Sequence
  derived and/or modified sequence
gaagtccagagacagagcaccatgacttctgagaaaggtccttcaaccggtgaccccactctgaggagaagaatcgaaccctgggagtttgacgtcttctatgaccccagagaacttcgtaaagaggcctgtctgctctacgaaatcaagtggggcatgagccggaagatctggcgaagctcaggcaaaaacaccaccaatcacgtggaagttaattttataaaaaaatttacgtcagaaagagattttcacccatccatgagctgctccatcacctggttcttgtcctggagtccctgctgggaatgctcccaggctattagagagtttctgagtcggcaccctggtgtgactctagtgatctacgtagctcggcttttttggcacatggatcaacaaaatcggcaaggtctcagggaccttgttaacagtggagtaactattcagattatgagagcatcagagtattatcactgctggaggaattttgtcaactacccacctggggatgaagctcactggccacaatacccacctctgtggatgatgttgtacgcactggagctgcactgcataattctaagtcttccaccctgtttaaagatttcaagaagatggcaaaatcatcttacatttttcagacttcatcttcaaaactgccattaccaaacgattccgccacacatccttttagctacagggctgatacatccttctgtggcttggagatgaataggatgattccgtgtgtgtactgattcaagaacaagcaatgatgacccactaaagagtgaatgccatttagaatctagaaatgttcacaaggtaccccaaaactctgtagcttaaaccaacaataaatatgtattacctctggca

SEQ ID NO: 116295 - protein, 394 aa, Artificial Sequence
  derived and/or modified sequence
MDMHCKADPFSAMHPGHGGVNQLGGVFVNGRPLPDVVRQRIVELAHQGVRPCDISRQLRVSHGCVSKILGRYYETGSIKPGVIGGSKPKVATPKVVDKIAEYKRQNPTMFAWEIRDRLLAEGICDNDTVPSVSSINRIIRTKVQQPFHPTPDGAGTGVTAPGHTIVPSTASPPVSSASNDPVGSYSINGILGIPRSNGEKRKRDEDVSEGSVPNGDSQSGVDSLRKHLRADTFTQQQLEALDRVFERPSYPDVFQASEHIKSEQGNEYSLPALTPGLDEVKSSLSASTNPELGSNVSGTQTYPVVTGRDMASTTLPGYPPHVPPTGQGSYPTSTLAGMVPGSEFSGNPYSHPQYTAYNEAWRFSNPALLSSPYYYSAAPRGSAPAAAAAAYDRH

SEQ ID NO: 116296 - DNA, 4054 bp, Artificial Sequence
  derived and/or modified sequence
cgggggcctggcccgcgcgctcccctcccgcaggcgccacctcggacatccccgggattgctacttctctgccaacttcgccaactcgccagcacttggagaggcccggctcccctcccggcgccctctgaccgcccccgccccgcgcgctctccgaccaccgcctctcggatgaccaggttccaggggagctgagcgagtcgcctcccccgcccagcttcagccctggctgcagctgcagcgcgagccatgcgcccccagtgcaccccggcccggcccaccgccccggggccattctgctgaccgcccagccccgagccccgacagtggcaagttgcggctactgcagttgcaagctccggccaacccggaggagccccagcggggagcgcagtgctgcgccccccgcccccgcgcgccccgcagcagccgggcgttcactcatcctccctcccccaccgtccctcccttttctcctcaagtcctgaagttgagtttgagaggcgacacggcggcggcggccgcgctgctcccgctcctctgcctccccatggatatgcactgcaaagcagaccccttctccgcgatgcacccagggcacgggggtgtgaaccagctcgggggggtgtttgtgaacggccggcccctacccgacgtggtgaggcagcgcatcgtggagctggcccaccagggtgtgcggccctgtgacatctcccggcagctgcgggtcagccacggctgtgtcagcaaaatcctgggcaggtactacgagaccggcagcatcaagccgggtgtgatcggtggctccaagcccaaagtggcgacgcccaaagtggtggacaagattgctgaatacaaacgacagaacccgactatgttcgcctgggagattcgagaccggctcctggccgagggcatctgtgacaatgacacagtgcccagcgtctcttccatcaacagaatcatccggaccaaagttcagcagcctttccacccaacgccggatggggctgggacaggagtgaccgcccctggccacaccattgttcccagcacggcctcccctcctgtttccagcgcctccaatgacccagtgggatcctactccatcaatgggatcctggggattcctcgctccaatggtgagaagaggaaacgtgatgaagatgtgtctgagggctcagtccccaatggagattcccagagtggtgtggacagtttgcggaagcacttgcgagctgacaccttcacccagcagcagctggaagctttggatcgggtctttgagcgtccttcctaccctgacgtcttccaggcatcagagcacatcaaatcagaacaggggaacgagtactccctcccagccctgacccctgggcttgatgaagtcaagtcgagtctatctgcatccaccaaccctgagctgggcagcaacgtgtcaggcacacagacatacccagttgtgactggtcgtgacatggcgagcaccactctgcctggttacccccctcacgtgccccccactggccagggaagctaccccacctccaccctggcaggaatggtgcctgggagcgagttctccggcaacccgtacagccacccccagtacacggcctacaacgaggcttggagattcagcaaccccgccttactaagttccccttattattatagtgccgccccccggtccgcccctgccgctgctgccgctgcctatgaccgccactagttaccgcggggaccacatcaagcttcaggccgacagcttcggcctccacatcgtccccgtctgaccccaccccggagggagggaggaccgacgcgacgcgatgcctcccggccaccgccccagcctcaccccatcccacgacccccgcaacccttcacatcacccccctcgaaggtcggacaggacgggtggagccgtgggcgggaccctcaggcccgggcccgccgcccccagccccgcctgccgcccctccccgcctgcctggactgcgcggcgccgtgagggggattcggcccagctcgtcccggcctccaccaagccagccccgaagcccgccagccaccctgccggactcgggcgcgacctgctggcgcgcgccggatgtttctgtgacacacaatcagcgcggaccgcagcgcggcccagccccgggcacccgcctcggacgctcgggcgccaggaggcttcgctggaggggctgggccaaggagattaagaagaaaacgactttctgcaggaggaagagcccgctgccgaatccctgggaaaaattcttttcccccagtgccagccggactgccctcgccttccgggtgtgccctgtcccagaagatggaatgggggtgtgggggtccggctctaggaacgggctttgggggcgtcaggtctttccaaggttgggacccaaggatcggggggcccagcagcccgcaccgatcgagccggactctcggctcttcactgctcctcctggcctgcctagttccccagggcccggcacctcctgctgcgagacccggctctcagccctgccttgcccctacctcagcgtctcttccacctgctggcctcccagtttcccctcctgccagtccttcgcctgtcccttgacgccctgcatcctcctccctgactcgcagccccatcggacgctctcccgggaccgccgcaggaccagtttccatagactgcggactggggtcttcctccagcagttacttgatgccccctcccccgacacagactctcaatctgccggtggtaagaaccggttctgagctggcgtctgagctgctgcggggtggaagtggggggctgcccactccactcctcccatcccctcccagcctcctcctccggcaggaactgaacagaaccacaaaaagtctacatttatttaatatgatggtctttgcaaaaaggaacaaaacaacacaaaagcccaccaggctgctgctttgtggaaagacggtgtgtgtcgtgtgaaggcgaaacccggtgtacataacccctccccctccgccccgccccgcccggccccgtagagtccctgtcgcccgccggccctgcctgtagatacgccccgctgtctgtgctgtgagagtcgccgctcgctgggggggaagggggggacacagctacacgcccattaaagcacagcacgtcctgggggaggggggcattttttatgttacaaaaaaaaattacgaaagaaaagaaatctctatgcaaaatgacgaacatggtcctgtggactcctctggcctgttttgttggctctttctctgtaattccgtgttttcgctttttcctccctgcccctctctccctctgcccctctctcctctccgcttctctccccctctgtctctgtctctctccgtctctgtcgctcttgtctgtctgtctctgctctttcctcggcctctctccccagacctggcccggccgccctgtctccgcaggctagatccgaggtggcagctccagcccccgggctcgccccctcgcgggcgtgccccgcgcgccccgggcggccgaaggccgggccgccccgtcccgccccgtagttgctctttcggtagtggcgatgcgccctgcatgtctcctcacccgtggatcgtgacgactcgaaataacagaaacaaagtcaataaagtgaaaataaataaaaatccttgaacaaatccgaaaaggcttggagtcctcgcccagatctctctcccctgcgagccctttttatttgagaaggaaaaagagaaaagagaatcgtttaagggaacccggcgcccagccaggctccagtggcccgaacggggcggcgagggcggcgagggcgccgaggtccggcccatcccagtcctgtggggctggccgggcagagaccccggacccaggcccaggcctaacctgctaaatgtccccggacggttctggtctcctcggccactttcagtgcgtcggttcgttttgattctttttcttttgtgcacataagaaataaataataataataaataaagaataaaattttgtatgtca

SEQ ID NO: 116297 - DNA, 4057 bp, Artificial Sequence
  derived and/or modified sequence
cgggggcctggcccgcgcgctcccctcccgcaggcgccacctcggacatccccgggattgctacttctctgccaacttcgccaactcgccagcacttggagaggcccggctcccctcccggcgccctctgaccgcccccgccccgcgcgctctccgaccaccgcctctcggatgaccaggttccaggggagctgagcgagtcgcctcccccgcccagcttcagccctggctgcagctgcagcgcgagccatgcgcccccagtgcaccccggcccggcccaccgccccggggccattctgctgaccgcccagccccgagccccgacagtggcaagttgcggctactgcagttgcaagctccggccaacccggaggagccccagcggggagcgcagtgctgcgccccccgcccccgcgcgccccgcagcagccgggcgttcactcatcctccctcccccaccgtccctcccttttctcctcaagtcctgaagttgagtttgagaggcgacacggcggcggcggccgcgctgctcccgctcctctgcctccccatggatatgcactgcaaagcagaccccttctccgcgatgcacccagggcacgggggtgtgaaccagctcgggggggtgtttgtgaacggccggcccctacccgacgtggtgaggcagcgcatcgtggagctggcccaccagggtgtgcggccctgtgacatctcccggcagctgcgggtcagccacggctgtgtcagcaaaatcctgggcaggtactacgagaccggcagcatcaagccgggtgtgatcggtggctccaagcccaaagtggcgacgcccaaagtggtggacaagattgctgaatacaaacgacagaacccgactatgttcgcctgggagattcgagaccggctcctggccgagggcatctgtgacaatgacacagtgcccagcgtctcttccatcaacagaatcatccggaccaaagttcagcagcctttccacccaacgccggatggggctgggacaggagtgaccgcccctggccacaccattgttcccagcacggcctcccctcctgtttccagcgcctccaatgacccagtgggatcctactccatcaatgggatcctggggattcctcgctccaatggtgagaagaggaaacgtgatgaagatgtgtctgagggctcagtccccaatggagattcccagagtggtgtggacagtttgcggaagcacttgcgagctgacaccttcacccagcagcagctggaagctttggatcgggtctttgagcgtccttcctaccctgacgtcttccaggcatcagagcacatcaaatcagaacaggggaacgagtactccctcccagccctgacccctgggcttgatgaagtcaagtcgagtctatctgcatccaccaaccctgagctgggcagcaacgtgtcaggcacacagacatacccagttgtgactggtcgtgacatggcgagcaccactctgcctggttacccccctcacgtgccccccactggccagggaagctaccccacctccaccctggcaggaatggtgcctgggagcgagttctccggcaacccgtacagccacccccagtacacggcctacaacgaggcttggagattcagcaaccccgccttactaagttccccttattattatagtgccgccccccggggctccgcccctgccgctgctgccgctgcctatgaccgccactagttaccgcggggaccacatcaagcttcaggccgacagcttcggcctccacatcgtccccgtctgaccccaccccggagggagggaggaccgacgcgacgcgatgcctcccggccaccgccccagcctcaccccatcccacgacccccgcaacccttcacatcacccccctcgaaggtcggacaggacgggtggagccgtgggcgggaccctcaggcccgggcccgccgcccccagccccgcctgccgcccctccccgcctgcctggactgcgcggcgccgtgagggggattcggcccagctcgtcccggcctccaccaagccagccccgaagcccgccagccaccctgccggactcgggcgcgacctgctggcgcgcgccggatgtttctgtgacacacaatcagcgcggaccgcagcgcggcccagccccgggcacccgcctcggacgctcgggcgccaggaggcttcgctggaggggctgggccaaggagattaagaagaaaacgactttctgcaggaggaagagcccgctgccgaatccctgggaaaaattcttttcccccagtgccagccggactgccctcgccttccgggtgtgccctgtcccagaagatggaatgggggtgtgggggtccggctctaggaacgggctttgggggcgtcaggtctttccaaggttgggacccaaggatcggggggcccagcagcccgcaccgatcgagccggactctcggctcttcactgctcctcctggcctgcctagttccccagggcccggcacctcctgctgcgagacccggctctcagccctgccttgcccctacctcagcgtctcttccacctgctggcctcccagtttcccctcctgccagtccttcgcctgtcccttgacgccctgcatcctcctccctgactcgcagccccatcggacgctctcccgggaccgccgcaggaccagtttccatagactgcggactggggtcttcctccagcagttacttgatgccccctcccccgacacagactctcaatctgccggtggtaagaaccggttctgagctggcgtctgagctgctgcggggtggaagtggggggctgcccactccactcctcccatcccctcccagcctcctcctccggcaggaactgaacagaaccacaaaaagtctacatttatttaatatgatggtctttgcaaaaaggaacaaaacaacacaaaagcccaccaggctgctgctttgtggaaagacggtgtgtgtcgtgtgaaggcgaaacccggtgtacataacccctccccctccgccccgccccgcccggccccgtagagtccctgtcgcccgccggccctgcctgtagatacgccccgctgtctgtgctgtgagagtcgccgctcgctgggggggaagggggggacacagctacacgcccattaaagcacagcacgtcctgggggaggggggcattttttatgttacaaaaaaaaattacgaaagaaaagaaatctctatgcaaaatgacgaacatggtcctgtggactcctctggcctgttttgttggctctttctctgtaattccgtgttttcgctttttcctccctgcccctctctccctctgcccctctctcctctccgcttctctccccctctgtctctgtctctctccgtctctgtcgctcttgtctgtctgtctctgctctttcctcggcctctctccccagacctggcccggccgccctgtctccgcaggctagatccgaggtggcagctccagcccccgggctcgccccctcgcgggcgtgccccgcgcgccccgggcggccgaaggccgggccgccccgtcccgccccgtagttgctctttcggtagtggcgatgcgccctgcatgtctcctcacccgtggatcgtgacgactcgaaataacagaaacaaagtcaataaagtgaaaataaataaaaatccttgaacaaatccgaaaaggcttggagtcctcgcccagatctctctcccctgcgagccctttttatttgagaaggaaaaagagaaaagagaatcgtttaagggaacccggcgcccagccaggctccagtggcccgaacggggcggcgagggcggcgagggcgccgaggtccggcccatcccagtcctgtggggctggccgggcagagaccccggacccaggcccaggcctaacctgctaaatgtccccggacggttctggtctcctcggccactttcagtgcgtcggttcgttttgattctttttcttttgtgcacataagaaataaataataataataaataaagaataaaattttgtatgtca

SEQ ID NO: 116298 - protein, 403 aa, Artificial Sequence [sequence omitted]

SEQ ID NO: 116299 - DNA, 9027 bp, Artificial Sequence
  derived and/or modified sequence
ggtaacctcagactcgagtcagtgacactgctcaacgcacccatctcagctttcatcatcagtcctccacccccgccccacaacagcctaccctgcctccggctgggtttctgggcagaggccgaggcttagctcgttatcctcgcctcgcgttgctgcaaaagccgcagcaagtgcagctgcaggctggcggctgggaaccggcccgagcaagccccaggcagctacactgggcatgctcagtagagcctgcggcttggggactctgcgctcgcacccagagctaccgctctgccccctcctaccgccccctgccctgccctgccctcccctcgcccggcgcggtcccgtccgcctctcgctcgcctcccgcctcccctcggtcttccgaggcgcccgggctcccggcgcggcggcggagggggcgggcaggccggcgggcggtgatgtggcgggactctttatgcgctgcggcaggatacgcgctcggcgctgggacgcgactgcgctcagttctctcctctcggaagctgcagccatgatggaagtttgagagttgagccgctgtgaggcgaggccgggctcaggcgagggagatgagagacggcggcggccgcggcccggagcccctctcagcgcctgtgagcagccgcgggggcagcgccctcggggagccggccggcctgcggcggcggcagcggcggcgtttctcgcctcctcttcgtcttttctaaccgtgcagcctcttcctcggcttctcctgaaagggaaggtggaagccgtgggctcgggcgggagccggctgaggcgcggcggcggcggcggcacctcccgctcctggagcgggggggagaagcggcggcggcggcggccgcggcggctgcagctccagggagggggtctgagtcgcctgtcaccatttccagggctgggaacgccggagagttggtctctccccttctactgcctccaacacggcggcggcggcggctggcacatccagggacccgggccggttttaaacctcccgtgcgccgccgccgcaccccccgtggcccgggctccggaggccgccggcggaggcagccgttcggaggattattcgtcttctccccattccgctgccgccgctgccaggcctctggctgctgaggagaagcaggcccagtcgctgcaaccatccagcagccgccgcagcagccattacccggctgcggtccagagccaagcggcggcagagcgaggggcatcagctaccgccaagtccagagccatttccatcctgcagaagaagccccgccaccagcagcttctgccatctctctcctcctttttcttcagccacaggctcccagacatgacagccatcatcaaagagatcgttagcagaaacaaaaggagatatcaagaggatggattcgacttagacttgacctatatttatccaaacattattgctatgggatttcctgcagaaagacttgaaggcgtatacaggaacaatattgatgatgtagtaaggtttttggattcaaagcataaaaaccattacaagatatacaatctttgtgctgaaagacattatgacaccgccaaatttaattgcagagttgcacaatatccttttgaagaccataacccaccacagctagaacttatcaaacccttttgtgaagatcttgaccaatggctaagtgaagatgacaatcatgttgcagcaattcactgtaaagctggaaagggacgaactggtgtaatgatatgtgcatatttattacatcggggcaaatttttaaaggcacaagaggccctagatttctatggggaagtaaggaccagagacaaaaagggagtaactattcccagtcagaggcgctatgtgtattattatagctacctgttaaagaatcatctggattatagaccagtggcactgttgtttcacaagatgatgtttgaaactattccaatgttcagtggcggaacttgcaatcctcagtttgtggtctgccagctaaaggtgaagatatattcctccaattcaggacccacacgacgggaagacaagttcatgtactttgagttccctcagccgttacctgtgtgtggtgatatcaaagtagagttcttccacaaacagaacaagatgctaaaaaaggacaaaatgtttcacttttgggtaaatacattcttcataccaggaccagaggaaacctcagaaaaagtagaaaatggaagtctatgtgatcaagaaatcgatagcatttgcagtatagagcgtgcagataatgacaaggaatatctagtacttactttaacaaaaaatgatcttgacaaagcaaataaagacaaagccaaccgatacttttctccaaattttaaggtgaagctgtacttcacaaaaacagtagaggagccgtcaaatccagaggctagcagttcaacttctgtaacaccagatgttagtgacaatgaacctgatcattatagatattctgacaccactgactctgatccagagaatgaaccttttgatgaagatcagcatacacaaattacaaaagtctgaatttttttttatcaagagggataaaacaccatgaaaataaacttgaataaactgaaaatggacctttttttttttaatggcaataggacattgtgtcagattaccagttataggaacaattctcttttcctgaccaatcttgttttaccctatacatccacagggttttgacacttgttgtccagttgaaaaaaggttgtgtagctgtgtcatgtatatacctttttgtgtcaaaaggacatttaaaattcaattaggattaataaagatggcactttcccgttttattccagttttataaaaagtggagacagactgatgtgtatacgtaggaattttttccttttgtgttctgtcaccaactgaagtggctaaagagctttgtgatatactggttcacatcctacccctttgcacttgtggcaacagataagtttgcagttggctaagagaggtttccgaagggttttgctacattctaatgcatgtattcgggttaggggaatggagggaatgctcagaaaggaaataattttatgctggactctggaccatataccatctccagctatttacacacacctttctttagcatgctacagttattaatctggacattcgaggaattggccgctgtcactgcttgttgtttgcgcatttttttttaaagcatattggtgctagaaaaggcagctaaaggaagtgaatctgtattggggtacaggaatgaaccttctgcaacatcttaagatccacaaatgaagggatataaaaataatgtcataggtaagaaacacagcaacaatgacttaaccatataaatgtggaggctatcaacaaagaatgggcttgaaacattataaaaattgacaatgatttattaaatatgttttctcaattgtaacgacttctccatctcctgtgtaatcaaggccagtgctaaaattcagatgctgttagtacctacatcagtcaacaacttacacttattttactagttttcaatcataatacctgctgtggatgcttcatgtgctgcctgcaagcttcttttttctcattaaatataaaatattttgtaatgctgcacagaaattttcaatttgagattctacagtaagcgttttttttctttgaagatttatgatgcacttattcaatagctgtcagccgttccacccttttgaccttacacattctattacaatgaattttgcagttttgcacattttttaaatgtcattaactgttagggaattttacttgaatactgaatacatataatgtttatattaaaaaggacatttgtgttaaaaaggaaattagagttgcagtaaactttcaatgctgcacacaaaaaaaagacatttgatttttcagtagaaattgtcctacatgtgctttattgatttgctattgaaagaatagggtttttttttttttttttttttttttttttaaatgtgcagtgttgaatcatttcttcatagtgctcccccgagttgggactagggcttcaatttcacttcttaaaaaaaatcatcatatatttgatatgcccagactgcatacgattttaagcggagtacaactactattgtaaagctaatgtgaagatattattaaaaaggtttttttttccagaaatttggtgtcttcaaattataccttcaccttgacatttgaatatccagccattttgtttcttaatggtataaaattccattttcaataacttattggtgctgaaattgttcactagctgtggtctgacctagttaatttacaaatacagattgaataggacctactagagcagcatttatagagtttgatggcaaatagattaggcagaacttcatctaaaatattcttagtaaataatgttgacacgttttccataccttgtcagtttcattcaacaatttttaaatttttaacaaagctcttaggatttacacatttatatttaaacattgatatatagagtattgattgattgctcataagttaaattggtaaagttagagacaactattctaacacctcaccattgaaatttatatgccaccttgtctttcataaaagctgaaaattgttacctaaaatgaaaatcaacttcatgttttgaagatagttataaatattgttctttgttacaatttcgggcaccgcatattaaaacgtaactttattgttccaatatgtaacatggagggccaggtcataaataatgacattataatgggcttttgcactgttattatttttcctttggaatgtgaaggtctgaatgagggttttgattttgaatgtttcaatgtttttgagaagccttgcttacattttatggtgtagtcattggaaatggaaaaatggcattatatatattatatatataaatatatattatacatactctccttactttatttcagttaccatccccatagaatttgacaagaattgctatgactgaaaggttttcgagtcctaattaaaactttatttatggcagtattcataattagcctgaaatgcattctgtaggtaatctctgagtttctggaatattttcttagactttttggatgtgcagcagcttacatgtctgaagttacttgaaggcatcacttttaagaaagcttacagttgggccctgtaccatcccaagtcctttgtagctcctcttgaacatgtttgccatacttttaaaagggtagttgaataaatagcatcaccattctttgctgtggcacaggttataaacttaagtggagtttaccggcagcatcaaatgtttcagctttaaaaaataaaagtagggtacaagtttaatgtttagttctagaaattttgtgcaatatgttcataacgatggctgtggttgccacaaagtgcctcgtttacctttaaatactgttaatgtgtcatgcatgcagatggaaggggtggaactgtgcactaaagtgggggctttaactgtagtatttggcagagttgccttctacctgccagttcaaaagttcaacctgttttcatatagaatatatatactaaaaaatttcagtctgttaaacagccttactctgattcagcctcttcagatactcttgtgctgtgcagcagtggctctgtgtgtaaatgctatgcactgaggatacacaaaaataccaatatgatgtgtacaggataatgcctcatcccaatcagatgtccatttgttattgtgtttgttaacaaccctttatctcttagtgttataaactccacttaaaactgattaaagtctcattcttgtcattgtgtgggtgttttattaaatgagagtttataattcaaattgcttaagtccattgaagttttaattaatgggcagccaaatgtgaatacaaagttttcagtttttttttttcctgctgtccttcaaagcctactgtttaaaaaaaaaaaaaaaaaaaaacatggcctgagagtagagtatctgtctactcatgtttaattaaggaaaaacacttatttttagggctttagtcatcacttcataaattgtataagcacattaaatagcgttctagtcctgaaaaagtccaagattcttagaaaattgtgcatatttttattatgacagatgtttgaagataattccccagaatggatttgatactttagatttcaattttgtggcttttgtctattattctgtactctgccatcagcatatggaaagcttcatttactcatcatgacttgtgccatataaaaattgatatttcggaatagtctaaaggactttttgtacttgaatttaatcatgttgtttctaatattcttaaaagcttgaagactaaagcatatcctttcaacaaagcatagtaaggtaataagaaagtgtagtttgtacaagtgttaaaaaaataaagtagacaatgttacagtgggacttattatttcaagtttacattttctccatgtaattttttaaaaagtaaatgaaaaaatgtgcaataatgtaaaatatgaagtgtatgtgtacacacattttatttttcggtatcttgggtatacgtatggttgaaaactatactggagtctaaaagtattctaatttataagaagacattttggtgatgtttgaaaaatagaaatgtgctagttttgtttttatatcatgtcctttgtacgttgtaatatgagctggcttggttcagtaaatgccatcaccatttccattgagaatttaaaactcaccagtgtttaatatgcaggcttccaaaggcttatgaaaaaaatcaagacccttaaatctagttaatttgctgctaacatgaaactctttggttcttttatttttgccagataattagacacacatctaaagcttagtcttaaatggcttaagtgtagctattgattagtgctgttgctagttcagaaagaaatgtttgtgaatggaaacaagaatattcagtccaaactgttgtaaggacagtacctgaaaaccaggaaacaggataatggaaaaagtcttttaaagatgaaatgttggagccaactttcttatagaattaattgtatgtggctatagaaagcctaatgattgttgcttatttttgagagcatattattcttttatgaccataatcttgctgtttttccatcttccaaaagatcttccttctaatatgtatatcagaatgtgggtagccagtcagacaaattcatattggttggtagctttaaaaagtttgtaatgtgaagacaggaaaggacaaaatagtttgctttggtggtagtactctggttgttaagctaggtattttgagactacttccccatcacaacaacaataaaataatcactcataatcctatcacctggagacatagccatcgttaatatgttagtgactatacaatcatgttttcttctgtatatccatgtatattctttaaaaatgaaatttatactgtacctgatctcaaagctttttagcttagtatatctgtcatgaatttgtaggatgttccattgcatcagaaaacggacagtgatttgattactttctaatgccacagatgcagattacatgtagttattgagaatcctttcgaattcagtggcttaatcatgaatgtctaaatattgttgacattaggatgatacatgtaaattaaagttacatttgtttagcatagacaagcttaacattgtagatgtttctcttcaaaaatcatcttaaacatttgcatttggaattgtgttaaatagaatgtgtgaaacactgtattagtaaacttcatcacctttctacttccttatagtttgaacttttcagtttttgtagttcccaaacagttgctcaatttagagcaaattaatttaacacctgccaaaaaaaggctgctgttggcttatcagttgtctttaaattcaaatgctcatgtgacttttatcacatcaaaaaatatttcattaatgattcacctttagctctgaaaattaccgcgtttagtaattatagtgggcttataaaaacatgcaactctttttgatagttatttgagaattttggtgaaaaatatttagctgagggcagtatagaacttataaaccaatatattgatatttttaaaacatttttacatataagtaaactgccatctttgagcataactacatttaaaaataaagctgcatatttttaaatcaagtgtttaacaagaatttatattttttattttttaaaattaaaaataatttatatttcctctgttgcatgaggattctcatctgtgcttataatggttagagattttatttgtgtggaatgaagtgaggcttgtagtcatggttctagtgtttcagtttgccaagtctgtttactgcagtgaaattcatcaaatgtttcagtgtggttttctgtagcctatcatttactggctatttttttatgtacacctttaggattttctgcctactctatccagttgtccaaatgatatcctacattttacaaatgccctttcagtttctattttctttttccattaaattgccctcatgtcctaatgtgcagtttgtaagtgtgtgtgtgtgtgtctgtgtgtgtgtgaatttgattttcaagagtgctagacttccaatttgagagattaaataatttaattcaggcaaacatttttcattggaatttcacagttcattgtaatgaaaatgttaatcctggatgacctttgacatacagtaatgaatcttggatattaatgaatttgttagtagcatcttgatgtgtgttttaatgagttattttcaaagttgtgcattaaaccaaagttggcatactggaagtgtttatatcaagttccatttggctactgatggacaaaaaatagaaatgccttcctatggagagtatttttcctttaaaaaattaaaaaggttaattattttgacta

SEQ ID NO: 116300 - DNA, 681 bp, Artificial Sequence
  derived and/or modified sequence
atgctgaccctggacctgatccaggaggaggaccccagccccgaggagcccaccagctgcgccgagagcttcagagtggacctggacaagagcgtggcccagctggccggcagcagaagaagagccgacagcgacagaatccagcccagcgccgacagagccagcagcctgagcagaccctgggagaagaccgacaagggcgccacctacaccccccaggcccccaagaagctgacccccaccgagaagggcagatgcgccagcctggaggagatcctgagccagagagacgccgccagcgccagaaccctgcagctgagagccgaggagccccccacccccgccctgcccaaccccggccagctgagcagaatccaggacctggtggccagaaagctggaggagacccaggagctgctggccgaggtgcagggcctgggcgacggcaagagaaaggccaaggacccccccagaagcccccccgacagcgagagcgagcagctgctgctggagaccgagagactgctgggcgaggccagcagcaactggagccaggccaagagagtgctgcaggaggtgagagagctgagagacctgtacagacagatggacctgcagacccccgacagccacctgagacagaccaccccccacagccagtacagaaagagcctgatgtag

SEQ ID NO: 116301 - DNA, 681 bp, Artificial Sequence
  derived and/or modified sequence
atgttgacacttgacctgatccaggaagaagacccctcccccgaagaacccaccagctgcgcagaaagtttcagggtagatttggacaagtctgtagcccagctcgctggatcaaggagacgagccgacagcgacagaattcagccttctgcggaccgagcatctagtctctcacggccctgggagaaaaccgacaagggtgcgacctacaccccccaggcacccaagaaactgactccaaccgaaaaaggccgctgtgcatcactggaggagatcctgtcccagagagatgctgcttccgcacgcaccttgcagttaagggccgaggagccacccacgccagctttgcctaatcccggccagctgagtcgcatccaggaccttgttgcacgcaagctggaggaaactcaagaacttctggctgaagtccagggccttggagacggcaaacggaaagccaaggacccacctcggagccctcctgattctgagtccgagcagctgctcttggaaacggaacgtctgcttggagaagcctcttcaaattggagtcaggcgaagcgggtgctgcaagaggtgagagagctccgcgatctgtatagacagatggatctccagaccccagattctcatctgcggcaaaccacaccgcactcccagtaccgaaaatccctgatgtag

SEQ ID NO: 116302 - DNA, 681 bp, Artificial Sequence
  derived and/or modified sequence
atgctgaccctggacctgatccaggaggaggaccccagccctgaggagcccaccagctgtgccgagagcttccgggtggacctggacaagtctgtggcccagctggccggcagcagaagaagagctgacagcgaccgcatccagcccagcgctgaccgggccagcagcctgagccggccctgggagaagacagacaagggggccacctacaccccccaggcccccaagaagctgacccccacagagaagggccgctgtgccagcctggaggagatcctgagccagagagatgctgccagcgcccggaccctgcagctgcgggcagaggagccccccaccccagccctgcccaaccctggccagctgagccgcatccaggacctggtggccaggaagctggaggagacccaggagctgctggccgaggtgcagggcctgggagatggcaagaggaaggccaaggacccccccaggagccccccagattctgagagcgagcagctgctgctggagacagagcggctgctgggggaggccagcagcaactggagccaggccaagagggtgctgcaggaggtgcgggagctgcgggacctgtaccggcagatggacctgcagaccccagacagccacctgcggcagaccaccccccacagccagtacaggaagagcctgatgtag

SEQ ID NO: 116303 - DNA, 681 bp, Artificial Sequence
  derived and/or modified sequence
atgctgaccctggacctgatccaggaggaggaccccagccccgaggagcctacatcctgcgcagagagttttagggtcgacctggacaagagcgttgctcagctggccggcagtagaagacgcgctgatagtgatcgcattcagccatccgctgatcgggcttcaagcctctctcggccatgggagaaaaccgataaaggcgcgacttacacgccacaggcacccaagaaactgacccccaccgaaaagggccgttgcgctagcctcgaagagatattgagtcaacgcgatgccgctagtgccagaacacttcagctgcgggccgaagaaccccctacaccggccttgcccaaccctggtcagttgtcaaggatccaggatttggttgccaggaagctggaggagacgcaggagctgctggctgaggttcaagggttgggtgatggcaaaaggaaggctaaagatccccctaggtctcctcctgattccgagtccgagcagctcctgctcgaaacggaaagactcctaggggaggcctctagtaactggagccaggcaaaaagagtactccaggaggttagggagttgagagacctgtatagacagatggaccttcagacccctgactcccatcttcggcaaactacgccacactcacagtatagaaagagtctgatgtag

SEQ ID NO: 116304 - DNA, 681 bp, Artificial Sequence
  derived and/or modified sequence
atgctgacactggacctcattcaggaagaagatccatcccctgaggagccaacaagctgtgcggaatccttcagggtcgatttggataagtctgtcgcacaacttgctgggagccgccgaagggctgatagcgaccggattcagcctagcgcagaccgcgcatcttcattaagtcgcccttgggaaaagactgataagggggcaacttacacccctcaggcacccaaaaaactgacccccacagaaaaaggacgctgtgcctccttagaagaaattttgtctcagagggatgctgctagcgctcgcaccttgcagctcagagccgaagaaccacctacgccagccctgccaaacccaggtcaactgtctcgcattcaggacctggtggccaggaaactggaagagacccaggaactgctcgcagaagtccagggattgggggacggcaagcgtaaggcgaaagatccgcctcggtcccccccagacagtgagagcgagcaattgctcctcgaaactgaaaggcttctgggggaagcatcatcaaactggagccaggctaaacgagtactgcaggaagttagggagctgcgagacctatacaggcaaatggacttacagacgccggattcacacttaagacaaactaccccccactcacaataccggaaatctcttatgtag

SEQ ID NO: 116305 - protein, 1204 aa, Artificial Sequence
  derived and/or modified sequence
MSFFNFRKIFKLGSEKKKKQYEHVKRDLNPEDFWEIIGELGDGAFGKVYKAQNKETSVLAAAKVIDTKSEEELEDYMVEIDILASCDHPNIVKLLDAFYYENNLWILIEFCAGGAVDAVMLELERPLTESQIQVVCKQTLDALNYLHDNKIIHRDLKAGNILFTLDGDIKLADFGVSAKNTRTIQRRDSFIGTPYWMAPEVVMCETSKDRPYDYKADVWSLGITLIEMAEIEPPHHELNPMRVLLKIAKSEPPTLAQPSRWSSNFKDFLKKCLEKNVDARWTTSQLLQHPFVTVDSNKPIRELIAEAKAEVTEEVEDGKEEDEEEETENSLPIPASKRASSDLSIASSEEDKLSQNACILESVSEKTERSNSEDKLNSKILNEKPTTDEPEKAVEDINEHITDAQLEAMTELHDRTAVIKENEREKRPKLENLPDTEDQETVDINSVSEGKENNIMITLETNIEHNLKSEEEKDQEKQQMFENKLIKSEEIKDTILQTVDLVSQETGEKEANIQAVDSEVGLTKEDTQEKLGEDDKTQKDVISNTSDVIGTCEAADVAQKVDEDSAEDTQSNDGKEVVEVGQKLINKPMVGPEAGGTKEVPIKEIVEMNEIEEGKNKEQAINSSENIMDINEEPGTTEGEEITESSSTEEMEVRSVVADTDQKALGSEVQDASKVTTQIDKEKKEIPVSIKKEPEVTVVSQPTEPQPVLIPSININSDSGENKEEIGSLSKTETILPPESENPKENDNDSGTGSTADTSSIDLNLSISSFLSKTKDSGSISLQETRRQKKTLKKTRKFIVDGVEVSVTTSKIVTDSDSKTEELRFLRRQELRELRFLQKEEQRAQQQLNSKLQQQREQIFRRFEQEMMSKKRQYDQEIENLEKQQKQTIERLEQEHTNRLRDEAKRIKGEQEKELSKFQNMLKNRKKEEQEFVQKQQQELDGSLKKIIQQQKAELANIERECLNNKQQLMRAREAAIWELEERHLQEKHQLLKQQLKDQYFMQRHQLLKRHEKETEQMQRYNQRLIEELKNRQTQERARLPKIQRSEAKTRMAMFKKSLRINSTATPDQDRDKIKQFAAQEEKRQKNERMAQHQKHENQMRDLQLQCEANVRELHQLQNEKCHLLVEHETQKLKELDEEHSQELKEWREKLRPRKKTLEEEFARKLQEQEVFFKMTGESECLNPSTQSRISKFYPIPSLHSTGS

SEQ ID NO: 116306 - DNA, 3615 bp, Artificial Sequence
  derived and/or modified sequence
atgagcttcttcaacttcagaaagatcttcaagctgggcagcgagaagaagaagaagcagtacgagcacgtgaagagagacctgaaccccgaggacttctgggagatcatcggcgagctgggcgacggcgccttcggcaaggtgtacaaggcccagaacaaggagaccagcgtgctggccgccgccaaggtgatcgacaccaagagcgaggaggagctggaggactacatggtggagatcgacatcctggccagctgcgaccaccccaacatcgtgaagctgctggacgccttctactacgagaacaacctgtggatcctgatcgagttctgcgccggcggcgccgtggacgccgtgatgctggagctggagagacccctgaccgagagccagatccaggtggtgtgcaagcagaccctggacgccctgaactacctgcacgacaacaagatcatccacagagacctgaaggccggcaacatcctgttcaccctggacggcgacatcaagctggccgacttcggcgtgagcgccaagaacaccagaaccatccagagaagagacagcttcatcggcaccccctactggatggcccccgaggtggtgatgtgcgagaccagcaaggacagaccctacgactacaaggccgacgtgtggagcctgggcatcaccctgatcgagatggccgagatcgagcccccccaccacgagctgaaccccatgagagtgctgctgaagatcgccaagagcgagccccccaccctggcccagcccagcagatggagcagcaacttcaaggacttcctgaagaagtgcctggagaagaacgtggacgccagatggaccaccagccagctgctgcagcaccccttcgtgaccgtggacagcaacaagcccatcagagagctgatcgccgaggccaaggccgaggtgaccgaggaggtggaggacggcaaggaggaggacgaggaggaggagaccgagaacagcctgcccatccccgccagcaagagagccagcagcgacctgagcatcgccagcagcgaggaggacaagctgagccagaacgcctgcatcctggagagcgtgagcgagaagaccgagagaagcaacagcgaggacaagctgaacagcaagatcctgaacgagaagcccaccaccgacgagcccgagaaggccgtggaggacatcaacgagcacatcaccgacgcccagctggaggccatgaccgagctgcacgacagaaccgccgtgatcaaggagaacgagagagagaagagacccaagctggagaacctgcccgacaccgaggaccaggagaccgtggacatcaacagcgtgagcgagggcaaggagaacaacatcatgatcaccctggagaccaacatcgagcacaacctgaagagcgaggaggagaaggaccaggagaagcagcagatgttcgagaacaagctgatcaagagcgaggagatcaaggacaccatcctgcagaccgtggacctggtgagccaggagaccggcgagaaggaggccaacatccaggccgtggacagcgaggtgggcctgaccaaggaggacacccaggagaagctgggcgaggacgacaagacccagaaggacgtgatcagcaacaccagcgacgtgatcggcacctgcgaggccgccgacgtggcccagaaggtggacgaggacagcgccgaggacacccagagcaacgacggcaaggaggtggtggaggtgggccagaagctgatcaacaagcccatggtgggccccgaggccggcggcaccaaggaggtgcccatcaaggagatcgtggagatgaacgagatcgaggagggcaagaacaaggagcaggccatcaacagcagcgagaacatcatggacatcaacgaggagcccggcaccaccgagggcgaggagatcaccgagagcagcagcaccgaggagatggaggtgagaagcgtggtggccgacaccgaccagaaggccctgggcagcgaggtgcaggacgccagcaaggtgaccacccagatcgacaaggagaagaaggagatccccgtgagcatcaagaaggagcccgaggtgaccgtggtgagccagcccaccgagccccagcccgtgctgatccccagcatcaacatcaacagcgacagcggcgagaacaaggaggagatcggcagcctgagcaagaccgagaccatcctgccccccgagagcgagaaccccaaggagaacgacaacgacagcggcaccggcagcaccgccgacaccagcagcatcgacctgaacctgagcatcagcagcttcctgagcaagaccaaggacagcggcagcatcagcctgcaggagaccagaagacagaagaagaccctgaagaagaccagaaagttcatcgtggacggcgtggaggtgagcgtgaccaccagcaagatcgtgaccgacagcgacagcaagaccgaggagctgagattcctgagaagacaggagctgagagagctgagattcctgcagaaggaggagcagagagcccagcagcagctgaacagcaagctgcagcagcagagagagcagatcttcagaagattcgagcaggagatgatgagcaagaagagacagtacgaccaggagatcgagaacctggagaagcagcagaagcagaccatcgagagactggagcaggagcacaccaacagactgagagacgaggccaagagaatcaagggcgagcaggagaaggagctgagcaagttccagaacatgctgaagaacagaaagaaggaggagcaggagttcgtgcagaagcagcagcaggagctggacggcagcctgaagaagatcatccagcagcagaaggccgagctggccaacatcgagagagagtgcctgaacaacaagcagcagctgatgagagccagagaggccgccatctgggagctggaggagagacacctgcaggagaagcaccagctgctgaagcagcagctgaaggaccagtacttcatgcagagacaccagctgctgaagagacacgagaaggagaccgagcagatgcagagatacaaccagagactgatcgaggagctgaagaacagacagacccaggagagagccagactgcccaagatccagagaagcgaggccaagaccagaatggccatgttcaagaagagcctgagaatcaacagcaccgccacccccgaccaggacagagacaagatcaagcagttcgccgcccaggaggagaagagacagaagaacgagagaatggcccagcaccagaagcacgagaaccagatgagagacctgcagctgcagtgcgaggccaacgtgagagagctgcaccagctgcagaacgagaagtgccacctgctggtggagcacgagacccagaagctgaaggagctggacgaggagcacagccaggagctgaaggagtggagagagaagctgagacccagaaagaagaccctggaggaggagttcgccagaaagctgcaggagcaggaggtgttcttcaagatgaccggcgagagcgagtgcctgaaccccagcacccagagcagaatcagcaagttctaccccatccccagcctgcacagcaccggcagctag

SEQ ID NO: 116307 - DNA, 3615 bp, Artificial Sequence
  derived and/or modified sequence
atgtcatttttcaacttccggaagatatttaaattggggtcagaaaaaaagaaaaagcaatacgaacatgtgaaacgggacctgaaccctgaagatttttgggagatcattggagaactaggggacggggcttttggcaaggtgtacaaggcacagaacaaggagacctccgtcctggccgccgctaaagtgattgacaccaagtccgaggaagagctcgaggattatatggtggaaattgatatcctggcgagctgtgatcacccaaatatcgtcaaactcctggacgccttctactacgaaaataacctgtggattttgatcgagttctgtgccggcggggccgttgacgccgtgatgctggaactggaacgccctctcacagagagccaaatccaggtcgtatgcaaacaaacccttgacgcacttaattatctgcacgacaacaaaattattcacagagacctcaaggccgggaacatcttgtttactctagacggcgatatcaaattggctgactttggcgtctctgccaaaaacactaggaccattcagagaagggacagttttatcgggaccccctattggatggcccctgaagttgtgatgtgcgagacttcgaaagatcggccgtacgactacaaggctgacgtgtggtcccttggcattactttgatcgagatggcagaaatcgagcccccacatcacgagctgaatcccatgagggtactcttaaaaatagcaaagtccgagccccctacacttgctcagccctcgcgatggagttctaatttcaaagacttcctgaagaagtgcctggaaaagaatgtggatgcgcgctggacaacttcccagctgctccaacaccctttcgttaccgttgatagcaacaagcctattcgagagctcattgccgaggctaaggcagaagttaccgaggaggttgaagacggcaaggaggaggatgaggaagaggagacagagaattctctccccatccccgcaagcaaaagagcctcgtctgatctgtccatcgcaagctcagaggaggacaaattatctcaaaacgcctgtattctcgaatccgtatcggaaaaaacagaaaggtcaaattccgaggacaaacttaactccaaaattcttaatgaaaagcccaccactgacgagcccgagaaagccgtcgaagacattaatgaacacattacagatgcccagcttgaggctatgaccgaactgcatgataggacagcagttattaaagagaacgaacgggaaaaacggcccaaattggagaacctaccagacacagaggatcaagaaaccgtggatatcaactctgtgtccgaaggcaaagaaaataatatcatgattaccctggagaccaacattgaacataatctgaagtcggaggaagagaaggatcaggagaagcagcagatgttcgagaacaagcttatcaaatctgaggagataaaggatactattcttcagactgtagacctggtaagtcaggaaactggagagaaggaagcaaacatccaagccgtagactctgaggtcggccttactaaagaggacacacaggagaagctgggggaagatgacaagactcagaaggacgtgatctctaacacatccgacgtgataggaacatgcgaggcagccgatgtagctcagaaggtagacgaagacagcgcagaagacacgcagagcaatgatggcaaagaggtggtcgaagttggacagaagttaattaacaagcccatggtgggtcctgaggccggcggcacaaaggaggtccctatcaaggagattgttgagatgaacgaaattgaggaaggcaagaacaaggagcaagccataaacagttcagagaacatcatggacattaacgaggaacccggcactaccgagggcgaggagatcactgagagttcgtctactgaggaaatggaggtgaggagcgtcgtggctgacaccgatcagaaagctctcgggtctgaagtacaggatgcaagcaaagtgacgacacagattgacaaagagaagaaagaaattccggtgtctatcaaaaaagaacctgaagtgacagtcgtgtctcagcccaccgaacctcagcccgtgctcatcccttcgatcaatataaattccgattcaggcgaaaacaaagaggaaattggtagtttatcaaagacggaaacgatcctccctcctgagtcagagaatccgaaggagaatgacaatgactccggaaccgggagcaccgcagacacctcctcaatcgatcttaacctgagcatcagttcgtttctctccaaaactaaagactcaggatccatctccctgcaggagacccggcgacagaaaaagacactgaaaaaaactcgaaaattcattgtggatggcgtggaagtgagcgtcacaacatctaaaattgtgactgactccgactcaaagacggaggaacttagatttctcaggagacaagaactgagggagcttagatttcttcagaaagaagagcagcgcgcccagcagcagctgaattccaagcttcagcagcagagggagcagatctttagacgcttcgaacaagaaatgatgtcgaaaaagaggcagtatgatcaggagatcgaaaacttggagaagcagcaaaagcaaacgatagaaagactggagcaggagcacacgaataggttaagggacgaagctaagcgcataaaaggcgagcaggaaaaggagttatccaaattccagaatatgctgaagaacagaaaaaaggaggagcaggagttcgtgcagaagcagcagcaggagctggacggaagtctaaagaaaattattcagcagcagaaagcagaactagcaaatattgaaagagagtgtcttaacaataagcagcagcttatgcgcgctagagaagctgcaatctgggagctggaggagcgacacctccaagagaaacaccagctcttaaagcagcaactaaaggaccagtatttcatgcaacgccatcagctgttgaaaaggcacgagaaggagacggagcaaatgcagaggtataatcagcgtctgattgaggaattgaagaaccgtcagacgcaggaacgggcacgtcttccaaagatccagcggagcgaggcgaaaacacggatggctatgtttaaaaaaagcctaaggattaacagcaccgccacccctgaccaggatagagacaagataaagcagtttgcagcacaagaggaaaaacgccaaaaaaacgagagaatggcccagcaccagaaacacgagaatcagatgagggacctccaactgcaatgcgaagcaaatgtgcgcgagctccatcaattgcagaacgagaagtgccacctcctcgtggagcacgagactcagaaactgaaggagcttgatgaagagcacagtcaagagttgaaagagtggcgcgaaaaactgcggcccaggaagaaaaccctggaggaggaattcgcccgaaaacttcaggagcaggaggttttctttaaaatgactggagagtctgagtgccttaatccgtccactcagagcagaatttccaaattttacccaatccccagcctgcattccacgggctcctag

SEQ ID NO: 116308 - DNA, 3615 bp, Artificial Sequence
  derived and/or modified sequence
atgtccttcttcaacttcaggaagatcttcaagctgggcagcgagaagaagaagaagcagtatgaacatgtgaagagggacctgaaccctgaggacttctgggagatcattggagagctgggagatggagccttcggcaaggtgtacaaggcccagaacaaggagacctctgtgctggccgccgccaaggtgattgacaccaagtctgaggaggagctggaggactacatggtggagattgacatcctggccagctgtgaccaccccaacatcgtgaagctgctggatgccttctactatgagaacaacctgtggatcctgattgagttctgtgccggcggcgctgtggatgctgtgatgctggagctggagcggcccctgacagagagccagatccaggtggtgtgcaagcagaccctggatgccctgaactacctgcatgacaacaagatcatccaccgggacctgaaggccggcaacatcctcttcaccctggatggagacatcaagctggccgactttggagtgtctgccaagaacaccaggaccatccagaggcgggacagcttcatcggcaccccctactggatggcccctgaggtggtgatgtgtgagaccagcaaggaccggccctatgactacaaggcagatgtgtggagcctgggcatcaccctcatcgagatggccgagattgagcccccccaccacgagctgaaccccatgagggtgctgctgaagatcgccaagtctgagccccccaccctggcccagcccagccgctggagcagcaacttcaaggacttcctgaagaagtgcctggagaagaatgtggatgcccgctggaccaccagccagctgctgcagcacccctttgtgacagtggacagcaacaagcccatccgggagctgattgctgaggccaaggccgaggtgacagaggaggtggaggatggcaaggaggaggatgaggaggaggagacagagaacagcctgcccatcccagccagcaagagggccagcagtgacctgagcatcgccagcagcgaggaggacaagctgagccagaatgcctgcatcctggagagcgtgtctgagaagacagagaggagcaacagcgaggacaagctgaacagcaagatcctgaatgagaagcccaccacagatgagcctgagaaggctgtggaggacatcaatgagcacatcacagatgcccagctggaggccatgacagagctgcatgacagaacagctgtgatcaaggaaaatgaaagagagaagaggcccaagctggagaacctgcctgacacagaggaccaggagaccgtggacatcaacagcgtgtctgagggcaaggagaacaacatcatgatcaccctggagaccaacatcgagcacaacctgaagtctgaggaggagaaggaccaggagaagcagcagatgtttgagaacaagctgatcaagtctgaggagatcaaggacaccatcctgcagacagtggacctggtgtcccaggagaccggggagaaggaggccaacatccaggccgtggacagcgaggtgggcctgaccaaggaggacacccaggagaagctgggagaagatgacaagacccagaaggatgtgatcagcaacaccagtgatgtgattggcacctgtgaggccgcagatgtggcccagaaggtggatgaagattctgctgaggacacccagagcaatgatggcaaggaggtggtggaggtgggccagaagctgatcaacaagcccatggtgggccctgaggccggcggcaccaaggaggtgcccatcaaggagatcgtggagatgaatgaaattgaggagggcaagaacaaggagcaggccatcaacagcagcgagaacatcatggacatcaatgaggagcccggcaccacagaaggagaggagatcacagagagcagcagcacagaggagatggaggtgcgctctgtggtggccgacacagaccagaaggccctgggcagcgaggtgcaggatgccagcaaggtgaccacccagattgacaaggagaagaaggagatccctgtgtccatcaagaaggagcctgaggtgacagtggtgtcccagcccacagagccccagcctgtgctgatccccagcatcaacatcaacagcgacagcggggagaacaaggaggagatcggcagcctgagcaagacagagaccatcctgcccccagagagcgagaaccccaaggaaaatgacaatgacagcggcaccggcagcacagctgacaccagcagcattgacctgaacctgagcatcagcagcttcctgagcaagaccaaggacagcggcagcatcagcctgcaggagacccggcggcagaagaagaccctgaagaagaccaggaagttcatcgtggatggagtggaggtgtctgtgaccaccagcaagatcgtgacagacagcgacagcaagacagaggagctgcgcttcctgcggcggcaggagctgcgggagctgcgcttcctgcagaaggaggagcagagggcccagcagcagctgaacagcaagctgcagcagcagcgggagcagatcttcagaagatttgagcaggagatgatgagcaagaagaggcagtatgaccaggagattgagaacctggagaagcagcagaagcagaccatcgagcggctggagcaggagcacaccaaccggctgagagatgaggccaagaggatcaagggggagcaggagaaggagctgagcaagttccagaacatgctgaagaacaggaagaaggaggagcaggagtttgtgcagaagcagcagcaggagctggatggcagcctgaagaagatcatccagcagcagaaggccgagctggccaacatcgagagagaatgtctgaacaacaagcagcagctgatgagggcccgggaggccgccatctgggagctggaggagcggcacctgcaggagaagcaccagctgctgaagcagcagctgaaggaccagtacttcatgcagaggcaccagctgctgaagagacatgagaaggagacagagcagatgcagcgctacaaccagaggctcatcgaggagctgaagaaccggcagacccaggagcgggcccggctgcccaagatccagaggtctgaggccaagaccaggatggccatgttcaagaagagcctgcgcatcaacagcacagccaccccagaccaggaccgggacaagatcaagcagtttgctgcccaggaggagaagaggcagaagaatgaaagaatggcccagcaccagaagcatgagaaccagatgagggacctgcagctgcagtgtgaggccaacgtgcgggagctgcaccagctgcagaatgagaagtgccacctgctggtggagcacgagacccagaagctgaaggagctggatgaggagcacagccaggagctgaaggagtggagggagaagctgcggcccaggaagaagaccctggaggaggagtttgccaggaagctgcaggagcaggaggtgttcttcaagatgaccggggagagcgagtgcctgaaccccagcacccagagccgcatcagcaagttctaccccatccccagcctgcacagcacaggcagctag

SEQ ID NO: 116309 - DNA, 3615 bp, Artificial Sequence
  derived and/or modified sequence
atgagcttcttcaacttccggaagatcttcaagctgggcagcgagaaaaaaaaaaagcagtacgagcatgtgaagcgggatctgaacccggaagatttttgggaaattatcggagagctcggggacggcgccttcggcaaggtgtacaaagcccaaaacaaggagacaagcgtgctggcggctgctaaggtcatagataccaagtctgaggaggagctggaagattacatggtggaaatcgacatcctcgcttcttgtgaccaccccaacattgtcaaacttctggacgcgttttactatgagaacaatctttggatactgattgaattttgcgccggcggtgcagtcgatgccgtgatgctggaattagagaggcccctcactgagtcgcaaatccaggtagtgtgtaagcaaaccctcgacgccctaaactacctgcacgacaataagataatccatcgggatctgaaggcagggaatatcctgtttactctggatggcgatataaagctcgctgactttggcgtgtctgcaaagaacacacggactatccagaggagagacagtttcatcgggacgccatactggatggcccccgaggtcgtgatgtgcgagacatccaaagaccgcccctacgactataaggccgatgtttggagtctggggatcaccctgattgaaatggctgaaatcgagcccccacaccatgagttgaatcctatgcgtgtgttgctgaagatcgctaagagtgagcctcccaccctggcccagcccagccggtggagttctaatttcaaagacttcctgaaaaagtgtctggaaaagaatgtggacgccagatggactacgtcgcaactgctccaacatcctttcgtgaccgtggattccaataaacctatccgcgaactgattgccgaggcgaaggctgaggtgaccgaggaagtggaggatggcaaagaagaagacgaagaagaggagactgaaaattcgctgcccatccccgctagcaaacgcgcttcctccgacctgtctatagcatccagtgaagaggacaaactgtcacagaatgcctgcattctggaatctgtgagcgagaaaaccgagcggtctaactctgaagacaagttgaatagcaagattttgaacgaaaagcctacaaccgatgagcctgagaaggcagttgaggatataaacgaacacattaccgacgcccagctcgaggctatgactgaactgcatgacaggactgcagttataaaggaaaacgagagagagaagaggccaaaactagaaaacctgccagataccgaggaccaggaaaccgtggacatcaattctgtgagtgaaggtaaggaaaacaacatcatgatcaccctggagacaaacattgagcataacctgaaaagcgaggaagagaaagatcaggaaaaacaacagatgtttgaaaacaagcttatcaagtcagaggagatcaaagatactattctgcagactgtcgacctcgtgtctcaggagacgggagagaaggaagccaacattcaggctgtagactctgaggtcggactgaccaaggaggacacgcaggaaaaactaggggaggacgacaagactcagaaagacgttataagtaacacatcagatgtgatcgggacatgtgaggctgcggacgtcgcccagaaagtcgatgaagacagcgcagaagatacccagtccaacgatggcaaggaagtggtggaggtgggccagaagctgatcaacaaacccatggtcggtccggaggctgggggtacaaaggaggtgcccataaaggagattgttgaaatgaatgaaatcgaggaaggaaagaacaaagagcaggcaatcaactcctcagaaaacatcatggatataaacgaagaacctggcaccacggagggcgaggaaatcaccgagagttccagtacagaggaaatggaggttagatcggtggtagcagatacagaccagaaggctctcggcagcgaggtccaggacgcttccaaagtaaccactcaaatcgacaaagagaagaaagagattccggttagcatcaaaaaagaacctgaagtcacagttgtgtctcagccgactgagcctcagcctgtgctgatcccatcaatcaatatcaactccgactccggagaaaacaaagaggagattgggagtctgtccaagactgaaaccatcctgccccccgaaagcgaaaatccaaaagagaatgacaacgatagtggcaccgggtcgaccgctgatacatcgagcatagatttgaatctgagcatcagctcatttttgtccaagaccaaggacagtggttcaatttcgctccaggagacaagaaggcagaagaagaccttgaaaaaaacccgtaaattcatagtggacggagtcgaggtctctgtgacgacatctaaaatcgttactgattctgacagcaagacagaggaacttagattcctccgcaggcaggaactccgggaacttaggttcctccagaaagaggagcaacgagcacaacaacaactcaactccaaactgcaacagcagcgggagcaaatcttccgacgatttgagcaggagatgatgtccaagaaacgtcagtacgatcaagagattgagaatctggagaaacaacaaaagcagaccatagagcggttggagcaagagcacacgaaccgactgagagacgaggctaagcggatcaaaggtgaacaggaaaaagagttgtccaagtttcaaaatatgcttaaaaatcgaaaaaaagaagagcaggaatttgtgcagaaacagcagcaagaactagatggctccctgaagaagatcatccagcagcagaaagctgagcttgccaacatcgagagggaatgcctcaataataagcagcaactcatgagggcacgcgaggcagccatttgggagctcgaagaaagacacctgcaggagaagcaccaactcttaaaacagcagctcaaggatcaatacttcatgcaacggcatcaactgctgaagcgacatgaaaaagagaccgagcagatgcagagatataaccagaggcttatcgaagagcttaagaacaggcagacacaggaaagggcgaggctgccaaagatacagaggagcgaggccaaaactagaatggcaatgttcaaaaagtccctgcgtatcaacagcaccgccacacccgaccaagatcgggataaaattaagcagttcgcggcacaagaggagaagcgtcagaagaacgaacggatggctcagcaccagaaacacgagaaccagatgagagacctgcagctgcaatgtgaagccaatgtccgcgagctgcaccagctgcagaatgaaaagtgccatctgctggtagagcacgagacccaaaagttgaaagagttagacgaggagcactcccaagagcttaaggaatggagggagaaactgaggcctcgaaagaagacactcgaagaagaatttgcgcgcaaactccaagaacaggaagtgttttttaaaatgaccggcgaatccgagtgcctaaacccctcaactcaatcccgtattagcaaattctacccaataccttcactgcacagcaccggatcgtag

SEQ ID NO: 116310 - DNA, 3615 bp, Artificial Sequence
  derived and/or modified sequence
atgtcctttttcaattttcgtaagatctttaagctgggatcagagaagaaaaagaagcagtacgagcacgttaaacgcgacctgaacccggaggatttttgggaaatcatcggcgagctgggagatggtgccttcggtaaggtttataaggctcagaacaaggaaactagcgtcctggctgccgcaaaagtgatcgataccaagtccgaggaggagcttgaggattacatggtagagattgatatcctggcttcttgcgaccatcccaatatagtaaagctcctagacgctttctactacgaaaataatctctggatcttaatcgaattctgcgctgggggagctgtcgacgctgtgatgctggagctggaacgccctcttacagaatcccagatccaggtcgtatgcaagcagacgttagatgcgctgaattatctgcacgacaataaaataattcacagagacctgaaggccggaaatatacttttcacactggacggcgacataaaactcgcggattttggagtctctgcaaagaacacccgcaccatccagcgtcgcgattcctttatcggaaccccctattggatggcacccgaggtcgtgatgtgtgagactagtaaagatcgaccctacgactacaaggcagatgtctggagtttaggtataaccctgattgagatggctgaaattgaaccaccacaccatgaattaaatccgatgcgggttcttctgaaaattgcaaaaagtgaacctccaaccttagctcaacccagcaggtggtcttcaaatttcaaggactttctcaaaaagtgcctcgaaaaaaacgtcgacgccaggtggactacgtcacagcttctccagcatccttttgtcacagtggattccaacaagccaatccgggaactgattgcagaagctaaagccgaggtaactgaagaggtcgaggatggaaaggaagaggacgaggaagaagaaacagagaactcgcttcccatcccagctagcaaaagagcgtcctctgatctgtccatcgcttcgtctgaggaagataagctgtcacagaacgcctgcattctagagagtgtgtcagaaaagactgaacgtagcaacagtgaagataaattaaattcaaaaattctgaatgagaagccaacaactgacgagcctgaaaaggccgtcgaggatattaatgagcacattacagacgcacagttagaggccatgactgagctccatgaccgtactgccgtgattaaggagaacgagcgcgaaaaaaggcctaagcttgagaacctgcctgacaccgaggaccaagagaccgttgacatcaactccgtgagtgagggaaaggagaacaacatcatgatcacgctggagacaaacatcgaacataacctgaaaagcgaagaggagaaggaccaggaaaagcagcagatgttcgagaataagcttataaagagcgaagagatcaaagatacaattctacagacagttgatctagtgtctcaagagaccggcgagaaggaagccaatattcaggctgtcgactcggaggtagggctaactaaggaagacacacaggagaaactgggggaagatgacaagactcaaaaggacgtcatttcaaacacaagcgatgtaatcggaacttgtgaggccgcagatgtggctcaaaaggtggacgaagattcagcagaggacactcaatccaacgatgggaaagaagttgtggaagttggccaaaagctgattaacaaacccatggttggccctgaagcaggaggaaccaaagaggtacctattaaagaaattgtggagatgaatgaaattgaagaggggaagaacaaggagcaggccattaacagctccgaaaacattatggatatcaacgaggagccaggaactaccgagggcgaggaaattactgaatccagcagtaccgaagagatggaggtgagatcggttgtggcagacactgatcaaaaagcactcggatccgaagttcaagacgcctcaaaggttactacccagatagataaggaaaaaaaggaaatccccgtcagcatcaagaaggagcctgaggttactgttgtttcacagcccaccgagccccagccggtgctgattccctctataaatatcaatagtgacagtggagagaataaggaggaaatcggctcactttcgaagactgagaccattttgcctccggagagcgagaacccaaaagagaatgataacgattccggcactggctcaacagctgataccagctctatcgatctaaatcttagcatctctagttttctgtccaagacaaaagactctggttctatcagcctccaagagactcggcgacagaagaaaaccttaaagaagactaggaaatttatcgtggacggggtggaggtcagcgttacgaccagcaaaatcgtcacggacagtgatagtaagaccgaagaattgcgcttcctacgacgccaggaacttcgcgagctccgattccttcagaaagaggaacagagagcacaacaacagttaaactctaaattgcagcagcagcgcgaacagatttttcgccgttttgagcaggagatgatgagcaagaagagacagtacgaccaggagattgaaaatctagagaagcagcaaaaacagacaatcgagaggctggagcaggagcatactaacagattaagagacgaagctaaaagaatcaaaggagaacaggagaaggaactaagcaagtttcagaatatgttgaagaaccggaagaaagaagagcaagagttcgttcagaaacagcagcaagaactggacggatccctgaaaaaaatcattcagcagcagaaagctgaactggccaatatcgagagggaatgtctcaacaataaacagcaactgatgagggccagagaggccgctatttgggagctcgaggaaagacacctccaggaaaaacaccaactcctgaagcagcagttgaaggaccagtacttcatgcagagacatcagcttttgaagaggcatgaaaaggagacagagcagatgcagcgttataatcagagattgatcgaagaactgaagaatcggcagactcaagagagggcgaggctgcccaaaattcaaaggtctgaggctaagacccggatggcaatgttcaagaagtcccttaggattaattcaactgctacaccagaccaggatcgggacaagataaagcagtttgcggctcaggaggaaaaaaggcaaaagaatgaacgaatggcacagcatcaaaagcatgaaaaccagatgagagatctgcaactgcaatgcgaggcgaacgtcagggagttacaccagcttcagaatgaaaaatgtcacctgctggtcgaacacgaaacccagaagctcaaagaactggatgaagagcattcacaggagctcaaggaatggagggaaaagctccggccaaggaagaaaacactggaagaggaattcgcccgaaagctgcaggagcaggaagtgtttttcaaaatgaccggagagtccgagtgtttgaatccatcaacccagtccaggataagtaagttttatcccatcccttccctccactctacgggctcttag

SEQ ID NO: 116311 - DNA, 7673 bp, Artificial Sequence
  derived and/or modified sequence
gcggcggcggcgccccagacccgaggggacgcgcgggccttgcgccgcgggagcggacggcggcggaggagaccctaggctcgcggcccgaggcgggagggctcggcttctcgactgcccgcctccgaggccgccggccgcttctctctcccagagtggccgccgcccctggagactcgccgtgacacgggcctaagccgccgccgcgggagtcctgaccgctcggacccgtcggatcaggccgggtgggagcgagcttgcgggcaggtgccgctcccggagggtgggccggaggcgaggcgcccaccgcgcggctcgcgggccgggctcggcggaggggccgctcgcgcagcacccccaccgcgggccggagcccgggtcgccgccccgccttctcccgggaccgcccggccggagctgcgggggccgagggacgccgcgcccgccgccgccagccgggctcgcgcgggagagcagggaagagaaactttgccttttattgtttttagtccttaagtgcaaggaactctgtgttgggaggaaaaatgtccttcttcaatttccgtaagatcttcaagttggggagcgagaagaagaagaagcagtacgaacacgtgaagagggacctgaaccccgaagacttttgggagattataggagaactgggcgacggagcctttgggaaagtgtacaaggcccagaataaagagaccagtgttttagctgctgcaaaagtgattgacactaaatctgaagaagaacttgaagattacatggtagagattgacatattagcatcttgtgatcacccaaatatagtcaagcttctagatgccttctattatgagaacaatctttggatcctcattgaattttgtgcaggtggagcagtagatgctgtgatgcttgaacttgagagaccattaactgagtcccaaatacaagtagtttgcaagcagactttagatgcattgaactacttacatgataataagatcatccacagagatctgaaggctggcaacattctctttaccttagatggagatatcaaattggcggattttggagtatcagctaaaaacacgaggacaattcaaagaagagattcctttattggtacaccatattggatggctcctgaagtagtcatgtgtgaaacatctaaggacagaccctatgactacaaagctgatgtttggtccctgggtatcactttaatagaaatggctgagatagaaccacctcatcatgaattaaatccaatgcgagtgctgctaaaaatagcaaaatctgagccacctacattagcacagccatccagatggtcttcaaattttaaggactttctaaagaaatgcttagaaaagaatgtggatgccaggtggactacatctcagctgctgcagcatccctttgttactgttgattccaacaaacccatccgagaattgattgcagaggcgaaggctgaagtaacagaagaagttgaagatggcaaagaggaagatgaagaggaggaaacagaaaattctctgccaatacctgcaagtaagcgtgcatcttctgaccttagtatcgccagctctgaagaagataaactttcacaaaatgcttgtattttggagtctgtctcagaaaaaacagaacgtagtaactctgaagataaactcaacagcaaaattcttaatgaaaaacccaccactgatgaacctgaaaaggctgtggaggatattaatgaacatattaccgatgctcagttagaagcaatgactgaactccatgacagaacagcagtaatcaaggagaatgaaagagagaagaggcccaagcttgaaaatctgcctgacacagaagaccaagaaactgtggacattaattcagtcagtgaaggaaaagagaataatataatgataaccttagaaacaaatattgaacataatctaaaatctgaggaagaaaaggatcaggaaaagcaacagatgtttgaaaataagcttataaaatctgaagaaattaaagatactattttgcaaacagtagatttagtttctcaagagactggagaaaaagaggcaaatattcaggcagttgatagtgaagttgggcttacaaaggaagacacccaagagaaattgggggaagacgacaaaactcaaaaagatgtgatcagcaatacaagtgatgtgataggaacatgtgaggcagcagatgtggctcagaaagtggatgaagacagtgctgaggatacgcagagtaatgatgggaaagaagtggtcgaagtaggccagaaattaattaataagcccatggtgggtcctgaggctggtggtactaaggaagttcctattaaagaaatagttgaaatgaatgaaatagaagaaggtaaaaataaggaacaagcaataaacagttcagagaacataatggacatcaatgaggaaccaggaacaactgaaggtgaagaaatcactgagtcaagtagcactgaagaaatggaggtcagaagtgtggtggctgatactgaccaaaaggctttaggaagtgaagttcaggatgcttctaaagtcactactcagatagataaagagaaaaaagaaattccagtgtcaattaaaaaagagcctgaagttactgtagtttcacagcccactgaacctcagcctgttctaatacccagtattaatatcaactctgacagtggagaaaataaagaagaaataggttctttatcaaaaactgaaactattctgccaccagaatctgagaatccaaaggaaaatgataatgattcaggcactggttccactgctgatactagcagtattgacttgaatttatccatctctagctttctaagtaaaactaaagacagtggatcgatatctttacaagaaacaagaagacaaaagaaaacattgaagaaaacacgcaaatttattgttgatggtgtagaagtgagtgtaacaacatcaaagatagttacagatagtgattccaaaactgaagaattgcggtttcttagacgtcaggaacttcgggaattaagatttcttcagaaagaagagcaaagagcccaacaacagctcaatagcaaactacagcaacaacgagaacaaattttccggcgctttgagcaggaaatgatgagtaaaaagcgacaatatgaccaggaaattgagaatctagaaaaacagcagaaacagactatcgaacgcctggaacaagagcacacaaatcgcttgcgagatgaagccaaacgcatcaaaggagaacaagagaaagagttgtccaaatttcagaatatgctgaagaaccgaaagaaggaggaacaagagtttgttcagaaacaacagcaagaattagatggctctctgaaaaagatcatccagcagcagaaggcagagttagctaatattgagagagagtgcctgaataacaagcaacagctcatgagagctcgagaagctgcaatttgggagctcgaagaacgacacttacaagaaaaacaccagctgctcaaacagcagcttaaagatcagtatttcatgcaaagacatcagctacttaagcgccacgagaaggaaacagagcaaatgcagcgttacaatcaaagacttattgaggaattgaaaaacagacagactcaagaaagagcaagactgcccaagattcagcgcagtgaagccaagactcgaatggccatgtttaagaagagtttgagaattaactcaacagccacaccagatcaggaccgtgataaaattaaacagtttgctgcacaagaagaaaagaggcagaaaaatgagagaatggctcagcatcagaaacatgagaatcaaatgcgagatcttcagttgcagtgtgaagccaatgtccgcgaactgcatcagctgcagaatgaaaaatgccacttgttggttgagcatgagactcagaaactgaaggagttagatgaggaacatagccaagaattaaaggagtggagagagaaattgagacctaggaaaaagacactggaagaagagtttgccaggaaactacaggaacaggaagtattctttaaaatgactggggagtctgaatgccttaacccatcaacacagagccggatttccaaattttatcctattcccagcttgcattccaccggatcataacaaagggaagcattctgtgcgtgggtttggctctttcagtatgtcattctgttctcatcttctgccacagtctctcagatagctcatgaagacaatcacctgcctcaccttctaggtgttttccttttttgttttttttgttttgttttgtttttaagcaaagatgaagggaaaacgaactaagacagacgctaggccatgttggcaaagtagcatcttggtgactaaggtgactttgtatattcatcttaaaaattatgttctttagacactgctacctgaaaactgttggagaaataatgtttaaagttatttaagaaaaactgttacatcactaagtattaataaattcttcttacctgacgtaacttctcaatgcctaaattctgtagttgaagctctgctgcagagagttgggataattttcttttggtggatcagctctcataaaaaagctatgatttgctcaaatatgctgttgactcagtaaatgaatatatttttttctttaaataggaacaacctcttttaaaagagaaaaattatttcagtgatttgtcaaaacgaattacctcttttggcatgagctaataattgagggtgctaattttcttaagatagtgcctaaaacactaaatttcagtcaagtcgtaagtaggattttctttttgatcaacagggacaaaaacatctttagaattaaaaacatggttgttttggaatttttgcttctcttaccgtttgatagaaattttcatcctaaaatacatgtacaaagtttggaaagatgaaaaaaagaggtagcttttagattgcaaactggaaatgtaaaactcatgaaatttaagcaatataggtttagctatctgtgtttattttctaaaataatacctgagctggttaaatgatttctctccatcttagctaattctgtttaaaactctgtcagaggcctgcaggctgtgagttatatttataaatatatcttcagaaattaatcttaaaagaggcattagttcagaatacttttttaaaagtttaaattaaatatttaggcacgtcaggaattacttttccttattttgaaatgaggctacttatgtcttggttttattttgttccatgtttaaatcattcactttgatttgagtgggaaaagcctgaagcctttatcatgtggttgctggtgtgtgtaattattaatgaaatgttcactcctagtcccttatgaggcttagaatttcaaccacgtgtcaggtcagacagtattataaactgtactttgctgtctgagacagcacatttgtgaatgatgcttgctgcctgccattttcaacctattctctcttaagagtgctaggtaccaaattgtgaaagtttgttttcagttatattacttttgaggctggtgaaaaatttaaatgtaactttgtgggaacactgattcatatttagaaaatgtaaatgtctgtagcactttcttgcagttaatttgaaaactttggatgctgaaccttgtttgtcagtgatttagatgatttaaaaatgcatgtgtgatttgaattttataattgttttgacaagcataatttacttggacaacttcgtaggtagccttaacttctggccaagtttgttttttatataaatatatatacatatatacatattatgtatggttgtaaattcatacacttatcacatgaatgtgttactgtatacaaaactcttaatgctttattctcaaatgctgggttgaaaaatgttttgaaagccttttaaaatatatatctttataaagtaatattcaggatgatgataaaaattgtttatattgttatgataaaaatgacagtataatgttgcccagtgtatttaatgatttatttgaagagggattgggaaggaacgtcttcataccactttctcctttgaaattttcagtttattgacttttaaaaaatgaatacctcaggcagtagacattttttttctagtatcatttaattgataccctgtgcgctaaatagtgtgtggtgcctgattaatttggtctgaatatttgattctttctgttcctttcaacttgacattcagattattgactcaaggagagaggctcagagtggaatggttggcgctgtgggtaaggttggatctcccttaaaactgccttttggattcagtgtttgtgcttgagttcgctttcaaatatgaccataatcgtgtgggtgcaagactgtacagtgatacatatgtagaggtaaagcattcattttaatacttaaagttatataaatcttttcaaaaagtgttttgttataaaatacgctgtttgtacccataccagcccacctcttctgaggccctgtattcaaatagatgatagtgatctatctttcctgcatgaagtgtaggtggcgagtgggcgaggggcgcagacttctttgaaatcgaagggtacagtcaaatctactgctgatttggttgttttgttgctgtggcagaatatgccatgaaacacatacagacttctccgaacgtgcaccctcatcagccacctcctcccctctttccctgagtgctgtgaacacagcagacctgcacacttctgcagatccagctcctacagcttggggcactaggctgcctttcctagtcctgtcaacaaccatacagtgcgaattgctgaattagctgctattctatgtggagtcacattaagctttttcttatctttttctatggggaagctatagggtgggtaaggaaaaaatgttgaatgcttttactttgctgaaaatattagaactctcttgtgacaggatacagcaaattataattaaatataaattaccagaaccagagctacctctaagtcatacttcctcaagcacaaagctctcaggcatatgagacccaccttaatgaagggtctctgatttcttgagcatcagcgagtttcagaagtgactatttttttgtactcttctagtttccttgtaactatacactttttcccattccacactgtgcttaaatgacaaagactcttctgagaagccaaattctgtccaagtattaactagagatattgttgattaaagaaaatctagaactgaagtgaaagaagagagttccagttctaatagtcttttgattaacaattcttttctgagaaatgatttttataagaaatggggtgattctttaaatgcttttcttaagttgaaggcacaacagttaatggctgtattgttgctattccgttgctgacatgtttttgataaagctttaacattcctgctactaattttggcggagagtgtttgccaggtttcaatgtgggctgcagctttttgtgctccttctctggtttgcagtgtaatgagttcataagctaaattttcagaaagaattttgtttaagattatgcctcttatctacttgagagcaacatgtcttttcaatcatgggattgacacatgaaaaataaagttatttcttaatcaa

SEQ ID NO: 116312 - protein, 383 aa, Artificial Sequence
  derived and/or modified sequence
MQLGKRHKLTTKSVCHGKGVVIRVLALPGPSWVRRRREGKALESSRCARQPREERQPEDLGPPAVPWDSCPSGEEGGPRTMAAVHDLEMESMNLNMGREMKEELEEEEKMREDGGGKDRAKSKKVHRIVSKWMLPEKSRGTYLERANCFPPPVFIISISLAELAVFIYYAVWKPQKQWITLDTGILESPFIYSPEKREEAWRFISYMLVHAGVQHILGNLCMQLVLGIPLEMVHKGLRVGLVYLAGVIAGSLASSIFDPLRYLVGASGGVYALMGGYFMNVLVNFQEMIPAFGIFRLLIIILIIVLDMGFALYRRFFVPEDGSPVSFAAHIAGGFAGMSIGYTVFSCFDKALLKDPRFWIAIAAYLACVLFAVFFNIFLSPAN

SEQ ID NO: 116313 - protein, 370 aa, Artificial Sequence
  derived and/or modified sequence
MTTTYMLSKNPLEVFDICRFNTCNFGKALESSRCARQPREERQPEDLGPPAVPWDSCPSGEEGGPRTMAAVHDLEMESMNLNMGREMKEELEEEEKMREDGGGKDRAKSKKVHRIVSKWMLPEKSRGTYLERANCFPPPVFIISISLAELAVFIYYAVWKPQKQWITLDTGILESPFIYSPEKREEAWRFISYMLVHAGVQHILGNLCMQLVLGIPLEMVHKGLRVGLVYLAGVIAGSLASSIFDPLRYLVGASGGVYALMGGYFMNVLVNFQEMIPAFGIFRLLIIILIIVLDMGFALYRRFFVPEDGSPVSFAAHIAGGFAGMSIGYTVFSCFDKALLKDPRFWIAIAAYLACVLFAVFFNIFLSPAN

SEQ ID NO: 116314 - DNA, 1152 bp, Artificial Sequence
  derived and/or modified sequence
atgcagctgggcaagagacacaagctgaccaccaagagcgtgtgccacggcaagggcgtggtgatcagagtgctggccctgcccggccccagctgggtgagaagaagaagagagggcaaggccctggagagcagcagatgcgccagacagcccagagaggagagacagcccgaggacctgggcccccccgccgtgccctgggacagctgccccagcggcgaggagggcggccccagaaccatggccgccgtgcacgacctggagatggagagcatgaacctgaacatgggcagagagatgaaggaggagctggaggaggaggagaagatgagagaggacggcggcggcaaggacagagccaagagcaagaaggtgcacagaatcgtgagcaagtggatgctgcccgagaagagcagaggcacctacctggagagagccaactgcttccccccccccgtgttcatcatcagcatcagcctggccgagctggccgtgttcatctactacgccgtgtggaagccccagaagcagtggatcaccctggacaccggcatcctggagagccccttcatctacagccccgagaagagagaggaggcctggagattcatcagctacatgctggtgcacgccggcgtgcagcacatcctgggcaacctgtgcatgcagctggtgctgggcatccccctggagatggtgcacaagggcctgagagtgggcctggtgtacctggccggcgtgatcgccggcagcctggccagcagcatcttcgaccccctgagatacctggtgggcgccagcggcggcgtgtacgccctgatgggcggctacttcatgaacgtgctggtgaacttccaggagatgatccccgccttcggcatcttcagactgctgatcatcatcctgatcatcgtgctggacatgggcttcgccctgtacagaagattcttcgtgcccgaggacggcagccccgtgagcttcgccgcccacatcgccggcggcttcgccggcatgagcatcggctacaccgtgttcagctgcttcgacaaggccctgctgaaggaccccagattctggatcgccatcgccgcctacctggcctgcgtgctgttcgccgtgttcttcaacatcttcctgagccccgccaactag

SEQ ID NO: 116315 - DNA, 1113 bp, Artificial Sequence
  derived and/or modified sequence
atgaccaccacctacatgctgagcaagaaccccctggaggtgttcgacatctgcagattcaacacctgcaacttcggcaaggccctggagagcagcagatgcgccagacagcccagagaggagagacagcccgaggacctgggcccccccgccgtgccctgggacagctgccccagcggcgaggagggcggccccagaaccatggccgccgtgcacgacctggagatggagagcatgaacctgaacatgggcagagagatgaaggaggagctggaggaggaggagaagatgagagaggacggcggcggcaaggacagagccaagagcaagaaggtgcacagaatcgtgagcaagtggatgctgcccgagaagagcagaggcacctacctggagagagccaactgcttccccccccccgtgttcatcatcagcatcagcctggccgagctggccgtgttcatctactacgccgtgtggaagccccagaagcagtggatcaccctggacaccggcatcctggagagccccttcatctacagccccgagaagagagaggaggcctggagattcatcagctacatgctggtgcacgccggcgtgcagcacatcctgggcaacctgtgcatgcagctggtgctgggcatccccctggagatggtgcacaagggcctgagagtgggcctggtgtacctggccggcgtgatcgccggcagcctggccagcagcatcttcgaccccctgagatacctggtgggcgccagcggcggcgtgtacgccctgatgggcggctacttcatgaacgtgctggtgaacttccaggagatgatccccgccttcggcatcttcagactgctgatcatcatcctgatcatcgtgctggacatgggcttcgccctgtacagaagattcttcgtgcccgaggacggcagccccgtgagcttcgccgcccacatcgccggcggcttcgccggcatgagcatcggctacaccgtgttcagctgcttcgacaaggccctgctgaaggaccccagattctggatcgccatcgccgcctacctggcctgcgtgctgttcgccgtgttcttcaacatcttcctgagccccgccaactag

SEQ ID NO: 116316 - DNA, 1152 bp, Artificial Sequence
  derived and/or modified sequence
atgcaattagggaagcggcacaagctgaccacaaaatctgtgtgccatggtaaaggagtagttatcagggtattggccctgcctggcccttcttgggttagacggagacgagagggtaaagcactggagtcttccagatgtgcaaggcaacctcgggaggaacgacaaccagaggatttgggacctcctgcagtgccatgggactcctgcccttccggggaggaggggggacctcgcactatggcagctgtgcatgacctggagatggagtccatgaatcttaacatgggtcgagaaatgaaggaggaacttgaggaagaggaaaagatgagggaggacggggggggtaaggaccgggccaaatcgaaaaaggttcaccgcatcgtatctaaatggatgctcccagaaaaaagtaggggtacgtatctggagcgtgccaactgctttcctccaccggtgttcattatctcgatcagcctcgctgaacttgctgtttttatatattacgcggtgtggaaaccccagaaacaatggattacactcgacaccggcattctggagtccccctttatatactcccctgaaaagcgcgaagaggcatggaggttcatcagttatatgctggtacacgctggcgtccagcatattctgggaaacctttgcatgcagttggtacttggaatccccttggagatggtgcacaagggactcagagtggggttggtgtatctggctggtgtgattgccgggtctctcgcttccagtatctttgatccccttcgttacctggtgggagccagcggcggtgtgtatgctttgatgggcggatacttcatgaatgtgcttgttaattttcaggagatgatccccgcctttgggatcttccggctcctgatcatcatcctgatcattgtgttagacatggggttcgctctttacaggcgtttcttcgtccctgaagatggaagccctgtctccttcgccgctcacatcgccggaggattcgcaggaatgagcattggctacacggtcttttcatgcttcgataaggccctgctcaaggacccacgattttggattgccatcgctgcttacctggcctgcgtgctgtttgctgtattcttcaatatcttcctgagtcccgcaaactag

SEQ ID NO: 116317 - DNA, 1113 bp, Artificial Sequence
  derived and/or modified sequence
atgaccaccacatatatgctgagcaagaaccccctggaggtgtttgacatttgtcggtttaatacctgtaattttggtaaggcccttgagtccagtcggtgcgctcggcagcccagagaggagaggcagcctgaagatttagggccacctgccgttccttgggactcctgcccatccggtgaggaagggggcccgcggacaatggccgcagtgcatgacctggaaatggagtctatgaatctgaacatggggcgggaaatgaaggaagaacttgaggaggaagaaaagatgcgggaggatgggggaggaaaagacagggctaagtccaagaaggtccacaggatagtgtccaagtggatgctgccagagaaaagccgcgggacctaccttgaacgagccaattgctttccaccaccagtcttcattatctctatttcactggccgaactcgccgtgtttatttattacgccgtctggaagccccaaaagcagtggatcaccctggatacggggatcctcgaatccccatttatctacagccctgagaagcgcgaagaagcatggaggttcatcagctatatgctggtgcacgccggtgtgcaacacattctgggcaatctctgtatgcaactcgtcctgggaattccactggaaatggtgcataagggacttcgggtggggctggtgtacctggccggcgtcattgccggcagcctggcctcaagcatctttgacccactaaggtatctggtaggggcatccgggggcgtgtatgcccttatgggcggatatttcatgaacgtgctggtaaatttccaggagatgatacccgcattcgggatcttcaggttactcatcatcatcctgatcatagtgctggacatggggtttgccttgtatcgacggtttttcgtccccgaggacggcagtccggtgagcttcgccgcccacatagccggtggcttcgcaggtatgtctataggctatactgtgttttcatgttttgataaggcactccttaaggacccgcggttctggatcgctatcgcagcttatttggcctgtgtgttattcgccgtcttcttcaatatatttctatcaccagctaattag

SEQ ID NO: 116318 - DNA, 1152 bp, Artificial Sequence
  derived and/or modified sequence
atgcagctgggcaagaggcacaagctgaccaccaagtctgtgtgccacggcaagggcgtggtgatccgggtgctggccctgcccggccccagctgggtgagaagaagaagagagggcaaggccctggagagcagccgctgtgcccggcagccccgggaggagcggcagcctgaggacctgggccccccagctgtgccctgggacagctgccccagcggggaggagggcggccccaggaccatggctgctgtgcatgacctggagatggagagcatgaacctgaacatgggccgggagatgaaggaggagctggaggaggaggagaagatgagagaagatggcggcggcaaggaccgggccaagagcaagaaggtgcaccgcatcgtgtccaagtggatgctgcctgagaagagccggggcacctacctggagcgggccaactgcttccccccacctgtgttcatcatcagcatcagcctggccgagctggccgtgttcatctactatgctgtgtggaagccccagaagcagtggatcaccctggacaccggcatcctggagagccccttcatctacagccctgagaagcgggaggaggcctggaggttcatctcctacatgctggtgcatgctggggtgcagcacatcctgggcaacctgtgcatgcagctggtgctgggcatccccctggagatggtgcacaagggcctgcgggtgggcctggtgtacctggccggcgtgattgctggcagcctggccagcagcatctttgaccccctgcgctacctggtgggcgccagcggaggagtgtatgccctgatgggcggctacttcatgaatgtgctggtgaacttccaggagatgatcccagccttcggcatcttccggctgctgatcatcatcctgatcatcgtgctggacatgggctttgccctgtaccgccgcttctttgtgcctgaagatggcagccctgtgtcctttgctgcccacatcgccggcggctttgctggcatgagcatcggctacacagtgttcagctgctttgacaaggccctgctgaaggacccccgcttctggatcgccatcgccgcctacctggcctgtgtgctgtttgctgtgttcttcaacatcttcctgagccctgccaactag

SEQ ID NO: 116319 - DNA, 1113 bp, Artificial Sequence
  derived and/or modified sequence
atgaccaccacctacatgctgagcaagaaccccctggaggtgtttgacatctgccgcttcaacacctgcaactttgggaaggccctggagagcagccgctgtgcccggcagccccgggaggagcggcagcctgaggacctgggccccccagctgtgccctgggacagctgccccagcggggaggagggcggccccaggaccatggctgctgtgcatgacctggagatggagagcatgaacctgaacatgggccgggagatgaaggaggagctggaggaggaggagaagatgagagaagatggcggcggcaaggaccgggccaagagcaagaaggtgcacagaattgtgtccaagtggatgctgcctgagaagagccggggcacctacctggagcgggccaactgcttccccccacctgtgttcatcatcagcatcagcctggccgagctggccgtgttcatctactatgctgtgtggaagccccagaagcagtggatcaccctggacaccggcatcctggagagccccttcatctacagccctgagaagcgggaggaggcctggaggttcatctcctacatgctggtgcacgccggcgtgcagcacatcctgggcaacctgtgcatgcagctggtgctgggcatccccctggagatggtgcacaagggcctgcgggtgggcctggtgtacctggccggcgtgattgctggcagcctggccagcagcatctttgaccccctgcgctacctggtgggcgccagcggcggcgtgtatgccctgatgggcggctacttcatgaatgtgctggtgaacttccaggagatgatcccagccttcggcatcttccggctgctgatcatcatcctgatcatcgtgctggacatgggctttgccctgtaccgccgcttctttgtgcctgaagatggcagccctgtgtcctttgctgcccacatcgccggcggctttgctggcatgagcatcggctacaccgtcttcagctgctttgacaaggccctgctgaaggacccccgcttctggatcgccatcgccgcctacctggcctgtgtgctgtttgctgtgttcttcaacatcttcctgagccctgccaactag

SEQ ID NO: 116320 - DNA, 1152 bp, Artificial Sequence
  derived and/or modified sequence
atgcagctgggcaagcggcacaagctgaccaccaagagcgtgtgccacggcaagggggttgtaatcagagtcctggccctgccaggccctagttgggtgcgtcggaggcgtgagggtaaggccttggaatcttctcgctgcgccagacaacctcgcgaagagaggcagccagaagacttggggcctccggcagtcccttgggactcttgcccgtcaggcgaagaaggcgggccaagaaccatggccgcagttcatgaccttgaaatggaaagcatgaacttgaacatggggagggagatgaaagaagaattagaagaggaggagaagatgcgggaagacggagggggtaaggatagagcgaagagcaagaaggtccacagaatcgtctccaaatggatgttgccggagaagtctagagggacctacctagagagggccaattgctttcccccccccgtattcattatatctatcagtctagctgagctcgctgtcttcatttactacgcagtttggaaaccccagaagcaatggattactctggacaccggaatcctggaatccccctttatttatagcccggagaaaagggaagaggcctggagatttatcagctatatgttggtgcacgccggagtgcaacacattcttggaaacctgtgtatgcagctggtgttgggcattccactcgagatggtacacaagggattgcgggtgggcctggtgtatctggctggtgttatagccgggtctctggcctctagcatcttcgaccctcttcgttacctcgtgggagcaagcggaggcgtgtacgcactgatgggtggatatttcatgaatgttctcgtgaatttccaagagatgattcctgcgtttggaatcttccgattacttatcattattctgatcattgtgttagatatgggattcgccctgtacagacgcttcttcgtgcccgaagatgggagtcccgtgtcctttgccgctcatattgccggcggctttgccggtatgagtattggatacaccgtcttctcttgctttgataaagctcttctaaaggatccacggttctggatcgcaattgctgcttatctggcatgtgtgcttttcgcagtctttttcaatattttcttgagtcctgccaattag

SEQ ID NO: 116321 - DNA, 1113 bp, Artificial Sequence
  derived and/or modified sequence
atgaccaccacctacatgctgagcaagaaccccctggaggtgttcgatatctgccgatttaatacttgtaactttggtaaagcccttgagtcgagtcggtgcgctagacagccccgggaggagcggcagcctgaggatttaggccctcccgctgtcccctgggactcgtgtccaagcggagaagagggcgggccccggaccatggcagcagttcacgatctggaaatggaatcaatgaacctaaacatggggcgcgaaatgaaggaagaacttgaagaggaagagaaaatgcgtgaggacggcggcggaaaggacagggccaagtccaaaaaggtacacagaatagtatctaaatggatgctccccgaaaagtctaggggtacatacctggagcgcgcaaattgttttcctccaccagtcttcattatctccatctcattggcagagctggcggtgtttatatattatgcagtgtggaagccacagaagcagtggattacactagatactgggattctggagtcaccttttatctatagtccagaaaaacgagaggaggcttggcggtttataagctacatgctggtccacgcgggggttcagcatatactcggaaacttgtgtatgcagttggtgctcgggatacctctggagatggtgcacaagggtttacgagtgggactcgtgtatcttgccggagtcattgctgggagcctcgcaagtagcatttttgatccactgcggtatctggtgggcgcctccgggggtgtgtacgcacttatgggggggtactttatgaatgtgctggtgaatttccaggagatgatccctgcctttggaatttttaggctgttgataattatcctgatcatcgtgctcgatatggggttcgccctgtatcgtcggttctttgtccccgaagatggcagcccagtgtccttcgccgcgcatatcgctgggggatttgcaggcatgtccatcggatacaccgttttctcttgttttgacaaagccttgcttaaagacccacgcttttggattgcaattgccgcctatcttgcttgcgtgctctttgctgtgttcttcaacatcttcctaagccctgcaaattag

SEQ ID NO: 116322 - DNA, 1152 bp, Artificial Sequence
  derived and/or modified sequence
atgcagctcggcaagcggcataaactgaccacaaagtctgtgtgtcacggaaaaggcgtggttatccgcgtgctcgccctgccaggcccaagttgggtgagacgcagacgagagggcaaggccctggagtcaagcaggtgcgctcgacagcccagagaggagagacagccagaggacctgggaccgccagctgtgccatgggatagttgcccgtcaggtgaagaaggcggaccacggacaatggctgccgtgcacgacttggagatggagtctatgaatctgaatatgggacgggagatgaaagaagagttggaagaagaggaaaagatgcgagaggatggcggtggtaaagatcgggcaaagagcaagaaggtacatcgaatcgtcagcaaatggatgctgcccgagaaatcacgaggcacatatctggagcgcgcaaattgctttcctccacctgtgttcatcatcagtatttctctggcagaactggcagtctttatttattatgctgtttggaagccgcagaagcagtggataaccctagacactgggattcttgagtccccctttatttacagcccagaaaaacgcgaagaggcttggagatttatttcctatatgttagtccacgccggagtgcagcatatcctgggaaatttatgcatgcaactggttctgggaattccactcgagatggtacacaagggtctccgcgtcggcctggtgtacctcgccggagttatcgccggatccctcgcatcgtcaattttcgacccgctacgttatctcgtgggcgcaagcgggggagtgtacgctctcatgggcggatacttcatgaatgtacttgtgaactttcaggaaatgattccagcttttgggattttccggctgttaatcattatcctaattatcgtgctggatatggggtttgccctgtacagacgctttttcgtgcccgaagatggctccccagtatcttttgcagcccatatcgccggagggtttgcaggtatgtctattggctataccgttttctcctgtttcgataaggcgttacttaaagatccacgcttctggatagcaatcgcagcctatctcgcctgcgtcctcttcgcagtattctttaatatttttctgtctcctgcaaattag

SEQ ID NO: 116323 - DNA, 1113 bp, Artificial Sequence
  derived and/or modified sequence
atgaccactacatatatgttatctaaaaatcccctcgaagtctttgatatttgtcggtttaacacttgcaattttggaaaggccctggaaagcagcaggtgtgctaggcaaccacgtgaagagcgtcagcctgaagacctcggcccaccagccgtgccctgggattcttgtccatctggagaggaaggaggccctaggacaatggctgccgtgcatgaccttgagatggagagtatgaatctgaacatgggaagagaaatgaaagaagagctcgaggaggaagaaaagatgcgcgaagacgggggaggtaaggatcgcgctaagtccaagaaggtccaccgaatagtgagcaaatggatgttgcctgagaaatcaagaggaacataccttgagcgagccaattgcttcccacctcccgtctttataatctcgatttcccttgctgagttggcagtctttatttactacgctgtatggaaacctcagaagcagtggatcacacttgatacagggattttggagagtccctttatttacagtccagagaagcgagaagaggcgtggaggtttatctcatatatgctggtgcacgccggagtgcagcacatcctgggtaatctgtgcatgcagctggtgttaggtatacccttggaaatggtccacaagggcttgcgcgtcgggctagtgtacctagccggtgtgattgctgggtctttagctagctcaatcttcgaccccctgagatacttagtgggcgcatcaggtggggtgtatgcactcatggggggatattttatgaacgttttagtcaatttccaagagatgattcccgcattcggtattttccgactactgataatcattctcatcattgtgctggacatgggtttcgcactgtatcgtcgattttttgtgcccgaagatggtagcccagtgtccttcgctgcccatattgccggaggttttgcaggtatgtccatcggctacacagttttctcctgtttcgacaaagccctgctgaaggatccccgtttttggatcgctatcgccgcatacttggcgtgtgtactttttgcggtgttctttaacatcttcctctctcccgctaattag

SEQ ID NO: 116324 - DNA, 2129 bp, Artificial Sequence
  derived and/or modified sequence
gatagggtctcgctttatcactcaggatggagtgtagtgccacgatcttggctcactgcaacctccacctcccgggttcaagcgattctcctgcctcagcatccccagtagctgggattaaaggcatctgccacctcacctggctaattttttgggtacttttcgtagagatggggttttaccatgttggtcaggctggtctcgaatgcccgacctcaggtgatccgcccgcctctgcctcccaaagtgctgggattataggcgtgagccaccgcgccctgcccgagtcaggtttttttattgcaaaagatgggaactgattctggctaattaaatcaggaaatgaattttattgaaagcacattgagtaagttacagaatcacttgaaggctgtagaaacaaggcttgggaaaaaagcagaaacagagaccaggtacctagaattacaccaaattccatcacagagccagataggtgaggacagcctcagtgctgctgctgctgaacgcccagtgctgctgcctttgtcacagccacagctggcgttggatgctggatgccatgctgaccccagtggcaaggcgtctggacactggatactgctgccactgctgcaaccactgtaaagaattttttccatcctcacctccagcctcagaaatcctaagcaaatgcagctgattggtcaagctgccctagctgcctagggacatgcaaaagtgaatattgggcatggttaatgtctgtagtgggatccgtttcctgctgcccaccaggagaagataaattccccaagaaaactgacaaatgacgactacgtacatgttgtcaaagaatccactggaagtctttgacatttgcagattcaacacttgcaattttggaaaggccttggaaagcagtcgttgcgccagacagcccagggaagagcggcagcctgaggacctagggccacctgctgttccctgggattcatgtccttctggggaggagggaggacccaggacaatggctgctgttcatgatctggagatggagagcatgaatctgaatatggggagagagatgaaagaagagctggaggaagaggagaaaatgagagaggatgggggaggtaaagatcgggccaagagtaaaaaggtccacaggattgtctcaaaatggatgctgcccgaaaagtcccgaggaacatacttggagagagctaactgcttcccgcctcccgtgttcatcatctccatcagcctggccgagctggcagtgtttatttactatgctgtgtggaagcctcagaaacagtggatcacgttggacacaggcatcttggagagtccctttatctacagtcctgagaagagggaggaagcctggaggtttatctcatacatgctggtacatgctggagttcagcacatcttggggaatctttgtatgcagcttgttttgggtattcccttggaaatggtccacaaaggcctccgtgtggggctggtgtacctggcaggagtgattgcagggtcccttgccagctccatctttgacccactcagatatcttgtgggagcttcaggaggagtctatgctctgatgggaggctattttatgaatgttctggtgaattttcaagaaatgattcctgcctttggaattttcagactgctgatcatcatcctgataattgtgttggacatgggatttgctctctatagaaggttctttgttcctgaagatgggtctccggtgtcttttgcagctcacattgcaggtggatttgctggaatgtccattggctacacggtgtttagctgctttgataaagcactgctgaaagatccaaggttttggatagcaattgctgcatatttagcttgtgtcttatttgctgtgtttttcaacattttcctatctccagcaaactgacctgcccctattgtaagtcaattaataaaaagagccatctggaggaaataaaaaaaaaaggaagactctatgaagaaacagagaagtctcagaaaaggctaacaattttatatagaggacaaaacagcattaaactcatcagttgcaaagattgcctataaaaggaccttaggatttaaggaaggggcttcttaatgtagaaagggaa

SEQ ID NO: 116325 - DNA, 1286 bp, Artificial Sequence
  derived and/or modified sequence
ttgaatgcagctaggcaagcggcacaagctcacaactaaaagtgtctgccatggaaaaggagttgtcataagggtgttggccttgccagggccttcctgggtgaggcgaagaagggaaggaaaggccttggaaagcagtcgttgcgccagacagcccagggaagagcggcagcctgaggacctagggccacctgctgttccctgggattcatgtccttctggggaggagggaggacccaggacaatggctgctgttcatgatctggagatggagagcatgaatctgaatatggggagagagatgaaagaagagctggaggaagaggagaaaatgagagaggatgggggaggtaaagatcgggccaagagtaaaaaggtccacaggattgtctcaaaatggatgctgcccgaaaagtcccgaggaacatacttggagagagctaactgcttcccgcctcccgtgttcatcatctccatcagcctggccgagctggcagtgtttatttactatgctgtgtggaagcctcagaaacagtggatcacgttggacacaggcatcttggagagtccctttatctacagtcctgagaagagggaggaagcctggaggtttatctcatacatgctggtacatgctggagttcagcacatcttggggaatctttgtatgcagcttgttttgggtattcccttggaaatggtccacaaaggcctccgtgtggggctggtgtacctggcaggagtgattgcagggtcccttgccagctccatctttgacccactcagatatcttgtgggagcttcaggaggagtctatgctctgatgggaggctattttatgaatgttctggtgaattttcaagaaatgattcctgcctttggaattttcagactgctgatcatcatcctgataattgtgttggacatgggatttgctctctatagaaggttctttgttcctgaagatgggtctccggtgtcttttgcagctcacattgcaggtggatttgctggaatgtccattggctacacggtgtttagctgctttgataaagcactgctgaaagatccaaggttttggatagcaattgctgcatatttagcttgtgtcttatttgctgtgtttttcaacattttcctatctccagcaaactgacctgcccctattgtaagtcaattaataaaaagagccatctggaggaaataaaaaaaaaaggaagactctatgaagaaacagagaagtctcagaaaaggctaacaattttatatagaggacaaaacagcat

SEQ ID NO: 116326 - DNA, 1837 bp, Artificial Sequence
  derived and/or modified sequence
agagcgggatcttcagggcagcgggcaaccccttggcccaggaagcctggaacgcaaggaccggagggcgtgggctgggacgcccctaccttggtctttcagggaaaggccttggaaagcagtcgttgcgccagacagcccagggaagagcggcagcctgaggacctagggccacctgctgttccctgggattcatgtccttctggggaggagggaggacccaggacaatggctgctgttcatgatctggagatggagagcatgaatctgaatatggggagagagatgaaagaagagctggaggaagaggagaaaatgagagaggatgggggaggtaaagatcgggccaagagtaaaaaggtccacaggattgtctcaaaatggatgctgcccgaaaagtcccgaggaacatacttggagagagctaactgcttcccgcctcccgtgttcatcatctccatcagcctggccgagctggcagtgtttatttactatgctgtgtggaagcctcagaaacagtggatcacgttggacacaggcatcttggagagtccctttatctacagtcctgagaagagggaggaagcctggaggtttatctcatacatgctggtacatgctggagttcagcacatcttggggaatctttgtatgcagcttgttttgggtattcccttggaaatggtccacaaaggcctccgtgtggggctggtgtacctggcaggagtgattgcagggtcccttgccagctccatctttgacccactcagatatcttgtgggagcttcaggaggagtctatgctctgatgggaggctattttatgaatgttctggtgaattttcaagaaatgattcctgcctttggaattttcagactgctgatcatcatcctgataattgtgttggacatgggatttgctctctatagaaggttctttgttcctgaagatgggtctccggtgtcttttgcagctcacattgcaggtggatttgctggaatgtccattggctacacggtgtttagctgctttgataaagcactgctgaaagatccaaggttttggatagcaattgctgcatatttagcttgtgtcttatttgctgtgtttttcaacattttcctatctccagcaaactgacctgcccctattgtaagtcaattaataaaaagagccatctggaggaaataaaaaaaaaaggaagactctatgaagaaacagagaagtctcagaaaaggctaacaattttatatagaggacaaaacagcattaaactcatcagttgcaaagattgcctataaaaggaccttaggatttaaggaaggggcttcttaatgtagaaagggaagaagaagagagaaaagaagggtagtaaaaactagagattggggccaggcgcagtggctcacgcctgtaatcccagcactttgggaggctgaggcgggtgaaatcacctgaggtcatgagttcaagaccagcctgaccaatatggtgaaaccctgtctctactaaagaaaatacaaaaattagccgggcgtggtggcgtgtgcctgtagtcccagctacttgcgaggctgaggcaggagaattgcttgaacctgggaggcgaaggttgcagtgagccgagattgcgccactgcactccagcctgggtgacagagcgacactcggtctcaaaaaacaaaacaaaacaaaacaaaattagagattgggtctttcccaggcatatggtattctataaaacagacttactctccttggaggatatattttggagaatgcttcataaaatctatgaatactgtacaatgctgataataaaaactttttatacctg

SEQ ID NO: 116327 - DNA, 2118 bp, Artificial Sequence
  derived and/or modified sequence
gatagggtctcgctttatcactcaggatggagtgtagtgccacgatcttggctcactgcaacctccacctcccgggttcaagcgattctcctgcctcagcatccccagtagctgggattaaaggcatctgccacctcacctggctaattttttgggtacttttcgtagagatggggttttaccatgttggtcaggctggtctcgaatgcccgacctcaggtgatccgcccgcctctgcctcccaaagtgctgggattataggcgtgagccaccgcgccctgcccgagtcaggtttttttattgcaaaagatgggaactgattctggctaattaaatcaggaaatgaattttattgaaagcacattgagtaagttacagaatcacttgaaggctgtagaaacaaggcttgggaaaaaagcagaaacagagaccaggtacctagaattacaccaaattccatcacagagccagataggtgaggacagcctcagtgctgctgctgctgaacgcccagtgctgctgcctttgtcacagccacagctggcgttggatgctggatgccatgctgaccccagtggcaaggcgtctggacactggatactgctgccactgctgcaaccactgtaaagaattttttccatcctcacctccagcctcagaaatcctaagcaaatgcagctgattggtcaagctgccctagctgcctagggacatgcaaaagtgaatattgggcatggttaatgtctgtagtgggatccgtttcctgctgcccaccaggagaagataaattccccaagaaaactgacaaatgacgactacgtacatgttgtcaaagaatccactggaagtctttgacatttgcagattcaacacttgcaattttggaaaggccttggaaagcagtcgttgcgccagacagcccagggaagagcggcagcctgaggacctagggccacctgctgttccctgggattcatgtccttctggggaggagggaggacccaggacaatggctgctgttcatgatctggagatggagagcatgaatctgaatatggggagagagatgaaagaagagctggaggaagaggagaaaatgagagaggatgggggaggtaaagatcgggccaagagtaaaaaggtccacaggattgtctcaaaatggatgctgcccgaaaagtcccgaggaacatacttggagagagctaactgcttcccgcctcccgtgttcatcatctccatcagcctggccgagctggcagtgtttatttactatgctgtgtggaagcctcagaaacagtggatcacgttggacacaggcatcttggagagtccctttatctacagtcctgagaagagggaggaagcctggaggtttatctcatacatgctggtacatgctggagttcagcacatcttggggaatctttgtatgcagcttgttttgggtattcccttggaaatggtccacaaaggcctccgtgtggggctggtgtacctggcaggagtgattgcagggtcccttgccagctccatctttgacccactcagatatcttgtgggagcttcaggaggagtctatgctctgatgggaggctattttatgaatgttctggtgaattttcaagaaatgattcctgcctttggaattttcagactgctgatcatcatcctgataattgtgttggacatgggatttgctctctatagaaggttctttgttcctgaagatgggtctccggtgtcttttgcagctcacattgcaggtggatttgctggaatgtccattggctacacggtgtttagctgctttgataaagcactgctgaaagatccaaggttttggatagcaattgctgcatatttagcttgtgtcttatttgctgtgtttttcaacattttcctatctccagcaaactgacctgcccctattgtaagtcaattaataaaaagagccatctggaggaaataaaaaaaaaaggaagactctatgaagaaacagagaagtctcagaaaaggctaacaattttatatagaggacaaaacagcattaaactcatcagttgcaaagattgcctataaaaggaccttaggatttaaggaaggggcttcttaatg

SEQ ID NO: 116328 - protein, 256 aa, Artificial Sequence
  derived and/or modified sequence
MPPAQGYEFAAAKGPRDELGPSFPMASPPGLELKTLSNGPQAPRRSAPLGPVAPTREGVENACFSSEEHETHFQNPGNTRLGSSPSPPGGVSSLPRSQRDDLSLHSEEGPALEPVSRPVDYGFVSALVFLVSGILLVVTAYAIPREARVNPDTVTAREMERLEMYYARLGSHLDRCIIAGLGLLTVGGMLLSVLLMVSLCKGELYRRRTFVPGKGSRKTYGSINLRMRQLNGDGGQALVENEVVQVSETSHTLQRS

SEQ ID NO: 116329 - protein, 154 aa, Artificial Sequence
  derived and/or modified sequence
MPPAQGYEFAAAKGPRDELGPSFPMASPPGLELKTLSNGPQAPRRSAPLGPVAPTREGVENACFSSEEHETHFQNPGNTRLGSSPSPPGGVSSLPRSQRDDLSLHSEEGPALEPVSRPVDYGFVSALVFLVSGILLVVTAYAIPREARVNPDTV

SEQ ID NO: 116330 - DNA, 771 bp, Artificial Sequence
  derived and/or modified sequence
atgccccccgcccagggctacgagttcgccgccgccaagggccccagagacgagctgggccccagcttccccatggccagcccccccggcctggagctgaagaccctgagcaacggcccccaggcccccagaagaagcgcccccctgggccccgtggcccccaccagagagggcgtggagaacgcctgcttcagcagcgaggagcacgagacccacttccagaaccccggcaacaccagactgggcagcagccccagcccccccggcggcgtgagcagcctgcccagaagccagagagacgacctgagcctgcacagcgaggagggccccgccctggagcccgtgagcagacccgtggactacggcttcgtgagcgccctggtgttcctggtgagcggcatcctgctggtggtgaccgcctacgccatccccagagaggccagagtgaaccccgacaccgtgaccgccagagagatggagagactggagatgtactacgccagactgggcagccacctggacagatgcatcatcgccggcctgggcctgctgaccgtgggcggcatgctgctgagcgtgctgctgatggtgagcctgtgcaagggcgagctgtacagaagaagaaccttcgtgcccggcaagggcagcagaaagacctacggcagcatcaacctgagaatgagacagctgaacggcgacggcggccaggccctggtggagaacgaggtggtgcaggtgagcgagaccagccacaccctgcagagaagctag

SEQ ID NO: 116331 - DNA, 465 bp, Artificial Sequence
  derived and/or modified sequence
atgccccccgcccagggctacgagttcgccgccgccaagggccccagagacgagctgggccccagcttccccatggccagcccccccggcctggagctgaagaccctgagcaacggcccccaggcccccagaagaagcgcccccctgggccccgtggcccccaccagagagggcgtggagaacgcctgcttcagcagcgaggagcacgagacccacttccagaaccccggcaacaccagactgggcagcagccccagcccccccggcggcgtgagcagcctgcccagaagccagagagacgacctgagcctgcacagcgaggagggccccgccctggagcccgtgagcagacccgtggactacggcttcgtgagcgccctggtgttcctggtgagcggcatcctgctggtggtgaccgcctacgccatccccagagaggccagagtgaaccccgacaccgtgtag

SEQ ID NO: 116332 - DNA, 771 bp, Artificial Sequence
  derived and/or modified sequence
atgccacccgcgcagggatatgaattcgctgccgctaaggggccccgggacgagcttggaccatctttccctatggcaagcccccccggtctcgagttgaaaactctgagtaatggacctcaggcccctcgaagaagcgcccctctgggtccagtcgccccgactagagagggggtcgaaaatgcttgttttagcagcgaagagcacgagactcacttccagaaccctgggaacactcgattggggagcagtccctcaccaccaggtggagtgtcttccttgcctcggtcccagcgcgatgacctgtcccttcactcagaggaggggcctgcactggaaccagtgtcgcggcccgtggattacggatttgtgtctgcactcgtgtttctagtctccggcatccttctggtcgtgacagcatacgccattcccagagaagctagggtgaatccagatacagtaaccgcacgggagatggaacggctagagatgtattatgccagactcggaagccatctggaccggtgtattatagctgggttggggctgttaactgtaggcggaatgttgctgagtgtgttactgatggtctcactgtgcaagggtgagctttatcggaggaggacatttgtgcctggcaagggcagcagaaagacttacggctccatcaatctgcgcatgcgacagttgaatggcgatggtggccaggcattggtcgagaacgaggttgtccaagtgagtgaaaccagtcatacgctgcagagatcttag

SEQ ID NO: 116333 - DNA, 465 bp, Artificial Sequence
  derived and/or modified sequence
atgccacccgcgcagggttacgagtttgctgcagctaagggaccgcgggatgagttaggccctagcttccccatggcttctcccccgggactcgagttgaaaacactgtctaatggaccgcaagccccccggcgctcagccccgctgggaccagtggcgccgaccagagaaggagtggaaaatgcgtgcttctcgagcgaagaacacgagacccatttccagaacccaggaaacacaaggctgggctcaagcccgtctccaccaggcggggtttcgtcattacccagaagtcagcgagacgacctcagcctccatagcgaggaaggccccgcactggagccagtgtcacggccagtggattacggatttgtgagcgcactagtcttccttgtgtccggcatcctactcgtggtgaccgcctacgcaataccacgagaggcacgcgtgaatcccgacaccgtgtag

SEQ ID NO: 116334 - DNA, 771 bp, Artificial Sequence
  derived and/or modified sequence
atgcccccagcccagggctatgaatttgctgctgccaagggccccagagatgagctgggccccagcttccccatggccagccccccaggcctggagctgaagaccctgagcaatggcccccaggccccccggcgcagcgcccccctgggccctgtggcccccacccgggagggcgtggagaatgcctgcttcagcagcgaggagcacgagacccacttccagaaccctggcaacacccggctgggcagcagccccagccccccaggcggcgtgagcagcctgcccaggagccagagagatgacctgagcctgcacagcgaggagggccctgccctggagcctgtgtccaggcctgtggactatggctttgtgtctgccctggtgttcctggtgtctggcatcctgctggtggtgacagcctatgccatcccccgggaggcccgggtgaacccagacacagtgacagcccgggagatggagcggctggagatgtactatgcccggctgggcagccacctggaccgctgcatcatcgccggcctgggcctgctgactgtgggcggcatgctgctgtctgtgctgctgatggtgtccctgtgcaagggggagctgtacagaagaaggacctttgtgcctgggaagggcagcaggaagacctacggcagcatcaacctgaggatgaggcagctgaatggagatggcggccaggccctggtggagaatgaggtggtgcaggtgtctgagaccagccacaccctgcagaggagctag

SEQ ID NO: 116335 - DNA, 465 bp, Artificial Sequence
  derived and/or modified sequence
atgcccccagcccagggctatgaatttgctgctgccaagggccccagagatgagctgggccccagcttccccatggccagccccccaggcctggagctgaagaccctgagcaatggcccccaggccccccggcgcagcgcccccctgggccctgtggcccccacccgggagggcgtggagaatgcctgcttcagcagcgaggagcacgagacccacttccagaaccctggcaacacccggctgggcagcagccccagccccccaggcggcgtgagcagcctgcccaggagccagagagatgacctgagcctgcacagcgaggagggccctgccctggagcctgtgtccaggcctgtggactatggctttgtgtctgccctggtgttcctggtgtctggcatcctgctggtggtgacagcctatgccatcccccgggaggcccgggtgaacccagacacagtgtag

SEQ ID NO: 116336 - DNA, 771 bp, Artificial Sequence
  derived and/or modified sequence
atgccccccgcccagggctacgagttcgccgccgccaagggccccagggacgagctcggccctagtttcccgatggcaagccccccagggctagaactgaaaacactctcaaacggcccccaggcgcctagaagatcagcacccctgggtcctgtggctcccacacgcgaaggagtagagaatgcatgtttttcatccgaggagcatgagacacactttcagaatcctgggaatacaaggttagggagcagcccatctccacccggcggcgtctcttccctgccacggtcccagagggatgatctttcgcttcattccgaggaaggccctgctcttgagcctgtatctcgtccggtcgactatggcttcgtaagcgcactcgtgttcttggttagcggcatactgctcgttgtgacggcctacgctatccctcgagaggctagagtgaaccccgataccgttactgcacgggaaatggaacggcttgagatgtattatgcccgcctaggttctcacctagataggtgtatcattgctggcttaggcttgctgacggtggggggtatgctgctcagcgttttgctgatggtgtccctctgcaaaggtgagttgtaccgaagacgtaccttcgtgcctggcaagggaagtcggaaaacctatggctccatcaacttgaggatgagacaacttaacggggatgggggtcaagcacttgtagagaacgaagtcgtgcaggtgtctgagaccagccataccttgcagagaagctag

SEQ ID NO: 116337 - DNA, 465 bp, Artificial Sequence
  derived and/or modified sequence
atgccccccgcccagggctacgagttcgccgccgccaagggccccagggatgagcttggacctagttttcctatggctagtccccccggtctcgagctgaagaccctctcaaacggaccccaagcccccagaagatctgcgcctctcggccctgtagcccctactcgggaaggagttgaaaacgcctgtttctcgtctgaagagcacgaaacacatttccagaaccccggtaatactaggctcggatcctcccccagcccacccggcggggtctcctccctcccccgatcccaaagggatgacctgtcactccactctgaggaagggccagctctagaacccgtttctaggcctgtggactatggatttgttagcgcactagttttcttagtgagtggcatcttactggtagtgactgcatatgccattccccgggaggcaagggtgaaccccgacactgtttag

SEQ ID NO: 116338 - DNA, 771 bp, Artificial Sequence
  derived and/or modified sequence
atgcctcctgcccaggggtatgagttcgcagccgcaaaggggcctcgcgacgagctggggccaagctttccaatggccagccctccagggttggagctcaagactctttcaaacggcccacaagcaccccgtaggtctgctcctttggggccagtagcacccacacgcgaaggggtcgagaacgcctgcttttcaagcgaagaacatgagactcactttcagaatcccggtaacacgaggctcggtagctctccgtcacctcccggtggcgtgagtagcttacctagaagccaacgggacgatctctcgttacacagcgaagaggggccagctctggaacccgtgtcccgccctgtggactacggcttcgtgtctgcacttgtctttctcgtgtccggcattttgttggtcgtaaccgcatacgccattccacgagaagccagagttaatcctgataccgtaaccgcgagggaaatggagcggctggagatgtattacgccagattagggtcacacctcgaccgctgcatcatagccggattagggctgctcacggtggggggaatgttgcttagcgtactgctgatggtatcactctgtaagggtgagttgtatcggcgtagaacttttgtgcctggtaagggatcacgcaaaacctatggcagcattaacctgagaatgagacagctgaacggggatggcggacaagccctggttgaaaacgaggtggtacaggtctcagaaacaagtcacaccctacagagatcttag

SEQ ID NO: 116339 - DNA, 465 bp, Artificial Sequence
  derived and/or modified sequence
atgccgccagcacagggatatgaattcgcggctgcaaaaggcccaagggatgagctgggtccctcatttcccatggccagcccacccggtctagagttaaagactctttctaacggaccacaggccccacgccgatcagcccctctcggacctgtggcccctactcgagaaggagtggaaaatgcctgcttcagctccgaagaacatgagacccacttccaaaatccgggtaacactagattaggtagctccccgtctccccctgggggagtcagcagtctgccgcgaagtcagagggacgatttgtcattacattctgaggagggcccagccctcgagcccgtttcaaggcctgtcgattatgggtttgtctccgccctcgtgtttttagtctccggcatcttacttgttgtaaccgcctacgcaattcctagggaggctagagttaaccccgacactgtatag

SEQ ID NO: 116340 - DNA, 1730 bp, Artificial Sequence
  derived and/or modified sequence
gactgcagatgaaattagtaactggtggggtcgtggggtgtgaatggtgggcgggagcagctatgtcagttggtgtgtttctgcttatgttagggtaattgggcacggcctttgtgtaactggtgaatatctctgaacctgggcatgaaacagagagatgtcctaactctgggtgagaggaatcctcatttttctctgccctctcactgtggcatcctaagaaaaaagttttgggttcctgcagcatgaaggagagctctgctcccagaatttgggagctccagatttcttccagggtgtggaggcatcaatatatcagtctgggaaaggggttcctgggccactccaggagctgagttgggtggaaggtgctgagggtgtgggtgggggccacttctgagcacccatgtggcacccactgctggtccctgtttgtggctgggcactcaggaaaatgtttttggtgctaagagtaaaaagccaaccaacaaacacatctcttttttctgtctattcactggaaagtaaaagcagtctgggcgcaggctggggacccagatggaattcaaacttatgcctgctctcaaggtgctcacggttgctgataaacagctggataaaatgaagagtctatgagtgagggatgcagagccagggaaggctggtggagtgatgccaccagcacaggggtatgagtttgcagctgccaaggggccaagggatgagctggggccctccttcccaatggcatctccccctggtctggaactgaagacactgagcaatggtccccaagccccaaggagatcagctcccctgggcccagtggccccaaccagggagggtgtggagaatgcctgcttctcctcagaggagcatgagacccatttccagaaccctgggaacacgagactgggcagctcacccagtccccctgggggtgtctcctcactgccccgatcccagcgggatgatctgtcccttcattcagaggaggggccagccctggagcccgtgagccgcccggtggattatggctttgtttccgccctcgttttcctggtgagtgggattcttctggtggtgacagcatacgccatcccccgtgaggctcgagtcaatccggacacagtgacagcgcgggagatggaacgactggagatgtactacgcccgcctaggctcccacctggacaggtgcatcatcgcaggcctcgggctgctcacggtgggcggcatgctcttgtcggtgctgctcatggtctccctgtgcaagggcgagctgtaccgccggaggaccttcgtccccggcaagggctccaggaagacctacggctccattaacctgcgcatgagacagctcaatggggatgggggccaggccctggtggagaatgaagttgtccaggtctcagagactagccacaccctccagaggtcttaagaactagcccaccttatctggctgctttagctccagtgctacaaggtccaccccctgctcccgcccacctgacccctgccaaggccctggggttttaaactgagctcacatagggccttgtggaagaagtactgggtgctggagggagagctcggggcccagcccatgccccacacgggcaagcagcccactgatctgttttgtagctgaggttttgcatacggttttgtttggaggatggcttctgctgctaaaaatacaaaagtttggaaaccgctgctcttgga

SEQ ID NO: 116341 - DNA, 983 bp, Artificial Sequence
  derived and/or modified sequence
ctcactcccaggggcactttgtgtgtgtgtgtgtgtgtgtgtgtgtgtgtgtgtacgcgcgtgtgcgtgtgacggggtactcgcgtggcccgaagatccgagggtcacactacgtgacttctgggtgtctgtgggtactgctgtgggaacagctgctgggggagtgtgtgtggaactggagtgttcctttcaggacctgtctgactgcagatgaaattagtaactggtggggtcgtggggtgtgaatggtgggcgggagcagctatgtcagttggtgtgtttctgcttatgttagggtaattgggcacggcctttgtgtaactggtgaatatctctgaacctgggcatgaaacagagagatgtcctaactctggtaaaagcagtctgggcgcaggctggggacccagatggaattcaaacttatgcctgctctcaaggtgctcacggttgctgataaacagctggataaaatgaagagtctatgagtgagggatgcagagccagggaaggctggtggagtgatgccaccagcacaggggtatgagtttgcagctgccaaggggccaagggatgagctggggccctccttcccaatggcatctccccctggtctggaactgaagacactgagcaatggtccccaagccccaaggagatcagctcccctgggcccagtggccccaaccagggagggtgtggagaatgcctgcttctcctcagaggagcatgagacccatttccagaaccctgggaacacgagactgggcagctcacccagtccccctgggggtgtctcctcactgccccgatcccagcgggatgatctgtcccttcattcagaggaggggccagccctggagcccgtgagccgcccggtggattatggctttgtttccgccctcgttttcctggtgagtgggattcttctggtggtgacagcatacgccatcccccgtgaggctcgagtcaatccggacacagtg

SEQ ID NO: 116342 - protein, 706 aa, Artificial Sequence
  derived and/or modified sequence
  misc_feature (1)..(1): Xaa can be any naturally occurring amino acid
XTVLPVATIQNASTAMLMAASVARKAVVLPGGTATSPKMIAKNVLGLVPQALPKADGRAGLGTGGQKVNGASVVMVQPSKTATGPSTGGGTVISRTQSSLVEAFNKILNSKNLLPAYRPNLSPPAEAGLALPPTGYRCLECGDAFSLEKSLARHYDRRSMRIEVTCNHCARRLVFFNKCSLLLHAREHKDKGLVMQCSHLVMRPVALDQMVGQPDITPLLPVAVPPVSGPLALPALGKGEGAITSSAITTVAAEAPVLPLSTEPPAAPATSAYTCFRCLECKEQCRDKAGMAAHFQQLGPPAPGATSNVCPTCPMMLPNRCSFSAHQRMHKNRPPHVCPECGGNFLQANFQTHLREACLHVSRRVGYRCPSCSVVFGGVNSIKSHIQTSHCEVFHKCPICPMAFKSGPSAHAHLYSQHPSFQTQQAKLIYKCAMCDTVFTHKPLLSSHFDQHLLPQRVSVFKCPSCPLLFAQKRTMLEHLKNTHQSGRLEETAGKGAGGALLTPKTEPEELAVSQGGAAPATEESSSSSEEEEVPSSPEPPRPAKRPRRELGSKGLKGGGGGPGGWTCGLCHSWFPERDEYVAHMKKEHGKSVKKFPCRLCERSFCSAPSLRRHVRVNHEGIKRVYPCRSKGPGLRAVPLLPSCPLPFQVLHRGKTHLQQPPDPRETCPGPARLAAWGPVPWPGDHLGSGFQCQSPGARSETPPVF

SEQ ID NO: 116343 - DNA, 3714 bp, Artificial Sequence
  derived and/or modified sequence
atgggcgacatgaagacccccgacttcgacgacctgctggccgccttcgacatccccgacatcgacgccaacgaggccatccacagcggccccgaggagaacgagggccccggcggccccggcaagcccgagcccggcgtgggcagcgagagcgaggacaccgccgccgccagcgccggcgacggccccggcgtgcccgcccaggccagcgaccacggcctgcccccccccgacatcagcgtggtgagcgtgatcgtgaagaacaccgtgtgccccgagcagagcgaggccctggccggcggcagcgccggcgacggcgcccaggccgccggcgtgaccaaggagggccccgtgggcccccacagaatgcagaacggcttcggcagccccgagcccagcctgcccggcaccccccacagccccgccccccccagcggcggcacctggaaggagaagggcatggagggcaagacccccctggacctgttcgcccacttcggccccgagcccggcgaccacagcgaccccctgccccccagcgcccccagccccaccagagagggcgccctgacccccccccccttccccagcagcttcgagctggcccaggagaacggccccggcatgcagccccccgtgagcagcccccccctgggcgccctgaagcaggagagctgcagcccccaccacccccaggtgctggcccagcagggcagcggcagcagccccaaggccaccgacatccccgccagcgccagccccccccccgtggccggcgtgcccttcttcaagcagagccccggccaccagagccccctggccagccccaaggtgcccgtgtgccagcccctgaaggaggaggacgacgacgagggccccgtggacaagagcagccccggcagcccccagagccccagcagcggcgccgaggccgccgacgaggacagcaacgacagccccgccagcagcagcagcagacccctgaaggtgagaatcaagaccatcaagaccagctgcggcaacatcaccagaaccgtgacccaggtgcccagcgaccccgacccccccgcccccctggccgagggcgccttcctggccgaggccagcctgctgaagctgagccccgccacccccaccagcgagggccccaaggtggtgagcgtgcagctgggcgacggcaccagactgaagggcaccgtgctgcccgtggccaccatccagaacgccagcaccgccatgctgatggccgccagcgtggccagaaaggccgtggtgctgcccggcggcaccgccaccagccccaagatgatcgccaagaacgtgctgggcctggtgccccaggccctgcccaaggccgacggcagagccggcctgggcaccggcggccagaaggtgaacggcgccagcgtggtgatggtgcagcccagcaagaccgccaccggccccagcaccggcggcggcaccgtgatcagcagaacccagagcagcctggtggaggccttcaacaagatcctgaacagcaagaacctgctgcccgcctacagacccaacctgagcccccccgccgaggccggcctggccctgccccccaccggctacagatgcctggagtgcggcgacgccttcagcctggagaagagcctggccagacactacgacagaagaagcatgagaatcgaggtgacctgcaaccactgcgccagaagactggtgttcttcaacaagtgcagcctgctgctgcacgccagagagcacaaggacaagggcctggtgatgcagtgcagccacctggtgatgagacccgtggccctggaccagatggtgggccagcccgacatcacccccctgctgcccgtggccgtgccccccgtgagcggccccctggccctgcccgccctgggcaagggcgagggcgccatcaccagcagcgccatcaccaccgtggccgccgaggcccccgtgctgcccctgagcaccgagccccccgccgcccccgccaccagcgcctacacctgcttcagatgcctggagtgcaaggagcagtgcagagacaaggccggcatggccgcccacttccagcagctgggcccccccgcccccggcgccaccagcaacgtgtgccccacctgccccatgatgctgcccaacagatgcagcttcagcgcccaccagagaatgcacaagaacagacccccccacgtgtgccccgagtgcggcggcaacttcctgcaggccaacttccagacccacctgagagaggcctgcctgcacgtgagcagaagagtgggctacagatgccccagctgcagcgtggtgttcggcggcgtgaacagcatcaagagccacatccagaccagccactgcgaggtgttccacaagtgccccatctgccccatggccttcaagagcggccccagcgcccacgcccacctgtacagccagcaccccagcttccagacccagcaggccaagctgatctacaagtgcgccatgtgcgacaccgtgttcacccacaagcccctgctgagcagccacttcgaccagcacctgctgccccagagagtgagcgtgttcaagtgccccagctgccccctgctgttcgcccagaagagaaccatgctggagcacctgaagaacacccaccagagcggcagactggaggagaccgccggcaagggcgccggcggcgccctgctgacccccaagaccgagcccgaggagctggccgtgagccagggcggcgccgcccccgccaccgaggagagcagcagcagcagcgaggaggaggaggtgcccagcagccccgagccccccagacccgccaagagacccagaagagagctgggcagcaagggcctgaagggcggcggcggcggccccggcggctggacctgcggcctgtgccacagctggttccccgagagagacgagtacgtggcccacatgaagaaggagcacggcaagagcgtgaagaagttcccctgcagactgtgcgagagaagcttctgcagcgcccccagcctgagaagacacgtgagagtgaaccacgagggcatcaagagagtgtacccctgcagatactgcaccgagggcaagagaaccttcagcagcagactgatcctggagaagcacgtgcaggtgagacacggcctgcagctgggcgcccagagccccggcagaggcaccaccctggccagaggcagcagcgccagagcccagggccccggcagaaagagaagacagagcagcgacagctgcagcgaggagcccgacagcaccaccccccccgccaagagccccagaggcggccccggcagcggcggccacggccccctgagatacagaagcagcagcagcaccgagcagagcctgatgatgggcctgagagtggaggacggcgcccagcagtgcctggactgcggcctgtgcttcgccagccccggcagcctgagcagacacagattcatcagccacaagaagagaagaggcgtgggcaaggccagcgccctgggcctgggcgacggcgaggaggaggccccccccagcagaagcgaccccgacggcggcgacagccccctgcccgccagcggcggccccctgacctgcaaggtgtgcggcaagagctgcgacagccccctgaacctgaagacccacttcagaacccacggcatggccttcatcagagccagacagggcgccgtgggcgacaactag

SEQ ID NO: 116344 - DNA, 3312 bp, Artificial Sequence
  derived and/or modified sequence
atgggcgacatgaagacccccgacttcgacgacctgctggccgccttcgacatccccgacatcgacgccaacgaggccatccacagcggccccgaggagaacgagggccccggcggccccggcaagcccgagcccggcgtgggcagcgagagcgaggacaccgccgccgccagcgccggcgacggccccggcgtgcccgcccaggccagcgaccacggcctgcccccccccgacatcagcgtggtgagcgtgatcgtgaagaacaccgtgtgccccgagcagagcgaggccctggccggcggcagcgccggcgacggcgcccaggccgccggcgtgaccaaggagggccccgtgggcccccacagaatgcagaacggcttcggcagccccgagcccagcctgcccggcaccccccacagccccgccccccccagcggcggcacctggaaggagaagggcatggagggcaagacccccctggacctgttcgcccacttcggccccgagcccggcgaccacagcgaccccctgccccccagcgcccccagccccaccagagagggcgccctgacccccccccccttccccagcagcttcgagctggcccaggagaacggccccggcatgcagccccccgtgagcagcccccccctgggcgccctgaagcaggagagctgcagcccccaccacccccaggtgctggcccagcagggcagcggcagcagccccaaggccaccgacatccccgccagcgccagccccccccccgtggccggcgtgcccttcttcaagcagagccccggccaccagagccccctggccagccccaaggtgcccgtgtgccagcccctgaaggaggaggacgacgacgagggccccgtggacaagagcagccccggcagcccccagagccccagcagcggcgccgaggccgccgacgaggacagcaacgacagccccgccagcagcagcagcagacccctgaaggtgagaatcaagaccatcaagaccagctgcggcaacatcaccagaaccgtgacccaggtgcccagcgaccccgacccccccgcccccctggccgagggcgccttcctggccgaggccagcctgctgaagctgagccccgccacccccaccagcgagggccccaaggtggtgagcgtgcagctgggcgacggcaccagactgaagggcaccgtgctgcccgtggccaccatccagaacgccagcaccgccatgctgatggccgccagcgtggccagaaaggccgtggtgctgcccggcggcaccgccaccagccccaagatgatcgccaagaacgtgctgggcctggtgccccaggccctgcccaaggccgacggcagagccggcctgggcaccggcggccagaaggtgaacggcgccagcgtggtgatggtgcagcccagcaagaccgccaccggccccagcaccggcggcggcaccgtgatcagcagaacccagagcagcctggtggaggccttcaacaagatcctgaacagcaagaacctgctgcccgcctacagacccaacctgagcccccccgccgaggccggcctggccctgccccccaccggctacagatgcctggagtgcggcgacgccttcagcctggagaagagcctggccagacactacgacagaagaagcatgagaatcgaggtgacctgcaaccactgcgccagaagactggtgttcttcaacaagtgcagcctgctgctgcacgccagagagcacaaggacaagggcctggtgatgcagtgcagccacctggtgatgagacccgtggccctggaccagatggtgggccagcccgacatcacccccctgctgcccgtggccgtgccccccgtgagcggccccctggccctgcccgccctgggcaagggcgagggcgccatcaccagcagcgccatcaccaccgtggccgccgaggcccccgtgctgcccctgagcaccgagccccccgccgcccccgccaccagcgcctacacctgcttcagatgcctggagtgcaaggagcagtgcagagacaaggccggcatggccgcccacttccagcagctgggcccccccgcccccggcgccaccagcaacgtgtgccccacctgccccatgatgctgcccaacagatgcagcttcagcgcccaccagagaatgcacaagaacagacccccccacgtgtgccccgagtgcggcggcaacttcctgcaggccaacttccagacccacctgagagaggcctgcctgcacgtgagcagaagagtgggctacagatgccccagctgcagcgtggtgttcggcggcgtgaacagcatcaagagccacatccagaccagccactgcgaggtgttccacaagtgccccatctgccccatggccttcaagagcggccccagcgcccacgcccacctgtacagccagcaccccagcttccagacccagcaggccaagctgatctacaagtgcgccatgtgcgacaccgtgttcacccacaagcccctgctgagcagccacttcgaccagcacctgctgccccagagagtgagcgtgttcaagtgccccagctgccccctgctgttcgcccagaagagaaccatgctggagcacctgaagaacacccaccagagcggcagactggaggagaccgccggcaagggcgccggcggcgccctgctgacccccaagaccgagcccgaggagctggccgtgagccagggcggcgccgcccccgccaccgaggagagcagcagcagcagcgaggaggaggaggtgcccagcagccccgagccccccagacccgccaagagacccagaagagagctgggcagcaagggcctgaagggcggcggcggcggccccggcggctggacctgcggcctgtgccacagctggttccccgagagagacgagtacgtggcccacatgaagaaggagcacggcaagagcgtgaagaagttcccctgcagactgtgcgagagaagcttctgcagcgcccccagcctgagaagacacgtgagagtgaaccacgagggcatcaagagagtgtacccctgcagaagcaagggccccggcctgagagccgtgcccctgctgcccagctgccccctgcccttccaggtgctgcacagaggcaagacccacctgcagcagccccccgaccccagagagacctgccccggccccgccagactggccgcctggggccccgtgccctggcccggcgaccacctgggcagcggcttccagtgccagagccccggcgccagaagcgagaccccccccgtgttctag

SEQ ID NO: 116345 - DNA, 2121 bp, Artificial Sequence
  derived and/or modified sequence
tgaaccgtgctgcccgtggccaccatccagaacgccagcaccgccatgctgatggccgccagcgtggccagaaaggccgtggtgctgcccggcggcaccgccaccagccccaagatgatcgccaagaacgtgctgggcctggtgccccaggccctgcccaaggccgacggcagagccggcctgggcaccggcggccagaaggtgaacggcgccagcgtggtgatggtgcagcccagcaagaccgccaccggccccagcaccggcggcggcaccgtgatcagcagaacccagagcagcctggtggaggccttcaacaagatcctgaacagcaagaacctgctgcccgcctacagacccaacctgagcccccccgccgaggccggcctggccctgccccccaccggctacagatgcctggagtgcggcgacgccttcagcctggagaagagcctggccagacactacgacagaagaagcatgagaatcgaggtgacctgcaaccactgcgccagaagactggtgttcttcaacaagtgcagcctgctgctgcacgccagagagcacaaggacaagggcctggtgatgcagtgcagccacctggtgatgagacccgtggccctggaccagatggtgggccagcccgacatcacccccctgctgcccgtggccgtgccccccgtgagcggccccctggccctgcccgccctgggcaagggcgagggcgccatcaccagcagcgccatcaccaccgtggccgccgaggcccccgtgctgcccctgagcaccgagccccccgccgcccccgccaccagcgcctacacctgcttcagatgcctggagtgcaaggagcagtgcagagacaaggccggcatggccgcccacttccagcagctgggcccccccgcccccggcgccaccagcaacgtgtgccccacctgccccatgatgctgcccaacagatgcagcttcagcgcccaccagagaatgcacaagaacagacccccccacgtgtgccccgagtgcggcggcaacttcctgcaggccaacttccagacccacctgagagaggcctgcctgcacgtgagcagaagagtgggctacagatgccccagctgcagcgtggtgttcggcggcgtgaacagcatcaagagccacatccagaccagccactgcgaggtgttccacaagtgccccatctgccccatggccttcaagagcggccccagcgcccacgcccacctgtacagccagcaccccagcttccagacccagcaggccaagctgatctacaagtgcgccatgtgcgacaccgtgttcacccacaagcccctgctgagcagccacttcgaccagcacctgctgccccagagagtgagcgtgttcaagtgccccagctgccccctgctgttcgcccagaagagaaccatgctggagcacctgaagaacacccaccagagcggcagactggaggagaccgccggcaagggcgccggcggcgccctgctgacccccaagaccgagcccgaggagctggccgtgagccagggcggcgccgcccccgccaccgaggagagcagcagcagcagcgaggaggaggaggtgcccagcagccccgagccccccagacccgccaagagacccagaagagagctgggcagcaagggcctgaagggcggcggcggcggccccggcggctggacctgcggcctgtgccacagctggttccccgagagagacgagtacgtggcccacatgaagaaggagcacggcaagagcgtgaagaagttcccctgcagactgtgcgagagaagcttctgcagcgcccccagcctgagaagacacgtgagagtgaaccacgagggcatcaagagagtgtacccctgcagaagcaagggccccggcctgagagccgtgcccctgctgcccagctgccccctgcccttccaggtgctgcacagaggcaagacccacctgcagcagccccccgaccccagagagacctgccccggccccgccagactggccgcctggggccccgtgccctggcccggcgaccacctgggcagcggcttccagtgccagagccccggcgccagaagcgagaccccccccgtgttctag

SEQ ID NO: 116346 - DNA, 3714 bp, Artificial Sequence
  derived and/or modified sequence
atgggagacatgaagaccccagacttcgacgacctgctggctgctttcgatatccccgatatcgacgccaacgaggcgatccactccggcccagaagagaatgaggggcccggaggtccaggtaaaccagagcccggcgtcggaagcgagtcagaggacaccgccgccgcttccgcaggtgacggcccgggtgtccctgcccaggcgtctgaccacggactcccaccacccgacattagcgtggtatctgtgattgtgaaaaatacggtgtgtcccgagcaatctgaagctttggcaggaggaagtgccggcgacggcgctcaggcagccggagtgactaaagagggcccagttggaccacatcgtatgcaaaatggattcgggtccccagaaccctcactgccgggaacacctcattcgcccgcaccaccaagcggggggacttggaaggaaaaaggcatggaaggaaaaactcccctggatttattcgcccactttggaccagagcccggagaccattctgatcccctccccccttccgccccatctcccactcgagagggagctctcacgcctcccccatttccatcaagctttgagttagcacaggagaacgggccagggatgcaaccacctgtttccagcccacccttaggggccctgaagcaagagtcatgttcaccacaccatcctcaggtgctggcccagcagggaagtgggtcatcaccaaaggcaactgacataccagcctccgcctcgcctccacccgtcgctggagtgccgttctttaaacagagccccggtcatcagtcccctctcgcctcacccaaggtcccggtatgtcagcccttgaaagaggaggatgatgacgaggggccagtcgataaaagctctcctgggagtccccagtctccctcgagtggggcagaggctgccgacgaggactcaaatgacagcccggcctcttcctcaagtcggcccctcaaagtccggattaagaccatcaagactagttgcgggaacattacccgcacagttacgcaggtcccctccgacccagatcccccagctccgctcgcagagggcgccttccttgcagaagcctccctgctgaaactcagccctgccacccccacctcagagggacctaaggtggtttcagttcaactcggtgacggcacccgcttgaaggggaccgtattgccagtcgccactattcagaatgcctccacggccatgctgatggccgcgagtgtcgcccggaaggctgtagtgttaccgggaggaactgcaacatcacccaaaatgattgctaaaaacgtgctgggcctcgtgccccaggcactgcccaaagctgacggaagagctggccttggcactggcggacagaaggtgaacggggctagcgttgtgatggtgcagccaagcaagactgctactggcccttcgacggggggcggaaccgtgatttcccggacacagagctctctcgtggaagcatttaacaagatccttaattccaagaacctgctccctgcatatcgtcctaatctgtctccgccagcagaagccggactagccttaccccccacagggtaccgctgcctcgagtgcggtgatgcattttccctggaaaaatcacttgctaggcattacgaccgccggagcatgcgaatcgaggtcacctgcaatcactgtgcacggcggctggtcttcttcaataaatgttctttactgttgcacgcccgcgaacataaagacaaaggattggtcatgcagtgtagtcacctcgtaatgagacctgtcgctctggatcagatggttggtcagccagacatcacaccactgctgcctgtcgccgttccccccgtttccggacctctagctctgccggctctcgggaaaggcgaaggcgcaataacctcctccgctatcacaaccgtggcagccgaagcacctgtgctccccttatcaacggagcctcctgccgctccagccacctccgcctacacatgttttaggtgcctcgaatgtaaggagcagtgtcgtgataaagcaggtatggcagctcactttcaacagctcggacctcctgcacctggtgccacttccaatgtctgcccgacatgtccgatgatgctgccaaacagatgttctttcagtgcacatcaacgaatgcacaagaatcgaccccctcacgtctgccccgagtgtggaggcaacttcctgcaggccaatttccagactcacctgcgcgaggcatgcctccatgtctcaaggcgagtcgggtaccgctgcccaagctgctccgttgtgttcggtggcgtcaattccatcaagtctcacatccagacttctcactgtgaggtgttccacaagtgtcctatctgcccaatggcgttcaagagcggcccctctgcccacgcccacctgtactcacagcatccaagctttcagacccaacaagccaagcttatttataaatgcgccatgtgcgatactgtgtttacacacaagcctctcctgagctcccattttgatcagcaccttctgccacagagagtatccgttttcaaatgcccctcatgtcctctgcttttcgctcagaagagaactatgctggaacacctgaaaaacacccaccagtcagggcggttggaggaaactgctggcaaaggagcagggggggccctgctcacaccaaagaccgagcctgaggagctggccgtgtcacagggaggagccgcccccgctaccgaggaatcatcttcttctagtgaagaggaagaggtgcccagttcccctgaaccccctcgaccagctaagagaccaagaagagagctgggaagtaagggtctcaaggggggtggcggaggccctggtggatggacatgtggactgtgccattcctggtttcccgaaagggacgagtacgtcgcacacatgaagaaagagcatggaaaatctgtcaaaaagtttccatgcagactctgtgaaaggagcttctgtagtgccccctctcttagacgccatgtgagagtaaaccatgagggcattaagagagtgtacccctgccgatactgcactgaggggaaacgaacattctctagtcggctgatcctggagaagcatgtacaggtccgtcacggactccagctaggtgcccaaagtcccgggagggggacaaccttggcacgagggagctccgctcgcgctcagggaccgggccgaaagcggaggcagtcttccgacagttgctcagaggagccagactcaactacaccgcctgcaaagagtccaagaggagggcctggaagcgggggacacgggccattaaggtataggtccagcagtagtaccgagcaaagccttatgatgggtctacgcgtggaggacggagctcagcagtgtctcgactgcggactctgtttcgcttctcctggctcattgtcaaggcaccggttcatcagtcataaaaaacgaaggggcgtgggcaaggccagtgctctgggcctgggcgatggagaggaggaggccccccccagcagaagcgacccagatggtggagattccccactgcccgcttccggcggaccactcacttgcaaggtgtgtggaaagtcctgtgactccccattaaacctcaaaactcacttcagaacacacggaatggccttcatcagagcgaggcagggcgctgtgggcgacaattag

SEQ ID NO: 116347 - DNA, 3714 bp, Artificial Sequence
  derived and/or modified sequence
atgggggatatgaaaactcccgacttcgacgatttgttagccgcttttgatatcccagacatcgatgccaacgaagcaatccacagcggacctgaggaaaatgagggacctgggggccctggcaaacctgaaccaggtgtcgggtcagaatccgaagacaccgctgcagcaagcgccggcgacggaccgggagtgccggcacaggcttccgatcacgggctgccgccccccgatatatctgtggtgagcgtgatcgtgaagaacactgtgtgtcccgaacaatctgaagcacttgctggaggctccgctggcgacggggctcaggccgccggcgttaccaaagaagggcctgtgggtcctcatagaatgcaaaacggttttggaagtccagagccctccctgcccggcaccccccattctcctgccccaccgtccggcggtacgtggaaagagaaaggcatggagggcaagactcccctggacctgtttgcccactttggccctgagcctggagaccacagtgaccccctccccccaagtgcgccctcacccactagagagggtgcacttacccccccgccattcccaagtagtttcgagttagcacaggagaatggccctggcatgcagccccccgtcagtagccccccattgggtgccctcaagcaggagagctgctctcctcatcacccacaggtgttggcacagcaggggtcaggttcaagcccaaaagctaccgatattccagctagtgcatcaccacccccagtggctggcgtgccgttctttaaacagagcccaggacatcagagccctctcgcttctccgaaagtgcccgtctgtcaacctctgaaggaggaggatgatgacgagggacctgtcgataagtcttcccccggctccccccagtctcctagctctggtgctgaagccgctgacgaagactccaacgattctcctgcgtccagcagctctagacccttgaaggtgcgcattaaaaccattaagaccagctgtgggaatatcacccgcacagtgacgcaggtaccttccgatcctgatccaccggctcctctggcagagggcgcatttctggcagaagcctccctccttaaactctcaccggcaacgcccacctcagagggtcccaaagtggtgagcgtgcaactcggagacggcacccgtctgaaggggactgtgttgcctgttgccacgatccagaacgcctccaccgccatgctaatggccgcctctgtggccaggaaggcagtggtgctccccggcggaaccgccactagtccaaagatgatcgccaaaaacgtgttgggcctagtgccccaagctctgcccaaagcggatggccgagcggggctgggcacaggcgggcagaaagtgaatggggctagcgtcgtcatggtgcagcccagtaagacagcgaccggcccaagtacaggaggcggcacagtgatctcaaggactcaaagctctctcgtggaggcgttcaacaaaatcctcaacagcaaaaatctgctgcccgcctacagaccaaacctgtcaccaccagcagaggccggcctcgctctgccacctacaggatatcgctgccttgaatgcggcgacgccttttctctggagaaatcactggctaggcactacgatcgcaggagtatgagaattgaggtaacctgcaaccactgcgccaggagactagtcttttttaataagtgtagcctgctacttcatgctcgagaacataaggataagggtttagtgatgcagtgttcccacttagtgatgcgacccgtagcactcgatcaaatggtcgggcagccagacattactccactcttgccggtcgccgtccccccagtgagcggtccactagctctgcctgctttgggcaagggagaaggcgcaattacttcatctgccatcacaactgtggcggcagaagccccagtactgcctctatcaacagagccgccagcagccccggccacaagcgcttatacatgcttcagatgccttgagtgtaaggagcagtgcagggacaaagcaggcatggcagcgcactttcaacagcttggccctcccgcacctggtgcaacctccaatgtgtgccccacttgtcccatgatgctgcctaatcgctgctcatttagcgcacatcagcggatgcataagaaccggccacctcatgtttgcccagagtgtggaggcaatttcttgcaggccaattttcagacacatctgagagaggcttgcctacacgtgagcagaagagttggctacagatgtcccagctgttctgtggtgtttggtggtgtgaactctataaagagtcacatacagacttctcactgtgaggttttccacaagtgtccaatttgtcctatggcctttaaaagcggaccgagcgcccacgcacacctgtactctcaacacccttccttccaaacccagcaggcgaaactgatttacaaatgcgcgatgtgtgacaccgtgttcactcacaagcccctgctaagttcacattttgatcagcaccttctcccacagcgggtgtctgtatttaaatgcccaagctgcccacttcttttcgcccagaaacgcacgatgctggaacacctcaaaaatactcatcagtcgggacgtttggaggagacagctggaaagggggccggaggcgcactcctcaccccgaaaaccgagcctgaggaactggcagtttctcaaggcggcgcagcacccgcaactgaagagagtagtagtagttccgaagaggaagaggtgcctagctcccctgagcctccaagaccagcgaaacggcctaggagggagctcgggagcaaaggtcttaaaggcggaggaggcgggccaggtggctggacatgtggtctatgtcacagttggttcccagagcgggatgaatacgtggcacacatgaagaaagagcacggcaaatctgtaaagaagtttccgtgccgcttgtgtgaacgcagcttttgctcagctccgagtctccgaaggcatgttagggtcaatcacgagggtatcaaacgagtgtatccctgtcgatattgcacagaaggcaaaagaactttctccagcagactaattctcgaaaagcatgtgcaagttcgccacggtctgcagctgggcgcacagtctcctggccgaggtaccacactagccagggggagctcggctcgcgcccagggacctggtaggaaacggcggcagagctccgacagttgttcagaggagcctgactccacaactccgcccgccaaatcaccccgcggtggcccgggttcaggggggcacggtcccctgaggtatagatcaagcagctctacagaacagtccctcatgatgggattgagagtcgaagacggagcccagcagtgcttagattgtggcctgtgcttcgcatcgcccggcagcttgagtcgccacagatttattagtcacaaaaagcgccggggggtgggcaaggcgagtgcattgggcttaggcgacggcgaggaagaggctcctccttcccggagcgatccagatggaggagacagcccgttgcctgcctctggtggtcctctgacatgcaaggtgtgtggaaaaagctgcgactctcctctgaatttgaagactcacttccggacccacggaatggcatttatccgggcccgccagggcgcagtaggagacaactag

SEQ ID NO: 116348 - DNA, 3312 bp, Artificial Sequence
  derived and/or modified sequence
atgggagatatgaaaactcctgattttgacgacctccttgctgctttcgacatccccgatatcgacgccaacgaagcaattcactcaggtcctgaggagaatgagggccccggcggcccgggcaaacccgaacctggggtcggtagtgaatccgaagacactgccgccgcctcagccggagacggtccaggcgtgcctgcacaagccagcgaccacggtctgccccctcctgacataagtgttgtgagtgtcattgtgaaaaatacagtgtgtcccgagcagagcgaagccctggctggaggatccgccggcgatggagcgcaggccgcgggtgtgacaaaggaaggtcctgtgggaccacaccgtatgcagaatgggtttggctcccccgagccttccctaccaggcaccccccacagtccagcaccgccatccggaggaacatggaaagaaaaagggatggagggaaaaacccccttagacttatttgctcattttggtcctgagccaggagatcactcagatcctctgcccccatccgcccctagccctacacgggagggagccctgacaccaccccctttcccctcttcctttgagctggcacaagagaacggacctggcatgcagccgccagtcagctctccaccacttggggctctgaagcaggagagctgttcccctcatcacccccaagtgctggcccagcagggcagcggcagcagcccaaaggcgacagacataccagccagtgctagcccaccccctgtcgcgggagttccatttttcaaacaaagccctggccatcagtcaccccttgcttcacccaaggtgcctgtctgtcagccactgaaagaggaggatgacgatgaaggtccggtcgacaagagcagtccaggctccccacagagccccagttctggtgcagaggccgccgatgaggactcgaatgacagtcccgccagcagcagctccagacccctgaaggtgcgcatcaaaacgatcaaaaccagctgtggaaacatcacaagaacagtcactcaagtgccctccgatcctgatccacccgcaccgttggcagagggcgccttcctggccgaggctagtctcttaaaactgagtcctgcaacccctacatccgagggccccaaggtggtgagtgtccaactgggagacggcacaagattgaagggaaccgtcctaccggtggccactatccaaaacgccagcacagccatgctcatggccgctagcgtggcccggaaagcagtcgtgctcccaggtggcaccgctacgagtccaaaaatgattgcaaagaatgtgctgggactcgtaccacaggcactaccaaaggcagacggcagggcgggtcttggcactggaggtcagaaagttaacggggcttcagtcgtgatggtacagccatccaagaccgccacaggccctagcacaggcgggggaacggtaatatcccgaacccagagctctctagttgaagccttcaataagattctgaacagcaagaatctgctgcctgcttatcggcctaacctgtctccccctgccgaagctggactggccttgcccccaactggctatagatgtcttgaatgtggcgatgcctttagcctggagaagagcctggcaagacattacgacaggagatcaatgcgcatcgaagtcacatgcaaccactgtgcccggcggcttgttttctttaataaatgctccttactgttgcacgcgagggaacacaaggacaaaggtctagtgatgcagtgtagtcacctggtaatgcgtccagtagccttggaccagatggtgggtcagcccgatatcacgcctcttctccctgtagccgttcctcccgtttctggccctctggccctgccagcacttggaaagggcgaaggcgccattacaagcagcgcgatcaccaccgttgcagcagaagccccagtgctgccactgtctacggagccacctgcggctcccgccacatctgcctacacttgttttagatgcctagagtgcaaggaacagtgccgcgacaaggccgggatggcggcccatttccagcagctcggcccccccgcacctggcgccactagtaacgtttgtcctacctgcccaatgatgcttccaaacaggtgctccttctccgcacatcagagaatgcacaagaaccgtccgcctcatgtttgtcctgaatgtggtggcaactttttgcaggccaatttccaaacccacctaagagaggcttgtctgcatgttagtaggcgggtgggatataggtgtccatcttgtagtgtggtgttcggcggagtcaatagtattaagagtcacattcagacatcccactgtgaggtcttccataagtgtcccatctgcccaatggcatttaagtctggcccaagtgctcatgctcatctgtactctcagcacccatcatttcagacccagcaagccaaactcatctacaagtgtgctatgtgtgacacggtttttactcataaacctctgctcagtagtcattttgatcagcatctcctgccacagagagtgtctgtcttcaaatgcccctcctgtcccctgctttttgctcagaaaagaacaatgttggagcacctaaaaaacactcatcagagcggtcggctggaggaaaccgctgggaaaggagctgggggagcactgctaacccctaaaactgaacctgaggagctagccgtgtctcagggcggggcagcacctgcgactgaagagtccagtagttcgtcggaggaagaggaggttccgtcatctccagagccaccccggccagctaagcgaccaaggcgtgagctgggaagcaagggcctgaagggaggtgggggtggacctgggggttggacctgtggactgtgccactcctggtttccagaacgcgatgagtatgtggcacacatgaagaaagaacatgggaaaagtgtgaaaaaattcccttgccgactctgtgagcgttcattctgctccgctccctccctacggaggcacgtgagagtgaaccatgaagggatcaaacgcgtatacccatgccggtccaaaggcccaggactacgcgcagtgcccttgctcccctcctgccctcttcccttccaggtgcttcatagaggtaaaacacacctgcagcaaccaccagatccccgagaaacctgtccgggaccggctcgtctggccgcctgggggccggtgccatggccaggggaccacctcggaagtgggttccaatgccagtcccccggggccaggtccgaaacccccccggtgttctag

SEQ ID NO: 116349 - DNA, 2121 bp, Artificial Sequence
  derived and/or modified sequence
tgaaccgtactaccggtggcgaccatccagaatgccagtacagcaatgttgatggccgccagtgtggcacggaaagccgtcgtgttgcctggcggaaccgcaactagccctaagatgatcgctaaaaacgtgttagggctagtcccccaagccctccctaaggccgacggacgggcgggccttggtacgggcgggcaaaaggtaaacggggcatccgtagttatggtccagccttctaagaccgcaacaggacccagcactggaggaggaacagtcattagccgaacccaaagttcactcgttgaagcattcaataagatactgaatagtaaaaaccttctgcccgcctatcgccctaatctaagtccacctgccgaggcaggactggcactgccccccacaggctatcgttgtctcgagtgcggcgacgcgttttccctggaaaaatccctggcacgtcattatgatcgaaggtctatgagaatcgaggtgacttgcaatcactgcgctagacggcttgtgttctttaacaaatgtagcctgctcctgcacgcccgagagcacaaggacaagggcctcgtgatgcagtgctcccacttggtgatgagacccgtggctctcgaccagatggtaggacaacctgatatcactccactgctgcccgtggctgtgcctccagtaagtggacccttggcacttcctgctcttgggaaaggggaaggggccatcacaagttcagccatcactaccgttgctgcggaggcacccgtcctacctcttagcacggagcccccagctgctccggctaccagtgcttatacgtgtttcagatgtctggagtgtaaagaacagtgtagagacaaggctggaatggcagcccatttccagcagttaggaccccctgccccaggcgcaacttccaatgtctgcccaacatgccctatgatgctacctaacagatgctctttctccgcccaccagcgcatgcacaaaaacagacctccccacgtgtgtcccgagtgcggcggaaatttcctgcaggccaattttcagacccatctccgcgaggcttgcctgcacgtctctaggcgggttgggtataggtgtccgtcgtgttccgttgtgtttgggggggtcaacagcataaaatcccatatccaaacatcccactgcgaggtattccacaagtgtcccatttgtcctatggcctttaagagcggcccttccgcacatgcacatctctacagccagcatccgtcattccaaacacagcaggcgaagttaatatataagtgcgcaatgtgtgacacggtgttcacacacaaacccctgctttcaagtcactttgatcagcacctcctacctcagagggtttcagtttttaaatgtccctcatgccccctgttgttcgcacagaaacgcaccatgttagagcatctcaagaatactcaccagagcggaagactcgaggagaccgctggcaaaggcgcgggtggggctctgcttacgccaaagactgaacccgaagaacttgccgtcagccaagggggcgccgccccagcgactgaggagagctcatccagcagcgaagaggaggaggtacccagtagtcctgagccccccaggccagccaaacgccctcgccgggagctcgggtcgaaaggcttgaaaggcggcgggggagggccaggagggtggacatgtggtctctgccatagttggttcccagagagagacgagtatgtggctcatatgaaaaaggaacacgggaaaagcgtgaaaaaatttccctgtcggctttgtgagagaagcttttgcagtgctccctcacttaggagacacgtgcgggtgaatcatgagggaattaaacgcgtgtacccatgtcgatctaaggggccaggcctgcgagccgtgccgctgctaccgtcgtgtccgctcccctttcaggttcttcatcgtggaaagacacatctgcagcagccacccgatcctcgcgaaacctgcccagggccggcccgactagccgcatgggggcctgtgccatggccgggcgatcatctgggctcaggcttccagtgccagagtcctggcgccagaagcgagacacctcccgtcttttag

SEQ ID NO: 116350 - DNA, 3714 bp, Artificial Sequence
  derived and/or modified sequence
atgggagacatgaagaccccagactttgatgacctgctggccgcctttgacatcccagacattgatgccaatgaggccatccacagcggcccagaagaaaatgaaggacctgggggccctgggaagccagagcccggggtgggcagcgagagcgaggacacagctgctgccagcgctggagatggccctggggtgcctgcccaggccagtgaccacggcctgcccccaccagacatctctgtggtgtctgtgattgtgaagaacacagtgtgcccagagcagagcgaggccctggccggcggcagcgctggagatggagcccaggccgccggcgtgaccaaggagggccctgtgggcccccacaggatgcagaatggatttggcagccctgagcccagcctgcccggcaccccccacagccctgcccctccttctgggggcacctggaaggagaagggcatggagggcaagacccccctggacctgtttgcccacttcggccctgagcccggggaccacagcgaccccctgccccccagcgcccccagccccacccgggagggcgccctgaccccaccacccttccccagcagctttgagctggcccaggagaatggacctggcatgcagccccctgtgagcagcccccccctgggcgccctgaagcaggagagctgcagcccccaccacccccaggtgctggcccagcagggcagcggcagcagccccaaggccacagacatcccagccagcgccagccccccacctgtggccggcgtgcccttcttcaagcagagccctggccaccagagccccctggccagccccaaggtgcctgtgtgccagcccctgaaggaggaggatgatgatgagggccctgtggacaagagcagccctggcagcccccagagccccagcagtggagctgaggccgcagatgaggacagcaatgacagccctgccagcagcagcagccggcccctgaaggtgcgcatcaagaccatcaagaccagctgtggcaacatcaccaggacagtgacccaggtgcccagcgaccctgaccccccagcccccctggccgagggcgccttcctggccgaggccagcctgctgaagctgagccctgccacccccaccagcgagggccccaaggtggtgtctgtgcagctgggagatggcacccggctgaagggcaccgtgctgcctgtggccaccatccagaatgccagcacagccatgctgatggccgcctctgtggccaggaaggctgtggtgctgcccggcggcacagccaccagccccaagatgattgccaagaatgtgctgggcctggtgccccaggccctgcccaaggcagatggccgggccggcctgggcaccggcggccagaaggtgaatggagcctctgtggtgatggtgcagcccagcaagacagccaccggccccagcactggaggcggcaccgtcatcagcaggacccagagcagcctggtggaggccttcaacaagatcctgaacagcaagaacctgctgcctgcctaccggcccaacctgagccccccagctgaggccggcctggccctgcccccaacaggctaccgctgcctggagtgtggagatgccttcagcctggagaagagcctggcccggcactatgaccggcgctccatgagaattgaggtgacctgcaaccactgtgcccggcggctggtgttcttcaacaagtgcagcctgctgctgcacgcccgggagcacaaggacaagggcctggtgatgcagtgcagccacctggtgatgaggcctgtggccctggaccagatggtgggccagcctgacatcacccccctgctgcctgtggccgtgccccctgtgtctggccccctggccctgcctgccctgggcaaaggagagggcgccatcaccagcagcgccatcaccaccgtggccgctgaggcccctgtgctgcccctgagcacagagcccccagctgccccagccaccagcgcctacacctgcttccgctgcctggagtgcaaggagcagtgccgggacaaggccggcatggccgcccacttccagcagctgggccccccagcccctggggccaccagcaatgtgtgccccacctgccccatgatgctgcccaaccgctgcagcttcagcgcccaccagaggatgcacaagaacagacctcctcatgtgtgcccagaatgtggcggcaacttcctgcaggccaacttccagacccacctgcgggaggcctgcctgcacgtgtcccggcgggtgggctaccgctgccccagctgcagcgtggtgtttggaggagtgaacagcatcaagagccacatccagaccagccactgtgaggtgttccacaagtgccccatctgccccatggccttcaagagcggccccagcgcccacgcccacctgtacagccagcaccccagcttccagacccagcaggccaagctgatctacaagtgtgccatgtgtgacaccgtcttcacccacaagcccctgctgagcagccactttgaccagcacctgctgccccagagggtgtctgtgttcaagtgccccagctgccccctgctgtttgcccagaagaggaccatgctggagcacctgaagaacacccaccagagcggccgcctggaggagacagctgggaagggggccggcggggccctgctgacccccaagacagagcctgaggagctggccgtgtcccagggcggggccgccccagccacagaggagagcagcagcagcagcgaggaggaggaggtgcccagcagccctgagccccccaggcctgccaagaggccccggcgggagctgggcagcaagggcctgaagggcggcggcggcggccctgggggctggacctgtggcctgtgccacagctggttccctgagagagatgaatatgtggcccacatgaagaaggagcacggcaagtctgtgaagaagttcccctgccgcctgtgtgagaggagcttctgcagcgcccccagcctgcggagacatgtgcgggtgaaccacgagggcatcaagagggtgtacccctgccgctactgcacagagggcaagaggaccttcagcagccgcctcatcctggagaagcacgtgcaggtgagacatggcctgcagctgggcgcccagagccctggccggggcaccaccctggcccggggcagcagcgcccgggcccagggccctggcaggaagaggcggcagagcagtgacagctgcagcgaggagccagacagcaccaccccaccagccaagagcccccggggcggccctggcagcggcggccacggccccctgcgctaccgcagcagcagcagcacagagcagagcctgatgatgggcctgcgggtggaggatggagcccagcagtgcctggactgtggcctgtgctttgccagccctggcagcctgagccgccaccgcttcatcagccacaagaagagaagaggagtgggcaaggccagcgccctgggcctgggagatggagaggaggaggccccacccagcagaagtgaccctgatggaggagacagccccctgcctgccagcggcggccccctgacctgcaaggtgtgtgggaagagctgtgacagccccctgaacctgaagacccacttccgcacccacggcatggccttcatccgggcccggcagggcgctgtgggggacaactag

SEQ ID NO: 116351 - DNA, 3312 bp, Artificial Sequence
  derived and/or modified sequence
atgggagacatgaagaccccagactttgatgacctgctggccgcctttgacatcccagacattgatgccaatgaggccatccacagcggcccagaagaaaatgaaggacctgggggccctgggaagccagagcccggggtgggcagcgagagcgaggacacagctgctgccagcgctggagatggccctggggtgcctgcccaggccagtgaccacggcctgcccccaccagacatctctgtggtgtctgtgattgtgaagaacacagtgtgcccagagcagagcgaggccctggccggcggcagcgctggagatggagcccaggccgccggcgtgaccaaggagggccctgtgggcccccacaggatgcagaatggatttggcagccctgagcccagcctgcccggcaccccccacagccctgcccctccttctgggggcacctggaaggagaagggcatggagggcaagacccccctggacctgtttgcccacttcggccctgagcccggggaccacagcgaccccctgccccccagcgcccccagccccacccgggagggcgccctgaccccaccacccttccccagcagctttgagctggcccaggagaatggacctggcatgcagccccctgtgagcagcccccccctgggcgccctgaagcaggagagctgcagcccccaccacccccaggtgctggcccagcagggcagcggcagcagccccaaggccacagacatcccagccagcgccagccccccacctgtggccggcgtgcccttcttcaagcagagccctggccaccagagccccctggccagccccaaggtgcctgtgtgccagcccctgaaggaggaggatgatgatgagggccctgtggacaagagcagccctggcagcccccagagccccagcagtggagctgaggccgcagatgaggacagcaatgacagccctgccagcagcagcagccggcccctgaaggtgcgcatcaagaccatcaagaccagctgtggcaacatcaccaggacagtgacccaggtgcccagcgaccctgaccccccagcccccctggccgagggcgccttcctggccgaggccagcctgctgaagctgagccctgccacccccaccagcgagggccccaaggtggtgtctgtgcagctgggagatggcacccggctgaagggcaccgtgctgcctgtggccaccatccagaatgccagcacagccatgctgatggccgcctctgtggccaggaaggctgtggtgctgcccggcggcacagccaccagccccaagatgattgccaagaatgtgctgggcctggtgccccaggccctgcccaaggcagatggccgggccggcctgggcaccggcggccagaaggtgaatggagcctctgtggtgatggtgcagcccagcaagacagccaccggccccagcactggaggcggcaccgtcatcagcaggacccagagcagcctggtggaggccttcaacaagatcctgaacagcaagaacctgctgcctgcctaccggcccaacctgagccccccagctgaggccggcctggccctgcccccaacaggctaccgctgcctggagtgtggagatgccttcagcctggagaagagcctggcccggcactatgaccggcgctccatgagaattgaggtgacctgcaaccactgtgcccggcggctggtgttcttcaacaagtgcagcctgctgctgcacgcccgggagcacaaggacaagggcctggtgatgcagtgcagccacctggtgatgaggcctgtggccctggaccagatggtgggccagcctgacatcacccccctgctgcctgtggccgtgccccctgtgtctggccccctggccctgcctgccctgggcaaaggagagggcgccatcaccagcagcgccatcaccaccgtggccgctgaggcccctgtgctgcccctgagcacagagcccccagctgccccagccaccagcgcctacacctgcttccgctgcctggagtgcaaggagcagtgccgggacaaggccggcatggccgcccacttccagcagctgggccccccagcccctggggccaccagcaatgtgtgccccacctgccccatgatgctgcccaaccgctgcagcttcagcgcccaccagaggatgcacaagaacagacctcctcatgtgtgcccagaatgtggcggcaacttcctgcaggccaacttccagacccacctgcgggaggcctgcctgcacgtgtcccggcgggtgggctaccgctgccccagctgcagcgtggtgtttggaggagtgaacagcatcaagagccacatccagaccagccactgtgaggtgttccacaagtgccccatctgccccatggccttcaagagcggccccagcgcccacgcccacctgtacagccagcaccccagcttccagacccagcaggccaagctgatctacaagtgtgccatgtgtgacaccgtcttcacccacaagcccctgctgagcagccactttgaccagcacctgctgccccagagggtgtctgtgttcaagtgccccagctgccccctgctgtttgcccagaagaggaccatgctggagcacctgaagaacacccaccagagcggccgcctggaggagacagctgggaagggggccggcggggccctgctgacccccaagacagagcctgaggagctggccgtgtcccagggcggggccgccccagccacagaggagagcagcagcagcagcgaggaggaggaggtgcccagcagccctgagccccccaggcctgccaagaggccccggcgggagctgggcagcaagggcctgaagggcggcggcggcggccctgggggctggacctgtggcctgtgccacagctggttccctgagagagatgaatatgtggcccacatgaagaaggagcacggcaagtctgtgaagaagttcccctgccgcctgtgtgagaggagcttctgcagcgcccccagcctgcggagacatgtgcgggtgaaccacgagggcatcaagagggtgtacccctgccgcagcaagggccctggcctgcgggctgtgcccctgctgcccagctgccccctgcccttccaggtgctgcaccggggcaagacccacctgcagcagcccccagacccccgggagacctgccccggccctgcccggctggccgcctggggccctgtgccctggccaggggaccacctgggcagcggcttccagtgccagagccctggggcccggtctgagaccccacctgtgttctag

SEQ ID NO: 116352 - DNA, 2121 bp, Artificial Sequence
  derived and/or modified sequence
tgaacagtgctgcctgtggccaccatccagaatgccagcacagccatgctgatggccgcctctgtggccaggaaggctgtggtgctgcccggcggcacagccaccagccccaagatgattgccaagaatgtgctgggcctggtgccccaggccctgcccaaggcagatggccgggccggcctgggcactggaggccagaaggtgaatggagcctctgtggtgatggtgcagcccagcaagacagccaccggccccagcactggaggcggcaccgtcatcagcaggacccagagcagcctggtggaggccttcaacaagatcctgaacagcaagaacctgctgcctgcctaccggcccaacctgagccccccagctgaggccggcctggccctgccccccaccggctaccgctgcctggagtgtggagatgccttcagcctggagaagagcctggcccggcactatgacagaagatccatgagaattgaggtgacctgcaaccactgtgcccggcggctggtgttcttcaacaagtgcagcctgctgctgcacgcccgggagcacaaggacaagggcctggtgatgcagtgcagccacctggtgatgaggcctgtggccctggaccagatggtgggccagcctgacatcacccccctgctgcctgtggccgtgccccctgtgtctggccccctggccctgcctgccctgggcaagggggagggcgccatcaccagcagcgccatcaccaccgtggccgctgaggcccctgtgctgcccctgagcacagagcccccagctgccccagccaccagcgcctacacctgcttccgctgcctggagtgcaaggagcagtgccgggacaaggccggcatggccgcccacttccagcagctgggccccccagcccctggggccaccagcaatgtgtgccccacctgccccatgatgctgcccaaccgctgcagcttcagcgcccaccagaggatgcacaagaaccggcccccccacgtgtgcccagaatgtggcggcaacttcctgcaggccaacttccagacccacctgcgggaggcctgcctgcacgtgtccagaagagtgggctaccgctgccccagctgcagcgtggtgtttggaggagtgaacagcatcaagagccacatccagaccagccactgtgaggtgttccacaagtgccccatctgccccatggccttcaagagcggccccagcgcccacgcccacctgtacagccagcaccccagcttccagacccagcaggccaagctgatctacaagtgtgccatgtgtgacacagtgttcacccacaagcccctgctgagcagccactttgaccagcacctgctgccccagagggtgtctgtgttcaagtgccccagctgccccctgctgtttgcccagaagaggaccatgctggagcacctgaagaacacccaccagagcggccgcctggaggagacagctggaaaaggagctggaggagccctgctgacccccaagacagagcctgaggagctggccgtgtcccagggcggggccgccccagccacagaggagagcagcagcagcagcgaggaggaggaggtgcccagcagccctgagccccccaggcctgccaagaggccccggcgggagctgggcagcaagggcctgaagggcggcggcggcggccctgggggctggacctgtggcctgtgccacagctggttccctgagagagatgaatatgtggcccacatgaagaaggagcacggcaagtctgtgaagaagttcccctgccgcctgtgtgagaggagcttctgcagcgcccccagcctgcggcggcacgtgcgggtgaaccacgagggcatcaagagggtgtacccctgccgcagcaaaggacctggcctgcgggctgtgcccctgctgcccagctgccccctgcccttccaggtgctgcaccggggcaagacccacctgcagcagcccccagacccccgggagacctgccccggccctgcccggctggccgcctggggccctgtgccctggccaggggaccacctgggcagcggcttccagtgccagagccctggggcccggtctgagaccccacctgtgttctag

SEQ ID NO: 116353 - DNA, 3714 bp, Artificial Sequence
  derived and/or modified sequence
atgggcgacatgaagacccccgacttcgacgacctgctggccgcctttgatattccagacatcgacgcaaatgaagctatccattctggccctgaggaaaacgagggccctggtggcccaggaaaacccgagccgggtgttgggtctgaatctgaggataccgcggccgctagcgcaggggatggccccggcgttcccgcccaagcctcagaccacggactgccgcctccggatatctctgttgtctcagtgatcgtcaagaacacagtgtgccctgaacagtcagaggctttggcaggtgggtcggcaggagatggtgcccaggcagccggggtaactaaggaaggtcccgtcggcccgcacaggatgcaaaatggatttggctccccggagccatccctgccagggactccgcactcccccgcacccccctcaggggggacttggaaggaaaaaggcatggagggtaaaacgcccttggacctgtttgcccatttcggccctgagcccggcgaccattcggaccctctgcctccctctgctcctagcccaactagagaaggagcactgactcctcctcccttccctagcagtttcgaacttgctcaggagaacggtcctggcatgcagcctccagtctcatcccccccgttgggtgccctgaagcaggagtcatgctccccacatcaccctcaggtgcttgcccagcaggggagcggctcctcaccaaaagcgaccgacatacctgcaagtgcatcccccccccctgttgctggtgtgccttttttcaaacaatcacccgggcaccagagccctctggcctcaccaaaagtgcctgtttgccagcccctcaaggaggaggacgatgatgaagggcccgtggacaagagttctcctggaagtccacagtctccctcctccggcgccgaggcggccgacgaagactcaaacgatagccccgcgtccagctcctctagacctttgaaagtcagaatcaagactatcaaaactagttgtggcaacataacacgaaccgtgacccaggtgccttctgaccccgacccgcctgctccactggccgagggcgcctttctggccgaggcaagcttactgaagctctctcctgccacacctactagtgagggcccaaaagttgtaagcgtgcaactgggagatgggaccaggttaaaagggactgtcctgccggtagctacaatacaaaatgccagtacagctatgctcatggcagcttcagtggcgcgcaaggcagtcgtgctgcccggaggcacagcaacatctcctaaaatgatcgctaaaaacgtcctggggctggtgcctcaggccctgcccaaagccgatggcagagctggtctgggaaccggaggccagaaggtgaacggggccagcgtggtaatggtccagccctcaaagaccgccacagggccctccactggcgggggtactgtgatcagcaggacccagtccagccttgtggaagcctttaacaaaatcctgaactctaagaacctgctgccagcctacaggccaaatcttagtccccctgcagaggccggtctcgcattgccccctacagggtacaggtgcctggagtgcggcgacgctttctctctggaaaagtctctcgccagacattacgaccgaagaagcatgagaatcgaggttacgtgcaatcactgcgctaggcgtctggttttttttaataagtgttccttgctgctgcatgctagggagcataaagacaagggactggtgatgcaatgttctcatttagtcatgagaccggttgccctggaccagatggtgggtcagcctgatattaccccactgctgcctgtggcagtgcctcctgtgagcggacccctggctctgcctgcgcttggcaagggtgagggggccatcacatcttctgccatcaccacagtggctgctgaggcacccgttttgccactatcaactgaacccccagcagcccctgcaacttcggcttacacatgcttccgttgtctcgagtgtaaagagcagtgcagggacaaggccggcatggcagcgcatttccaacagctgggccctcctgcccctggtgctaccagcaacgtctgcccaacatgtcctatgatgttaccaaaccggtgctcatttagtgcacatcagcggatgcataagaatcgccctcctcatgtgtgccctgagtgtggaggaaacttcctacaggccaactttcagacccatctgcgagaggcatgtctgcatgtctcaaggagagtcggctatcgttgcccatcctgttctgtggtgttcggcggcgtgaactcaatcaagagccacatccaaacatcccactgtgaagtcttccacaagtgccccatttgcccgatggcctttaaatccggacctagcgcccatgctcacctttattctcagcacccatcattccagactcagcaggccaagctaatatataagtgtgcgatgtgcgacacagttttcactcacaagcctctgttatctagtcacttcgaccagcacttactgccacagcgcgtcagcgtgttcaagtgtccatcatgtccactgctattcgctcaaaagcggacaatgctggagcacctgaaaaacacccaccagtctggacggctagaagaaacagctggaaaaggggcgggaggggcactcctgacacctaagactgaacctgaggagctcgctgtgtcccagggcggggccgcccccgccaccgaagagagtagctcaagctccgaggaagaggaagttccttcaagtcccgaacctcctcggcctgctaagcgcccccgtcgtgagctcgggagtaaaggtctgaagggagggggagggggtcctgggggctggacctgcgggctctgtcattcctggttcccagagagagacgagtatgtggctcacatgaagaaagaacacggcaaatcagtcaagaagttcccatgccggttgtgtgaaagaagtttttgcagtgcaccttcactcagacggcacgtccgcgtcaaccatgaaggcattaaaagggtctacccttgccgatattgtactgaaggaaagaggacgtttagctccaggctgatcctcgaaaaacacgtccaagtgagacatggcctgcagctcggcgcacagtcaccagggagaggcaccacacttgctcggggatcttccgctagggctcagggcccggggcgcaagcgccggcagagctccgatagctgttcggaggagcctgacagcaccacacccccagctaaatctcctagaggtggacccgggtctggaggccatggtccactgcggtatagaagcagttcctccaccgagcagtccctgatgatgggcctccgggtagaagatggggcgcagcagtgtctggactgtggcttatgcttcgctagtccaggcagccttagtaggcatcggtttatcagccacaagaaaagaagaggggtcgggaaggcaagcgccttgggcctaggtgatggcgaggaggaagcccccccctcaaggtctgatcctgatggcggagattcacctttgccggcttctgggggaccgttgacctgcaaggtgtgcggaaagtcctgcgacagtcctttaaacttgaaaacgcacttccggacccacggcatggcttttattagggcgcgccaaggcgctgtgggagacaattag

SEQ ID NO: 116354 - DNA, 3714 bp, Artificial Sequence
  derived and/or modified sequence
atgggcgacatgaagacccccgacttcgacgacctgctggccgcctttgacatcccagacatcgatgccaatgaagctattcacagcggccctgaagagaacgagggccctggtggtcctggcaaacccgaacccggtgtcggcagcgaatccgaagatactgctgcagcatcagcaggcgacggccctggggtacccgcacaggcctccgaccatggtttaccacccccagacatcagcgtcgtgagcgtgatcgtgaagaatacggtctgtccagagcagtcggaagcgctcgccggagggagcgctggtgacggggctcaagccgccggcgtgactaaggaagggcctgtcgggcctcaccgcatgcagaatggcttcggaagccccgagcctagcttaccgggcaccccccacagcccagctcccccttcagggggaacttggaaggagaaaggaatggagggaaaaactccgttggacttatttgcccatttcggtccagagcccggcgatcacagtgatcccctgccgccttcggctcccagtcccacaagggaaggcgctcttaccccgccacctttcccctcaagtttcgagttggcccaagagaacggaccgggaatgcagcccccagtgtcaagcccacctttaggagcgctgaagcaggaatcttgctcaccacatcacccacaggtgctggcccagcaaggatcaggaagctcaccaaaggccacagacatccctgccagcgccagccccccccccgtggctggggtaccattctttaagcagagccccggtcatcagtctcctcttgcaagtcccaaggtccccgtgtgtcaaccactcaaggaagaggatgatgatgagggaccggtcgacaaatcaagccccggttccccacagagtccatcttcaggagctgaagccgcagacgaggactcgaacgacagcccagcgtctagctctagtcggcccttaaaggtacgcattaaaaccataaagacatcttgtggtaacattacacgcaccgtgactcaggtccccagcgaccctgaccctcccgcccctctggccgaaggcgcttttttggctgaagcttccctccttaaactgtcccctgcaacccctacgtctgagggaccaaaggtggtgtcagtgcagctcggtgacgggacccgtctgaaaggcacagtcctgccagtcgcaactatacagaacgcgtccactgctatgttgatggccgccagcgtcgcccgcaaggcggttgtacttccgggaggtactgctacatctcccaaaatgatcgctaagaacgtactcgggctcgtgcctcaagccctgcccaaagctgacggcagagccggccttggaacaggcgggcaaaaagtgaatggcgcctcggtggtaatggtgcagccatctaaaaccgcgactggaccctccacaggcggaggaactgtgatctctcgaacccagagcagccttgtcgaagcctttaacaaaatcctcaattcaaagaatctactgccggcctatagacctaaccttagccccccagcggaggcaggtctggccctgccaccgacagggtatcgctgcctcgagtgtggagacgcctttagcctcgagaaatccctggcacgccattacgataggcggtccatgcggatcgaggttacatgcaatcactgcgcgagacgcttggtattttttaacaagtgctccctgttgctgcacgcgagagaacataaagacaagggtcttgtcatgcagtgttcacatttggtgatgagaccagtggctctggaccagatggtgggacagcccgacatcacccctctgctacctgtggctgtgccgcctgtctctggtccactggccttgcccgccctcggaaagggagagggggctattacctctagtgcaattacaaccgttgcagctgaggccccagtgttacccctgtcaacagaaccaccagccgcccctgcaacttcggcctacacatgcttccggtgcctggaatgcaaggagcagtgtcgggacaaagccgggatggctgcacacttccagcaacttggtccgcctgcacctggcgccaccagcaacgtctgccctacctgccctatgatgctgcccaacaggtgcagcttttccgcacatcaacggatgcacaaaaatcgtcctccccatgtgtgtccggagtgcggcggaaatttcctgcaggctaactttcaaacccacctgcgagaggcttgcctgcatgtgagccggagggtgggctatcgctgccccagctgctccgttgttttcgggggagtcaactccatcaagtctcacatccagacgagtcactgcgaggtgtttcacaagtgtccaatctgcccaatggccttcaagtccggaccatccgcccacgcacacttgtattcgcagcatccttccttccagactcagcaagctaagctcatctataaatgtgccatgtgtgatacggtgttcactcataagccactcctgtccagccacttcgatcagcacttgctcccgcaacgagtctccgtcttcaaatgtccatcttgtcccctgctttttgctcagaaaagaaccatgttggagcacttgaaaaacactcatcagtccggcagactggaagagacagccggtaaaggcgccggcggcgctttgttgacacccaaaaccgagcctgaagagctggcagtctcccaggggggagccgcccccgcaacagaggagagcagtagcagttccgaggaagaggaggtaccttctagccccgagccccccaggcccgccaaacgccccaggcgcgagctaggctcaaaaggtctgaagggcggggggggcggtcctgggggttggacctgcggtttatgccacagctggttccccgaacgcgacgaatacgtggcccatatgaaaaaggaacacggcaaatccgtaaaaaaattcccctgcaggctgtgcgagaggtcattttgcagtgcacctagtttgcgtaggcatgtgagagtgaatcatgagggaattaaaagggtgtatccctgtagatactgcaccgaagggaaacgaacattctctagccgcttgatccttgagaaacatgttcaggtccggcacggcctgcagctcggggctcaaagcccagggcggggaacgacgctggcccgaggatcctctgctcgggctcagggcccaggaaggaagcgccgccagtcgtccgacagctgctctgaagagcctgattctactacgccaccagccaagagtcctagagggggacccggctccggagggcacggccctttgagatatcggagcagtagctctactgaacaatcattgatgatgggactgagggtggaggatggtgcacagcaatgtctggactgtggcctgtgtttcgctagtcctggcagtctatctcgccacaggtttattagccacaaaaaacgccgaggagtggggaaggcgagcgcactcggtcttggggatggagaggaggaggctcctccgagccgatccgacccggacggaggcgatagtcccctacccgcgtctggcggtcccctgacctgcaaggtgtgtggcaagtcatgcgactccccacttaatcttaagacccactttcgcacccatggaatggctttcatccgggcgaggcagggagccgtgggtgacaactag

SEQ ID NO: 116355 - DNA, 3312 bp, Artificial Sequence
  derived and/or modified sequence
atgggcgacatgaagacccccgacttcgacgacctgctggccgccttcgatataccggatattgatgcaaacgaagccatccattcgggaccggaggaaaatgaggggccagggggccccggcaaacctgaaccgggggtcggttccgaatctgaagacacggccgctgcgagtgccggggatggaccgggcgtccctgcccaggctagtgatcacggcctgcctccccccgatattagcgtggtgtccgtgatagttaaaaataccgtgtgtccagagcagtcagaggccctcgcaggaggatctgccggcgacggggcgcaagccgccggggtgacgaaggaggggccagtcgggcctcaccgcatgcagaatggtttcggcagcccggaaccttcactgcccggaacaccccacagccctgctcctcctagtggggggacctggaaagagaaaggcatggagggaaagacccctctggatctgtttgcacatttcggccctgaaccgggagatcacagcgatccccttccgcccagtgctccgtctcctacacgggagggcgcactcaccccccctccctttcctagttcttttgaactggcccaggagaacggacccggtatgcagccacccgtgtccagcccacctctcggagccctcaaacaggagagttgtagtccccatcacccacaggtccttgctcagcagggttccggcagtagtccaaaagccaccgatatcccagcctccgcttcgcctcctcccgttgcaggggtgccctttttcaagcaatcacctggtcaccagtcccctctggcctctccaaaagtaccagtttgccagccccttaaggaggaggacgatgacgaagggccagtcgataagagttcacccggctcacctcagagtccttcatcaggcgccgaggccgctgacgaggatagtaacgacagcccagcaagttcctcatcccggcctttgaaagtacgcatcaagacgatcaaaaccagctgtggaaatatcacaaggaccgtgacccaggtaccttctgatccagatccccccgctcctctggccgaaggtgcttttctggccgaggcgtcccttctcaagctaagcccagcaacaccaacatctgaaggcccaaaggtggtatccgttcagctaggcgatggaacccgcttaaagggcaccgtattgccggtggctactatccagaacgcttcgacagcgatgctcatggcagctagcgttgcgaggaaagcagtcgttcttcctggcgggaccgccacatcccctaagatgatcgccaagaacgtactggggttggttccccaggcactgcccaaggcggacggcagagcgggcctaggcaccggcgggcagaaagtgaatggggcgtctgtcgttatggttcagcccagtaagacggccaccggccccagcaccggcggtgggactgtgatatcgcgaacgcaaagctcgttagtggaagcttttaataaaatcttgaattctaaaaatttgctcccagcctatagacctaacttatcaccgccagctgaggccggattggctttgccccccactggctatagatgtcttgaatgtggagacgccttcagccttgaaaagtccctggcccgacattatgacaggaggtcaatgaggatagaagtcacgtgcaaccactgtgcccgaaggttagtttttttcaataagtgcagcttgctgctgcacgctcgggagcacaaagataaaggcctcgttatgcagtgctctcacctagtcatgaggccagtggcattggatcagatggtagggcagcccgacattaccccactcctgccagttgctgtccccccggtgtcagggccgttagctctgccagcacttggcaagggagaaggagccattacaagtagcgccatcactaccgtcgccgcggaggcacccgtacttcctctttctacagagcctcctgctgcccctgctacgtcggcatacacctgcttccgatgtctagagtgtaaggagcagtgcagagataaagctggaatggccgctcactttcagcagctggggccgcccgctcctggcgctacctcgaatgtgtgccccacatgccccatgatgctgcctaaccggtgttcctttagtgcgcaccagcgaatgcacaagaacagacctccgcacgtgtgtccagagtgcggaggaaacttcctgcaggctaacttccaaacccacctgcgcgaggcatgtcttcacgtgtctcggagagtggggtacaggtgccctagttgttccgttgttttcggtggcgtaaacagtataaaatcacatattcagacttcccactgcgaagtgtttcacaagtgcccgatttgcccgatggcctttaaaagcgggcccagtgcacacgcacacctctattctcaacatcctagtttccagacacagcaagccaaactgatttacaaatgtgcgatgtgtgatacagtcttcacccataaacccctgctttctagccactttgaccagcatctgttgccccagcgtgtgtccgttttcaagtgtccctcatgtccgctgctgtttgcgcagaaacgcactatgctggaacacctgaaaaacacacaccagagcggacgtttagaggagacagccggtaaaggcgcgggcggcgcccttttgacccctaagactgagccggaggagcttgctgtatcccagggcggcgcagctccagccaccgaagagtccagcagcagcagcgaagaggaggaagtcccctcttccccagagccaccccggccagctaagaggccccggagggaactggggagcaagggtctaaagggtggcggcggcggacccggcggatggacatgcggtctgtgccattcatggtttcctgagcgggatgagtacgttgcccatatgaagaaagagcacggtaaatcagtgaaaaagtttccctgtagactttgcgagcggtccttttgtagcgccccgagcctaaggcggcacgtcagagtgaatcatgagggtataaagagggtgtacccatgtaggagtaagggtcctggcctcagagccgtgccacttcttccatcatgtccactgccgttccaggtgctacaccgaggaaagactcatctgcaacagccccccgacccccgcgaaacctgtccaggccctgcccgcctggctgcatggggtcccgtaccttggcccggcgaccatcttggctcaggattccagtgtcaaagtcctggcgctcgatctgagacaccgcctgtgttttag

SEQ ID NO: 116356 - DNA, 2121 bp, Artificial Sequence
  derived and/or modified sequence
tgaaccgtgctgcccgtggccaccatccagaacgccagcaccgccatgctgatggcagctagcgtcgctagaaaggccgtggtccttcccggcgggaccgctacatcaccaaagatgattgcaaaaaacgttctaggactggtccctcaggcacttcctaaagctgacggtagggctggcttagggacgggggggcagaaggtgaacggcgccagcgtagtgatggtgcagccctcaaagaccgctacaggacctagtactggtgggggaaccgtgatctccaggactcaaagctccctcgtagaggcattcaacaaaattctgaactccaagaacctgctcccagcatacagaccgaatctcagtccgcccgccgaagcaggtctggccctgcctcccacaggctaccgatgcttggagtgcggagacgcatttagtctggagaagtccttagctcggcactatgacaggcggagcatgcgcatcgaggtaacctgcaaccactgcgcccgtcgtctagttttcttcaacaagtgctccctgttgttgcacgcccgggaacataaggacaaaggactggtcatgcagtgctcgcacttggtgatgcggccagttgcgcttgaccagatggttggccaacccgatattacacctctgttgcctgttgccgtgccacccgtgtccggacctctggctctgccggccctaggaaagggcgaaggggctattaccagctctgctatcacaacagtggctgctgaggctcccgtgctgcccctgtctacagaaccacctgcggcgcccgcaacttccgcctacacctgcttccggtgcctggagtgcaaagagcaatgtagagacaaggctggaatggccgcccacttccaacagctcgggcctcccgctcccggagccacctccaacgtgtgtcccacttgtccgatgatgctccctaacaggtgttccttctctgcccaccaacgtatgcataagaaccgtccccctcatgtttgtccagagtgtgggggaaactttctgcaggcaaattttcagactcaccttcgggaggcctgtttacacgtgagtcgcagagtgggatatcggtgtccatcttgttctgtagtattcggaggcgtgaattccattaagagccacattcagacatcccactgtgaggtttttcacaagtgtccaatttgccccatggcttttaaatctgggccaagcgcccatgcccacctatatagtcagcacccatccttccaaacccaacaagctaaattaatctacaaatgtgcaatgtgtgatacagtgttcacgcacaaacctttgctttcctctcatttcgaccaacacctgctgccacagcgagtgtccgtattcaaatgtcccagttgtccgctgctctttgcccagaagaggacaatgctggaacatctcaaaaatacacaccaatccggcagactggaggagacagcaggcaaaggagctgggggtgcccttctgacgcctaagaccgaaccggaggagttagctgtttcccaggggggcgcagcaccagcaacagaggaatctagttcttcttcagaggaagaagaagtgccttctagccccgagccacccagacccgccaagcgacctaggcgggaactggggtcaaaaggattgaaaggcggaggtggcggccctggcggatggacctgcggtctctgtcattcgtggtttcctgagagggatgaatatgtagcacatatgaagaaagaacacggcaaaagcgttaaaaaatttccctgtcgcctgtgcgagaggagcttttgttccgcccccagcctgcggcgacacgtgcgcgttaatcatgaagggatcaaacgcgtctacccctgcagatccaaaggaccagggctgagagctgtgccactgctgccctcttgccctctgccttttcaagtgttgcatagagggaaaacccacttgcagcaaccacccgatccacgcgaaacctgtcccgggcccgcacggttagcggcttggggtccagtgccgtggccgggtgatcatctcgggagtggttttcagtgtcagtcaccgggtgcccgtagtgaaaccccacctgtattctag

SEQ ID NO: 116357 - DNA, 3714 bp, Artificial Sequence
  derived and/or modified sequence
atgggcgacatgaaaacccccgacttcgatgacctactcgctgccttcgatattccagacatcgacgctaatgaagcaatccatagcggacctgaggaaaacgaagggcctggcggacctgggaaacccgagcctggagtcggcagcgaaagcgaagatacggccgcagcgagcgccggagatggtcctggggtgccagcccaggcttctgaccacggcctccctccacccgatataagcgtggtgagcgttatcgtcaagaatacggtgtgcccagagcagtctgaggccctagctgggggatcagccggagacggggctcaggccgctggtgtgaccaaagagggccctgtgggcccacatcgcatgcagaacggctttggctcccctgagccctctttaccaggcaccccccatagccccgcaccccctagcggtggcacttggaaagagaaggggatggagggaaaaactcccctggatttgtttgctcatttcggtcctgaaccaggagatcactctgacccactgccaccttcagccccaagtcccacacgggaaggggcactcacccccccaccctttccaagcagcttcgaactggcgcaggaaaatggacccggaatgcagccccctgtgtcttccccacctctgggagcgctgaagcaggaaagctgttcccctcatcatccacaagtcctcgctcagcaaggctcaggaagctcgccgaaggctacagatattcccgcttcagccagccctccaccggtcgcgggagtaccattctttaagcagtcccccggtcaccagtcacctctggcttctcccaaagttccagtgtgtcagccccttaaggaggaagatgacgatgaaggcccagtcgacaaatccagccccggtagtccccaaagcccatcatctggcgctgaggccgctgacgaggactccaacgatagtccagcgtcatcctccagcaggcctttaaaggtaaggattaagactatcaagacatcctgtggcaatatcaccagaactgttacacaggtccctagcgaccctgaccccccagctcccctagctgagggcgcttttctggctgaagccagcctgctgaaattgagcccagcgactccgacatccgaggggcctaaggtcgtgagtgtgcaactaggcgacggcactagactaaaagggacagtgctaccagtggcgaccatccagaacgcttctaccgccatgcttatggccgctagcgttgcacgaaaggctgtagtgctgcccggtggtaccgcaacatcacccaagatgatcgctaaaaatgtcctgggtctagttcctcaggctctgcctaaggctgacggacgcgctggcctgggaacagggggacagaaagtgaatggggcttctgttgttatggtccagccctctaagacggcaactggcccttcaacagggggaggcacggttatcagtagaactcagagttctctcgtggaggccttcaacaagatattgaatagcaagaatctgctacctgcttataggcccaacctgtcccctccagcggaagcgggattggctctccctccaacaggctataggtgtcttgagtgcggggatgcgtttagtctcgagaaaagcttggcccgtcattatgataggagatcaatgagaattgaagtaacttgtaatcactgtgctagacgcctggtgttttttaacaaatgttctttactgctacacgccagggaacacaaagataaggggctggtgatgcagtgtagccacttggtcatgagacctgtggcgctcgaccagatggtcggacagcctgatattacaccgttgctgccggtcgctgtcccccctgtcagcggtccattagccttgcctgccctcgggaagggtgaaggagccattactagctcagccattactaccgtagctgctgaggcgcctgtgttaccactgagcaccgagccacccgcagcccctgctacgtccgcctatacctgctttcgctgccttgagtgtaaagaacagtgccgcgataaggcagggatggctgcacatttccagcagttaggaccaccagcgccaggggcaacaagcaatgtgtgtcctacgtgtcctatgatgcttcccaatagatgtagcttctcagctcaccagcgtatgcacaaaaatcggcctccgcacgtctgccctgagtgcgggggtaattttctacaagcaaacttccagacccatctccgcgaggcatgcctccacgtcagtaggagggttgggtatagatgtccgtcctgttcagttgtcttcggaggtgttaattccatcaagtctcacatacagaccagtcattgtgaggtgtttcacaaatgccccatttgccccatggcctttaagtcggggccaagcgcacatgcccacctgtacagccagcatccaagcttccagacccaacaggccaagttgatctacaagtgcgctatgtgtgacactgtctttacacataaacccttgttatcttcccattttgaccagcacctgttgcctcagagagtctctgttttcaaatgcccaagttgtcctcttctgttcgcccagaaaaggacaatgcttgagcacctcaagaacacacaccagagtggcagacttgaagaaaccgccggaaaaggcgcaggcggtgccctgttaacccctaaaactgagccagaggagctggccgtgagccagggtggagctgcacctgctacagaggagtcctctagcagctcagaagaggaagaggtaccttcctcccctgagccccctagacccgctaagcggccacggcgagaacttgggagtaagggcttgaagggaggcggagggggtccaggcggttggacttgcgggctctgccactcttggttccccgagcgggacgagtacgtggcacatatgaagaaggagcatgggaaaagtgtcaaaaagtttccttgcaggctgtgtgagcgctcattttgctcagcacccagccttcgccgacacgtaagagtgaatcatgagggcatcaagagagtctacccctgtcgttattgcactgagggaaagcgaacattctcctcaagattgatcctcgaaaaacatgtgcaggtaagacatgggcttcagttgggcgctcagtctccagggagaggtactactctggcaagggggtcttcggctagagctcagggaccaggtcgtaagcgacgtcagtcttccgactcatgctctgaagagccagactcgactaccccgccagctaagagcccacgcggaggcccaggctccgggggacacggacctctgaggtataggagctcttctagcactgagcagtccctcatgatggggctgagagtggaggatggagcacagcagtgtttggattgcggcctgtgtttcgcttctcctggctccctcagtcggcataggtttatatctcacaagaaacggaggggcgtcggtaaagcctccgctctggggttaggagatggagaggaggaggcaccacccagtcgcagcgaccctgacggcggtgatagccctctgccagcatcgggtggaccattaacctgcaaggtctgtggtaagagctgcgacagcccactgaacttgaagacgcatttccgcacacatgggatggccttcatccgcgcacggcagggtgcagtaggcgacaactag

SEQ ID NO: 116358 - DNA, 3714 bp, Artificial Sequence
  derived and/or modified sequence
atgggcgacatgaagacaccagattttgacgatctgcttgctgcgtttgacattccagacattgacgccaatgaagccattcacagtgggcctgaggagaacgagggacccggagggccaggcaagcccgagccaggtgtgggatcggagtctgaggacacagccgctgccagcgccggagatggaccgggagtgccggcacaagcgagtgatcacggtctcccaccacctgatatctcggtggtctctgtaatcgttaaaaacaccgtttgcccagaacagtccgaagccctggccggtgggtctgctggtgatggagcccaggccgctggagtgactaaggaggggcctgtggggcctcacaggatgcaaaatggattcggatcacccgaaccttctctacctggtactccacacagtcctgctccccctagtgggggaacctggaaggagaaaggcatggaggggaaaactccattagacttgttcgcacattttgggccagaacctggcgaccacagtgatcccctgcccccaagtgccccatcaccaactagagaaggtgctctgactcccccacccttcccctcttctttcgaactggctcaagaaaatggaccaggcatgcaaccaccagtttcttctcctccactgggagccctcaaacaggaatcttgttctcctcatcatccgcaggtcctggctcagcagggcagtggctcaagcccaaaggctacagatatccctgccagtgcatcgcctccacccgtagctggtgttccgttcttcaaacagtccccaggccatcaatcaccactcgcgtccccaaaggtccccgtttgtcaacctctaaaggaagaagacgatgacgagggccctgtggataagtcttcaccaggatccccccaatcccccagctcaggggcagaagccgctgatgaagacagtaatgatagccccgctagcagtagctcaagaccccttaaagttcgcattaagactattaagacctcttgtggaaacattacgagaacagtcactcaggtacctagcgacccagacccacccgctccgctcgccgagggtgccttcctagccgaggcctccttgctgaagctctcacccgctaccccaacttcagaagggcctaaagtcgtgtctgtgcaactgggcgatggaacccgccttaaggggactgtcttacccgttgccaccatacaaaacgcgagcaccgccatgctgatggccgcatccgttgcaaggaaggctgtggtcctgcccggtggaaccgcgacttcgcctaagatgatcgcgaaaaatgttctggggctggtgccgcaagccctacccaaagcagatgggagagctgggctgggcacagggggacagaaggtgaacggtgcttccgttgtgatggtgcagccatctaaaacagcaaccggtccttccacagggggaggaacagtcatctctagaacccaaagcagcttagtcgaagcttttaacaaaatcttgaattcaaagaacctcttgcccgcatatcgcccaaatctgtccccaccagccgaggccggactggctctaccacccactgggtaccggtgcctcgaatgcggcgacgcgttctcattggagaagtcactcgcacgacattatgatcggaggtctatgcgcattgaggttacctgtaatcactgtgccaggcgtctagtgttcttcaataagtgctccctgctgttgcatgcacgtgagcacaaggataaggggctggtaatgcagtgcagccatttggtgatgaggcctgttgctctggatcagatggtggggcagccagacatcacaccgcttctgcctgtggccgtgccccctgtaagcgggccattggccctcccggctcttggtaagggcgaaggcgctataaccagcagcgccatcacgaccgtcgccgctgaggctcctgtgctgcccctctccactgaaccccctgctgcccctgcgactagcgcctacacctgcttcagatgtcttgaatgtaaggaacagtgtagagacaaagcgggaatggctgcccacttccaacagctcggcccaccagctccgggagccacctcaaacgtgtgtcccacgtgcccaatgatgctgcctaataggtgctctttttccgcccaccaacgcatgcataagaaccgaccgcctcatgtatgcccagaatgcgggggtaacttcctccaggcgaatttccaaacacacttgcgtgaagcatgtcttcatgtcagtcgcagggtggggtatcgctgtcccagttgtagcgtcgtttttggcggagtcaactcaattaagagtcatattcagaccagccattgtgaagtgttccataaatgcccgatatgtcccatggccttcaaatcaggaccgtctgcacacgcccacttatattctcagcatcctagcttccagacacagcaagccaagctgatctataagtgcgccatgtgcgataccgtcttcacccacaagcctctgctcagctcccactttgatcagcatttgcttccacaacgtgtttccgtattcaaatgtccatcgtgccccttgctctttgcccaaaaacggacaatgctcgagcaccttaagaatactcaccagtcaggcaggcttgaggaaaccgcgggaaagggtgccggaggggctctgcttacccctaagacggagccagaggaactcgctgtttcgcaaggaggggcagccccagctacagaggaaagcagctcctctagcgaggaagaggaggtcccaagcagtcccgagcctcctcggccagccaagcggcctagaagggagctgggctcaaaagggctgaagggtggagggggaggaccagggggatggacctgcggcctgtgtcatagttggtttcctgaaagagatgagtatgtggctcacatgaagaaagagcacggtaagtctgttaagaagtttccctgtaggctttgcgagcgaagcttttgctcagccccttccctgagaagacacgtgcgtgtgaaccatgaggggatcaaacgcgtgtatccttgcagatattgtacagagggcaagagaactttctccagccgcctgatcctggaaaagcatgtacaggtgcgtcacggacttcagctgggcgcacaatctcctggacggggaacaacactggctcgagggagctcagctcgggcacagggtcccggtaggaagagacgccagtcgtcagatagttgtagcgaggagcccgacagcaccactcctcccgctaagagccctcgtgggggtccgggttctggtggccatggacctctacgctatagatcctcaagcagcaccgagcagtcacttatgatggggctacgggtggaagatggagcgcagcagtgtctcgactgcggcttgtgcttcgcttctcctggctcactctctcggcaccgctttatatcgcacaagaagcgaagaggtgtgggaaaagcgtcagcactgggtttgggggatggcgaggaggaagccccaccgagtcgatccgacccagatggcggagactctcctctacccgcaagtggaggacccctgacctgtaaagtatgtggaaagagttgtgacagccctctgaaccttaagactcacttcaggacccatggcatggcatttattcgcgcacgacagggcgctgtgggtgataattag

SEQ ID NO: 116359 - DNA, 3312 bp, Artificial Sequence
  derived and/or modified sequence
atgggtgacatgaagactccagatttcgacgaccttctggcagcatttgatatccccgatattgatgcaaatgaagccatacattctggcccagaagaaaacgagggtcctggtgggcctggcaagcccgagcccggtgtcggctccgagtccgaggacaccgcagctgccagcgccggagacggcccaggggtccctgcgcaggccagcgatcacgggctcccaccgcctgatatttccgtggtctccgtgatagtgaaaaataccgtgtgtccagaacagagcgaggccttggcaggtgggtctgctggagatggggctcaggccgcaggcgtcacaaaggagggacccgtggggccacaccggatgcagaacggcttcggcagtccagagccgtctcttccaggcacgcctcattcaccagccccacctagcggcggaacttggaaggaaaaggggatggaggggaaaacacctcttgatctctttgcgcacttcggaccagagcctggggaccacagcgacccacttccgccttcggccccttccccaaccagggaaggggcactgacccctcctccgtttccgagctcctttgagttggcacaggagaatgggcctggcatgcagccccctgtctcctcaccacccctgggcgctctgaaacaggagagctgctcaccacatcaccctcaagtgctggcccagcagggatccggctcaagtccaaaagccaccgacattccagctagcgcatccccaccacctgtcgctggtgttccatttttcaaacaaagccccggtcaccagtccccgttagcttccccgaaagtccctgtctgccagcccttgaaggaggaggacgacgatgagggaccagttgataaaagtagtcccggatctccacaaagccccagctcgggcgcagaggcagcagatgaagactccaacgactcaccagctagctctagctccaggcccctcaaggttaggataaaaaccataaaaaccagctgtggcaatattacaagaacagtgacccaggttccttctgaccccgacccgccagctcctctggccgagggtgctttccttgcggaagcatctttactgaaactgtcccccgctacccctacctcagaaggccctaaagtggtgtcagtccaactgggggatgggactcggcttaagggcactgtgctgcccgtggccaccattcaaaacgcttctactgctatgttaatggctgccagcgtcgctcggaaggcagtggtgttaccaggcggtacagccacatcacctaagatgatcgcaaaaaacgtgctgggactggttccacaggcattgcctaaggcagatggacgggcagggctcggcacaggaggccagaaagtaaatggagccagcgttgtcatggtccagccaagtaagaccgccacaggtccatccaccggaggtggcaccgtgatctcacgtactcagagtagcctagtcgaagctttcaacaagatcctgaattctaaaaacctacttccagcttaccggcctaacctgagcccgccagccgaggctgggcttgcattacccccaacagggtaccggtgcctggaatgtggggatgccttctccctggaaaaatccctggcccgtcactatgaccggaggtcaatgcgtattgaggtgacatgcaaccattgcgctcgcaggttggtcttttttaataagtgtagcctactgctccacgcaagggaacataaggacaagggactggtcatgcaatgctctcaccttgtcatgcgacccgtggcgctggaccagatggtaggccagcctgacattacaccactcctgcctgtggccgtgccacccgtttcaggcccactggcactgcctgctctaggcaaaggcgagggcgcaatcacgagctccgccatcactacggttgctgctgaggcccctgtgctgcctttatcgactgagccccctgcagccccagccacttcggcttacacttgctttcgttgtctcgaatgcaaggagcagtgtagggacaaggccggaatggccgcacattttcaacagttgggtccccctgcccctggggcaacgtccaacgtttgtccgacctgtccaatgatgctgcctaacaggtgctctttcagcgcacaccaaaggatgcataaaaatagacctccccatgtgtgccccgagtgcgggggtaattttctgcaggccaattttcagactcatctgcgtgaagcctgcctacacgttagtagacgggttggctaccgttgcccctcatgcagtgtggtattcgggggtgtaaacagcatcaaatcccacatacaaacctcgcattgtgaagtgtttcataagtgcccgatctgtccgatggccttcaaaagcggaccttctgcacatgcgcacctgtattcgcagcatccttctttccaaacccagcaggccaaactcatttacaaatgcgccatgtgcgacaccgtttttacccataaaccacttttaagctcccacttcgatcagcatctcctgccacagcgtgtgtctgtttttaaatgcccgtcctgccccctgctctttgctcaaaagcggactatgttggagcaccttaaaaacactcatcagtcaggccgacttgaggagaccgcgggtaagggggcaggaggggcactgttgaccccaaagaccgaaccggaggagctggccgtttcacaaggcggagctgcacctgctacagaagaatcaagcagcagctccgaggaagaagaggtaccgtccagtcccgaaccccctcggcctgcaaaaaggccaagacgcgagcttggcagcaaagggctgaagggcggagggggtggccctggcggatggacgtgcggactttgtcactcttggttcccagagcgcgatgagtacgtcgcgcatatgaagaaggaacatggaaagagtgtcaagaagttcccttgccggctgtgtgagagatcgttctgttccgctccatcactaaggcgtcacgttcgggtaaatcatgagggcatcaaacgggtctatccttgccgcagtaaaggtccaggactgcgagcagtgcccttacttccctcttgtcctctaccattccaggtgttgcaccggggaaagacccatctgcagcagccaccagacccacgcgaaacctgtcccggacccgctagattggcagcctgggggcctgtgccctggcccggagaccatcttggctctggattccaatgtcaaagcccaggcgctagatctgagacgcctcccgtgttttag

SEQ ID NO: 116360 - DNA, 2121 bp, Artificial Sequence
  derived and/or modified sequence
tgaactgtgttgccagtagccaccattcagaatgcttccacagccatgttgatggcggcttccgtggcgagaaaggctgtcgtcctaccaggcggaaccgcaacatctcccaagatgatcgccaaaaacgtacttggcctagttcctcaagcattacccaaagccgacgggagagccggactcggcacaggtgggcagaaagtaaacggcgcttccgtggtcatggttcaacctagtaagaccgcaaccggacctagtaccggcggtggcacagtaatcagcagaacccagtcctccctcgtcgaagccttcaacaaaatccttaacagcaagaatcttctgcccgcatatcgacccaacttaagtccacccgctgaagccggacttgcactaccacccacagggtacagatgcctggagtgcggcgacgccttcagtcttgagaagtctctggctcggcattacgatcgcaggtcaatgcgcattgaagtgacctgcaatcactgtgccaggcgacttgtatttttcaacaaatgctccctgttgttgcatgcgagggagcacaaggacaagggattagtcatgcagtgcagccacttagtcatgcgccctgtggctctcgatcaaatggtgggccagccagacattacgcccttgcttcctgttgccgtaccacccgtatccggaccattagcactaccggcactcggaaagggcgagggcgctatcacaagctctgccatcactacagtagcagcggaagcccctgtgctgcctttgtcaacagagccaccggctgcccctgcaacatccgcctacacatgcttccggtgccttgagtgtaaagagcagtgcagagataaggccggaatggcagctcattttcaacagttgggcccacccgcaccgggagcaacttcaaacgtgtgccccacgtgtcccatgatgctgcccaatagatgctctttttccgctcatcagcggatgcacaagaaccgaccgccacacgtatgccccgagtgcggaggcaactttctgcaggcgaactttcaaactcatctgcgcgaggcctgtttacatgtgtccagaagggtaggctacaggtgcccatcgtgtagtgtcgtttttggaggcgttaattccattaaatctcatattcaaaccagccattgtgaggtctttcacaaatgtcccatttgcccaatggcttttaaaagcgggccttccgcacacgcccacctgtacagccagcatcctagctttcaaacccaacaagcgaagctgatttacaagtgcgcaatgtgtgatacagttttcacccacaaacccttgttgtccagccattttgatcagcacctattaccgcagcgagtttcagttttcaaatgtccctcgtgcccactgctatttgcacagaaaaggacaatgctggagcacctcaagaacactcatcagtctggtagacttgaggagacagccggtaagggcgctgggggagccctgttaacacctaagacggaacccgaggaactggccgtctctcagggaggtgctgcgccagctaccgaggaatcttcttccagttctgaggaggaggaagtcccatcctcgcccgaacccccaaggcccgcaaaaaggccgagaagagaactgggcagtaaggggttaaaaggtggaggcggaggacccggtggatggacatgcggcctgtgtcattcctggttcccagagcgcgacgagtacgttgcacatatgaaaaaggaacacggaaaatctgtgaagaagttcccttgccgcctgtgtgagcgctcattctgctccgcacccagtctgcgcaggcacgtgagagtcaaccacgagggaattaagcgcgtatatccctgtcgaagtaagggcccagggttgagagccgtgccccttctccccagttgcccactgccattccaggttcttcatagggggaagactcaccttcagcagccgccagatcccagagaaacctgtcccggtccagcgagacttgcggcttgggggccagtaccctggccaggcgatcatctcggtagcgggttccagtgccagagccccggagccaggagcgaaacccctcctgtgttttag

SEQ ID NO: 116361 - DNA, 3277 bp, Artificial Sequence
  derived and/or modified sequence
gcactgtgctgcctgtggccaccatccagaacgccagtactgccatgctgatggcagccagtgtggctcgcaaggctgtggtgctgcctggggggactgccaccagccctaagatgattgctaagaacgtgctaggcctggtgccccaagccctgcctaaggctgacgggcgggcagggctggggactgggggacagaaggtgaatggtgcctcggtggtgatggtgcaaccttcaaagacagctactgggccaagtacagggggcggcacagtgatatcacggacccagtccagcctggtggaggccttcaacaagatcctcaacagcaagaacctgctccctgcctataggccaaacctgagcccaccagctgaggctgggctggccctgcctcccaccggctaccgctgcctggagtgtggggatgccttctcattggagaagagcctggcacggcactatgaccgtcggagcatgcgcatcgaggtcacctgcaaccactgcgcccgccgcctggtcttcttcaacaagtgcagcctgctcctgcatgcacgtgaacacaaggacaaggggctcgtcatgcagtgctcacatttggtcatgaggcctgtagcccttgaccagatggtggggcagccggacatcacaccgctgctgcctgtagctgtcccacctgtctctggacctctggccttgcctgccttgggcaagggtgagggggccatcacctcctctgccattactacagttgctgctgaggcccctgtcctgccgctctccacagagccgcctgctgccccggccacctctgcttacacatgctttcgctgcctggagtgcaaggaacagtgccgggacaaggctggcatggcagctcacttccagcagctcggcccccctgcccctggggccaccagcaatgtgtgcccaacctgccccatgatgctccccaatcgctgcagcttcagcgcccaccagcgcatgcataagaatcgacccccccatgtctgtcctgagtgtgggggcaacttcctgcaagccaattttcagacccatctccgggaggcctgtctgcacgtctctcgccgtgtaggatacaggtgccccagctgttcagtggtgtttgggggtgtgaactccatcaagtcccacatccagacgtcgcactgcgaggttttccacaagtgccccatctgccccatggccttcaagtctgggccaagtgcccatgcccacctctactcccagcatcccagcttccaaactcagcaggccaagctgatctacaagtgcgccatgtgcgacacagtcttcactcacaaacccctcctctcctcacacttcgaccagcacttgctgccccagcgtgtcagtgtctttaagtgcccgtcttgtcctctgctctttgcccaaaaaaggaccatgctggaacatctcaagaacacccatcagtctgggcgcttggaggagactgctgggaaaggggccgggggtgccctgctgacccccaagactgagcctgaggagctggctgtttctcagggaggggcagcccctgctactgaggagtcgtcttcatcttcagaagaggaggaagtacccagctcccctgagcccccccgtccagccaaacggcctcggcgggaactagggagcaaaggcctcaagggtgggggtggggggcctggaggctggacctgtggcctgtgtcactcctggttccctgagcgtgatgaatacgtggcccacatgaagaaggagcatggcaagtcagtgaaaaagttcccctgtcgcctgtgtgagcgctccttctgctccgcccccagcctgaggcgccatgtcagagttaatcacgagggcatcaagcgagtttacccctgcagaagcaagggccctggccttcgggctgtgccgctgctgccatcctgtcctctcccatttcaggtattgcacagagggaaaacgcaccttcagcagccgcctgatcctagagaaacatgtccaggtccggcacggcttgcagcttggggcccagtcccctggccgggggaccaccttggctcggggttccagtgccagagcccaggggccaggtcggaaacgccgccagtcttctgactcttgcagtgaggagcctgacagcacgacaccgccagccaagtcccccaggggcggacctggatctggaggccatggccctctgcgctaccggagcagcagctccacagaacagagcctcatgatggggttgagggtggaggatggtgcccagcagtgcctcgactgtggcttgtgctttgcctcccctggctccctgagccgacaccgtttcatcagccacaagaagagacggggtgtgggtaaagccagtgccctggggctgggggatggggaggaagaggcccctccatcaaggtctgaccccgatggtggagactcacccctgcctgcttctggaggcccactgacctgtaaggtctgtggcaagagctgcgacagccctctaaacctcaagacccacttccgcacgcatggcatggcgttcatcagggctcggcagggggctgttggggacaactagtctccaaggcctgggactgaccagccccttcctcttggagcctggttttccctactgctgcctgatccctcggctggggagttttcattaacattaatattttgttaattcctgtctctccaacctgaagaagaagagcatttgaggattattctagttatttgcaacctccctttgggtttggccctggagtcctagtagagtggaccctccattcctcctttctgagcccaacactaattaattttatgctcctgctgcagaacccccagtgtgggcctgggggtgggaggatgggacttaggtatgcctgctagacaggttcagggaaggactgatgggggtgtcatggatggacacacctctccacaattccttcaggcatggactggaactttcctcctctaggccgggccctgccctagtgcccacccccgcccccgcccccgcccaaccccaactcactggcactcaagccccctacccctgcagtgcctttcacttctttttttccccagaaatccggggcgggggggtggggggttggtagggatgagtcctgtcaagggggccacaggagaggaggggacaggctctcaggaatcctttattcttgtagtaataataatactaacaaacagttggggaactagggagaaaaccagaccattaaaactgtttgtggtcgaatctc

SEQ ID NO: 116362 - protein, 429 aa, Artificial Sequence
  derived and/or modified sequence
MNPPWSVAWGQEGFRAGTPGSRYLPRMFVASERKMRAHQVLTFLLLFVITSVASENASTSRGCGLDLLPQYVSLCDLDAIWGIVVEAVAGAGALITLLLMLILLVRLPFIKEKEKKSPVGLHFLFLLGTLGLFGLTFAFIIQEDETICSVRRFLWGVLFALCFSCLLSQAWRVRRLVRHGTGPAGWQLVGLALCLMLVQVIIAVEWLVLTVLRDTRPACAYEPMDFVMALIYDMVLLVVTLGLALFTLCGKFKRWKLNGAFLLITAFLSVLIWVAWMTMYLFGNVKLQQGDAWNDPTLAITLAASGWVFVIFHAIPEIHCTLLPALQENTPNYFDTSQPRMRETAFEEDVQLPRAYMENKAFSMDEHNAALRTAGFPNGSLGKRPSGSLGKRPSAPFRSNVYQPTEMAVVLNGGTIPTAPPSHTGRHLW

SEQ ID NO: 116363 - DNA, 1613 bp, Artificial Sequence
  derived and/or modified sequence
aaggaagcgggtgttggtcccagtgtgcgtaaacggacaacgacatctgggagttgggcagtgaggagagagaagagtgtgtccaggaggaacctgcctggaggaggcctagcggtgtgtgtgcgcctaggtgtataccggggcgttggtgacttcgagaggcaccgggcgggatcgatcctctctgcgtcctggacctggtgctggtgtgtttcggggaagttactgcttatgaaccccccttggagcgtggcctgggggcaggaaggcttccgcgctgggacccctgggtcgcgatacctccctcgaatgttcgtggcatcagagagaaagatgagagctcaccaggtgctcaccttcctcctgctcttcgtgatcacctcggtggcctctgaaaacgccagcacatcccgaggctgtgggctggacctcctccctcagtacgtgtccctgtgcgacctggacgccatctggggcattgtggtggaggcggtggccggggcgggcgccctgatcacactgctcctgatgctcatcctcctggtgcggctgcccttcatcaaggagaaggagaagaagagccctgtgggcctccactttctgttcctcctggggaccctgggcctctttgggctgacgtttgccttcatcatccaggaggacgagaccatctgctctgtccgccgcttcctctggggcgtcctctttgcgctctgcttctcctgcctgctgagccaggcatggcgcgtgcggaggctggtgcggcatggcacgggccccgcgggctggcagctggtgggcctggcgctgtgcctgatgctggtgcaagtcatcatcgctgtggagtggctggtgctcaccgtgctgcgtgacacaaggccagcctgcgcctacgagcccatggactttgtgatggccctcatctacgacatggtactgcttgtggtcaccctggggctggccctcttcactctgtgcggcaagttcaagaggtggaagctgaacggggccttcctcctcatcacagccttcctctctgtgctcatctgggtggcctggatgaccatgtacctcttcggcaatgtcaagctgcagcagggggatgcctggaacgaccccaccttggccatcacgctggcggccagcggctgggtcttcgtcatcttccacgccatccctgagatccactgcacccttctgccagccctgcaggagaacacgcccaactacttcgacacgtcgcagcccaggatgcgggagacggccttcgaggaggacgtgcagctgccgcgggcctatatggagaacaaggccttctccatggatgaacacaatgcagctctccgaacagcaggatttcccaacggcagcttgggaaaaagacccagtggcagcttggggaaaagacccagcgctccgtttagaagcaacgtgtatcagccaactgagatggccgtcgtgctcaacggtgggaccatcccaactgctccgccaagtcacacaggaagacacctttggtgaaagactttaagttccagagaatcagaatttctcttaccgatttgcctccctggctgtgtctttcttgagggagaaatcggtaacagttgccg

SEQ ID NO: 116364 - DNA, 1290 bp, Artificial Sequence
  derived and/or modified sequence
atgaaccctccttggtctgtagcctgggggcaagaggggttccgagcagggaccccaggcagtagatacctgccaaggatgtttgtggcttcagaacgcaagatgcgtgcccatcaagtgttgacctttctgctgcttttcgttatcacatcagtcgctagtgagaatgcttcaacgtcacggggatgtggactcgatttgctgccgcagtatgtgtcgttatgcgacctcgatgcgatttggggtatcgtcgtcgaagccgtggcgggtgccggtgccctgattacgctgttgttgatgctgattttgctggtgagactacccttcattaaggaaaaggagaagaagagccccgtcggactccatttcctctttctgcttgggaccctcgggctgttcggcctcacattcgcttttattatccaagaggacgagaccatatgctcggtgcgcagattcttatggggagttctgttcgctctctgctttagctgcctgctgtcccaggcctggagagttcgacgcttagtgcgccacgggacaggacctgccgggtggcagttggtgggactcgccttgtgcctgatgctggttcaggtcattattgccgtggaatggctcgtcctgactgtgctaagagacacacgacccgcatgcgcctacgagcccatggactttgtgatggctctcatctacgatatggttctgctggtggttacactcggacttgccctgtttacgctctgtggaaagtttaaaagatggaagctgaacggggcgtttctgctgattactgcatttctgagtgtgctaatttgggtggcatggatgacgatgtatctgttcggcaacgtgaaactgcagcagggtgacgcctggaacgacccaaccctggctattactctcgctgccagtggttgggtctttgtgatctttcacgctatcccagagatccattgcacactgctcccagctctccaggagaacacacccaactattttgacactagccaaccaagaatgagagagaccgccttcgaggaagacgttcagctgccgagagcatacatggagaacaaagctttctccatggacgagcacaacgctgctctcagaaccgcaggctttcctaatgggtctcttggaaagaggccctcgggaagtctgggaaaacgcccatccgccccgttcagatctaacgtgtatcagcccactgagatggccgtcgtcttgaatgggggaactatacccactgccccaccctcacatactgggagacacctttggtag

SEQ ID NO: 116365 - DNA, 1290 bp, Artificial Sequence
  derived and/or modified sequence
atgaaccccccctggagcgtggcctggggccaggagggcttccgggccggcaccccaggcagccgctacctgcccaggatgtttgtggccagcgagaggaagatgagggcccaccaggtgctgaccttcctgctgctgtttgtgatcacctctgtggcctctgaaaatgccagcaccagccggggctgcggcctggacctgctgccccagtatgtgtccctgtgtgacctggatgccatctggggcatcgtggtggaggccgtggccggggccggggccctgatcaccctgctgctgatgctgatcctgctggtgcggctgcccttcatcaaggagaaggagaagaagagccctgtgggcctgcacttcctgttcctgctgggcaccctgggcctgtttggcctgacctttgccttcatcatccaggaggatgagaccatctgcagcgtgcggcgcttcctgtggggcgtgctgtttgccctgtgcttcagctgcctgctgagccaggcctggagggtgcggcggctggtgagacatggaactggacctgctggctggcagctggtgggcctggccctgtgcctgatgctggtgcaggtgatcatcgctgtggagtggctggtgctgactgtgctgcgggacaccaggcctgcctgtgcctatgagcccatggactttgtgatggccctgatctatgacatggtgctgctggtggtgaccctgggcctggccctcttcaccctgtgtgggaagttcaagcgctggaagctgaatggagccttcctgctgatcacagccttcctgtctgtgctgatctgggtggcctggatgaccatgtacctgtttggaaatgtgaagctgcagcagggagatgcctggaatgaccccaccctggccatcaccctggccgccagcggctgggtgtttgtgatcttccacgccatccctgagatccactgcaccctgctgcctgccctgcaggagaacacccccaactactttgacaccagccagcccaggatgagggagacagcctttgaggaggatgtgcagctgccccgggcctacatggagaacaaggccttctccatggatgagcacaatgctgccctgaggacagctggcttccccaacggcagcctgggcaagaggcccagcggcagcctgggcaagaggcccagcgcccccttccgcagcaatgtgtaccagcccacagagatggctgtggtgctgaatggaggcaccatccccacagccccacccagccacacaggccgccacctgtggtag

SEQ ID NO: 116366 - DNA, 1290 bp, Artificial Sequence
  derived and/or modified sequence
atgaaccccccctggagcgtggcctggggccaggagggcttccgggctgggactccggggtctcgctacctgccgaggatgtttgtagcctcagagcggaaaatgagggcccaccaagttctaacttttttactgttgttcgtcatcacaagtgttgcatctgagaatgcatccacatccagggggtgtgggttggatctgctcccgcagtacgtgagtctctgtgatttggatgccatctgggggattgtggttgaggccgttgctggtgccggagctctcattacacttcttttgatgctaatcctgttggtgcgcctgcccttcatcaaggaaaaggaaaagaagtctcctgtggggctgcattttctcttcctgctggggactctcggcttattcggactgaccttcgccttcattattcaggaggatgaaacaatatgcagcgttagaagatttctgtggggagtgttgttcgccctgtgctttagctgtctcctgtcccaggcctggcgagtgcgcagattagtgagacatggcaccgggcccgccggatggcagcttgtgggccttgctctctgcctaatgttagtccaggtgatcatcgccgtggagtggcttgtcctgaccgttctgagggacactcgtcctgcatgtgcgtatgaacccatggactttgttatggctcttatttacgacatggtgctgctggtggtgactcttggactcgcattgttcacactatgcgggaaatttaaaagatggaagctcaatggtgccttcctgttgatcactgccttcctctccgtacttatctgggtcgcatggatgactatgtacctttttggcaacgtgaaactccagcagggagatgcatggaacgatcccaccttggccattacactggccgcctctgggtgggttttcgtgattttccacgcaattcctgagatccattgcactttgctgccagcactgcaagagaacacgcctaactactttgacacaagccaacctcggatgcgggaaactgcatttgaagaggacgtccagctcccccgagcttacatggagaataaggcattttctatggacgagcataatgcagctctgagaaccgccggctttcccaacggttcattgggcaaaagacctagcggcagcctcggcaaacggccttcagccccttttcggtcaaacgtgtatcagccaactgaaatggctgtcgtccttaacggagggactatccccacagcgccaccgtcacataccgggcgccatttgtggtag

SEQ ID NO: 116367 - DNA, 1290 bp, Artificial Sequence
  derived and/or modified sequence
atgaaccctccctggagcgtcgcctgggggcaagaaggttttcgggctgggacccccggatctcgctacctgcctcgcatgtttgtcgcgagcgaacgcaagatgagagctcaccaagtgctgacattcctcctgctcttcgtgattacgagcgtggcatcagaaaatgcctcaaccagtagaggctgcggcttagatctgttgcctcaatatgtgtctctttgcgacttggacgccatctggggcattgttgttgaggcggtagctggcgctggggctctgatcacactgctgttgatgctcatcctgctggtccggctaccttttattaaggagaaagagaagaaaagccctgtagggcttcactttctcttcttactcggcacattgggtctgtttggcctcactttcgcattcattattcaggaggatgaaacgatttgtagtgtgcgaagattcctgtggggagttctatttgccctgtgtttctcttgtttgctctctcaggcctggcgggtgcggagattggtgaggcatggtacgggaccagccggatggcaattggtaggcctcgccctgtgtttaatgcttgtgcaagttatcatcgcagtagagtggctcgtgctgactgtgctgcgcgatacaaggcctgcatgcgcatacgagccaatggatttcgttatggccttgatttacgacatggtgctgctggttgtgacattgggcctggcgttgtttacactctgtgggaagttcaagcgctggaagctgaatggagcttttctgctgatcactgccttcctctccgtgctgatttgggtggcctggatgactatgtacctctttggcaatgtgaagctccaacagggtgatgcatggaacgacccaaccttggccatcaccctcgcagcttccgggtgggtcttcgtgattttccacgccatacccgaaatccattgcaccctgctccctgcactgcaagaaaacaccccgaattatttcgacacctcacagcccaggatgcgcgaaactgctttcgaagaggacgtgcaattgcccagggcatacatggagaacaaggcattcagcatggacgaacataacgccgcactacggactgcaggattcccgaatggcagtctgggcaagcggccttccggttcacttggaaagagaccatcagctcctttccgctcaaatgtatatcaacctactgagatggccgtggtgctgaatggcggtactatacctaccgcaccccctagccatactgggcgacatttgtggtag

SEQ ID NO: 116368 - DNA, 1290 bp, Artificial Sequence
  derived and/or modified sequence
atgaaccccccctggagcgtggcctggggccaggagggcttcagagccggcacccccggcagcagatacctgcccagaatgttcgtggccagcgagagaaagatgagagcccaccaggtgctgaccttcctgctgctgttcgtgatcaccagcgtggccagcgagaacgccagcaccagcagaggctgcggcctggacctgctgccccagtacgtgagcctgtgcgacctggacgccatctggggcatcgtggtggaggccgtggccggcgccggcgccctgatcaccctgctgctgatgctgatcctgctggtgagactgcccttcatcaaggagaaggagaagaagagccccgtgggcctgcacttcctgttcctgctgggcaccctgggcctgttcggcctgaccttcgccttcatcatccaggaggacgagaccatctgcagcgtgagaagattcctgtggggcgtgctgttcgccctgtgcttcagctgcctgctgagccaggcctggagagtgagaagactggtgagacacggcaccggccccgccggctggcagctggtgggcctggccctgtgcctgatgctggtgcaggtgatcatcgccgtggagtggctggtgctgaccgtgctgagagacaccagacccgcctgcgcctacgagcccatggacttcgtgatggccctgatctacgacatggtgctgctggtggtgaccctgggcctggccctgttcaccctgtgcggcaagttcaagagatggaagctgaacggcgccttcctgctgatcaccgccttcctgagcgtgctgatctgggtggcctggatgaccatgtacctgttcggcaacgtgaagctgcagcagggcgacgcctggaacgaccccaccctggccatcaccctggccgccagcggctgggtgttcgtgatcttccacgccatccccgagatccactgcaccctgctgcccgccctgcaggagaacacccccaactacttcgacaccagccagcccagaatgagagagaccgccttcgaggaggacgtgcagctgcccagagcctacatggagaacaaggccttcagcatggacgagcacaacgccgccctgagaaccgccggcttccccaacggcagcctgggcaagagacccagcggcagcctgggcaagagacccagcgcccccttcagaagcaacgtgtaccagcccaccgagatggccgtggtgctgaacggcggcaccatccccaccgccccccccagccacaccggcagacacctgtggtag

SEQ ID NO: 116369 - protein, 194 aa, Artificial Sequence
  derived and/or modified sequence
MWVKLLSIVAEFCFSPFLVTDEETASDALERNSLSSQDPQQPTSTVSVTEDSSTSEIDKEEKEQTTQDPDLTTEANPQYLGLARKKSGILLLTLVSFLIFILFIIVQLFIMKLRKAHVIWKKENEVSEHTLESYRSRSNNEETSSEEKNGQSSHPMRCMNYITKLYSEAKTKRKENVQHSKLEEKHIQVPESIV

SEQ ID NO: 116370 - DNA, 585 bp, Artificial Sequence
  derived and/or modified sequence
atgtgggttaaattgctgagtattgtggccgagttctgtttcagcccgtttctggtcacagatgaagaaacagcatcagatgctctggaacgcaattccctgtcttctcaagacccccagcagcctacctctacagtgtccgttacggaggattccagtacttccgagattgacaaagaggagaaggagcagaccacccaagatccggatctgactacagaggccaaccctcaatacctgggcctagctcgtaagaagagtggaatcctcttactcaccctcgtgtcctttctgattttcattctgtttatcatagtgcaactgttcatcatgaagctccgaaaggcccacgtgatttggaagaaagaaaatgaagtctccgaacatacccttgagtcttatagatcgaggtcaaacaacgaagaaacttcctccgaggaaaaaaacggccagtcgtctcatcccatgaggtgcatgaattacattaccaagctctattctgaggccaagactaagaggaaagaaaacgtgcagcattctaaacttgaagagaaacatatccaagtccccgaatctatcgtgtag

SEQ ID NO: 116371 - DNA, 585 bp, Artificial Sequence
  derived and/or modified sequence
atgtgggtgaagctgctgagcatcgtggccgagttctgcttcagccccttcctggtgacagatgaggagacagccagtgatgccctggagaggaacagcctgagcagccaggacccccagcagcccaccagcacagtgtctgtgacagaggacagcagcaccagcgagattgacaaggaggagaaggagcagaccacccaggaccctgacctgaccacagaggccaacccccagtacctgggcctggccaggaagaagagcggcatcctgctgctgaccctggtgtccttcctgatcttcatcctcttcatcatcgtgcagctgttcatcatgaagctgaggaaggcccacgtgatctggaagaaggaaaatgaggtgtctgagcacaccctggagagctaccgcagccgcagcaacaatgaggagaccagcagcgaggagaagaatggccagagcagccaccccatgcgctgcatgaactacatcaccaagctgtacagcgaggccaagaccaagaggaaagaaaatgtgcagcacagcaagctggaggagaagcacatccaggtgcctgagagcatcgtgtag

SEQ ID NO: 116372 - DNA, 585 bp, Artificial Sequence
  derived and/or modified sequence
atgtgggtgaagctgctgagcatcgtggccgagttctgcttcagccctttcctggtcacggacgaggaaacagctagcgacgctcttgagcggaattctctttcttcacaggatccgcagcagcccacatcaactgtgtccgtgaccgaggatagctccacctccgagatcgacaaagaggagaaagagcagaccacccaggatccagacctcaccacagaggccaacccccagtatcttggactcgctagaaaaaagtcaggtatcctgttgttaactttagttagttttctaattttcatcctttttatcatcgttcagctgtttatcatgaagctcagaaaagcccatgtgatctggaaaaaagaaaatgaggtctcagagcacaccttggaaagttaccgatctcggagcaataatgaagaaacctctagcgaagagaagaacggtcaatccagtcatcctatgaggtgcatgaactatatcaccaagctgtattcggaggctaagacaaagcggaaagagaacgtgcaacacagtaagctggaggagaaacatatccaggttcctgaatctatcgtctag

SEQ ID NO: 116373 - DNA, 585 bp, Artificial Sequence
  derived and/or modified sequence
atgtgggtcaagttactgtctatcgtggccgagttttgcttctccccttttctcgtcaccgacgaagagacagcgtcagacgccctggagaggaactctctgtcatcccaagaccctcaacagccaacatctaccgtaagtgtgacagaggattcatctactagtgaaatcgacaaggaggagaaggaacagaccacacaagaccctgacctgacaaccgaggcaaatcctcagtatctgggcctggccaggaaaaagtccgggatcctccttttgactcttgttagtttcctgatttttatcctattcatcatagttcagctgttcataatgaaattgcggaaggcccatgttatttggaaaaaggagaatgaagttagtgaacacactcttgagagttaccgctcacgatcaaacaatgaagagacctcctcagaggagaagaatgggcagtccagccaccctatgagatgtatgaattacatcaccaagctctactccgaagctaagacaaagagaaaggagaatgtccaacatagcaagctggaggaaaagcacattcaggtgcccgagtccatcgtttag

SEQ ID NO: 116374 - DNA, 1929 bp, Artificial Sequence
  derived and/or modified sequence
aaaaaccagagcaggagccacagaacacacagttctggggtttctgcacaacctctacaagcaggtagccgctaaatatattctccaatctcttttactgagcacaatgtgggtaaaactgctctctatagtagcagaattttgtttttcccctttcctagttactgatgaagagacagcttcagatgctctggagagaaactctctatcctctcaagacccacagcagcccaccagtactgtctcagtaacggaagattctagtacatcggagattgacaaggaagagaaagaacaaaccactcaagatcctgacttgaccaccgaagcaaatcctcagtatttaggactggcaagaaagaaaagtggcatcctgctgctcacgctggtgtccttcctcattttcatactcttcatcatagtccagctcttcatcatgaagctgaggaaagcacatgtgatatggaagaaagaaaacgaagtttcagaacacacactagaaagttacagatcaaggtcaaataatgaagaaacatcatctgaagagaaaaatggccaatcttcccaccctatgcgttgcatgaactacatcacaaagttgtactcagaagcaaaaacaaagaggaaggaaaatgtacaacattcaaaattagaagaaaagcacatccaagtaccagagagtattgtgtagtgctctctgcaatggaacatgtgatttcagggttgccgcagtgtcacctcagtggaccagcctgggggaaggagcttaattgctgagacattaataatgacctcttagtgcaatgcaagatggtgtcctcggataatgatctgccccggagctagggcagcaacatgaggaccaaaccatgcacataaagcttgtagtttaaaaaagaaaagcaaaaaaataattatgcctgacactacttcagagcaggaggattctacgaagccttggggatcagggtcagtgtgagcagctaacatcctacctcaaatggaacaggattttttgatgctttgctctaatggaactgtttaaaaaatttttttttctttttaatattttcttctggtcacaaaataaagaaatttgggatgcaaagtacctaaagatctctgatcctaagaagttacttctggccaggcgcggtggctcatgcctgtaatcctagcactttgggaggctgaggtaggcagatcacttgaggtcaggagttggagaccagcctggccaacatagtgaaaccccgtctctactaaaaatgcaaaaattagccaggcgtagtggtgcgcacctgtagtctcagatacttgggaggctgagggtggagaatcgcttgaacctgggaggtggagattgcagtgagtcaagatctcaccactgcactccagcctgggcaacagagggagactctgtctcaaaaaaaaagaagttacttccaagacagacttttaagatgtaaccagcacaaagcaatgtcagggaggagtgatacatgacaataaatgagtcagatgagcaagaaggccccagaacccatgccccaaggcacaaagaggagctcagggtaggcccaaagattcgaattccttagattactaaatcacatgagcggaccttgtctgtcagataagatttttacctggaaattccatgaccaatacatgtgcaaaagaaaatgatgggttgaatttactgattattgacctaatggatggctttttaaaatgttttaataaaaagcagaatagatgtttgtttttctagtggttataccaagttatacttcctgttttcacgtgtgaaagtaacatgggacatgcctttcttttccgatcagtttatttaagctatacagcaaactttggcatttatgtggagcatttctcattgttggaatctgaataaaccaattacaaaat

SEQ ID NO: 116375 - DNA, 585 bp, Artificial Sequence
  derived and/or modified sequence
atgtgggtgaagctgctgagcatcgtggccgagttctgcttcagccccttcctggtgaccgacgaggagaccgccagcgacgccctggagagaaacagcctgagcagccaggacccccagcagcccaccagcaccgtgagcgtgaccgaggacagcagcaccagcgagatcgacaaggaggagaaggagcagaccacccaggaccccgacctgaccaccgaggccaacccccagtacctgggcctggccagaaagaagagcggcatcctgctgctgaccctggtgagcttcctgatcttcatcctgttcatcatcgtgcagctgttcatcatgaagctgagaaaggcccacgtgatctggaagaaggagaacgaggtgagcgagcacaccctggagagctacagaagcagaagcaacaacgaggagaccagcagcgaggagaagaacggccagagcagccaccccatgagatgcatgaactacatcaccaagctgtacagcgaggccaagaccaagagaaaggagaacgtgcagcacagcaagctggaggagaagcacatccaggtgcccgagagcatcgtgtag

SEQ ID NO: 116376 - protein, 512 aa, Artificial Sequence
  derived and/or modified sequence
MAENSGPGVRPPGWEAQINIISTRLALAHTAPAAGEAGGSCLRWEPHCQQPLPDRVPSTAILPPRLNGPWISTGCEVRPGPEFLTRAYTFYPSRLFRAHQFYYEDPFCGEPAHSLLVKGKVRLRRASWVTRGATEADYHLHKVGIVFHSRRALVDVTGRLNQTRAGRDCARRLPPARAWLPGALYELRSARAQGDCLEALGLTMHELSLVRVQRRLQPQPRASPRLVEELYLGDIHTDPAERRHYRPTGYQRPLQSALHHVQPCPACGLIARSDVHHPPVLPPPLALPLHLGGWWVSSGCEVRPAVLFLTRLFTFHGHSRSWEGYYHHFSDPACRQPTFTVYAAGRYTRGTPSTRVRGGTELVFEVTRAHVTPMDQVTTAMLNFSEPSSCGGAGAWSMGTERDVTATNGCLPLGIRLPHVEYELFKMEQDPLGQSLLFIGQRPTDGSSPDTPEKRPTSYQAPLVLCHGEAPDFSRPPQHRPSLQKHPSTGGLHIAPFPLLPLVLGLAFLHWL

SEQ ID NO: 116377 - DNA, 1539 bp, Artificial Sequence
  derived and/or modified sequence
atggccgagaacagcggccccggcgtgagaccccccggctgggaggcccagatcaacatcatcagcaccagactggccctggcccacaccgcccccgccgccggcgaggccggcggcagctgcctgagatgggagccccactgccagcagcccctgcccgacagagtgcccagcaccgccatcctgccccccagactgaacggcccctggatcagcaccggctgcgaggtgagacccggccccgagttcctgaccagagcctacaccttctaccccagcagactgttcagagcccaccagttctactacgaggaccccttctgcggcgagcccgcccacagcctgctggtgaagggcaaggtgagactgagaagagccagctgggtgaccagaggcgccaccgaggccgactaccacctgcacaaggtgggcatcgtgttccacagcagaagagccctggtggacgtgaccggcagactgaaccagaccagagccggcagagactgcgccagaagactgccccccgccagagcctggctgcccggcgccctgtacgagctgagaagcgccagagcccagggcgactgcctggaggccctgggcctgaccatgcacgagctgagcctggtgagagtgcagagaagactgcagccccagcccagagccagccccagactggtggaggagctgtacctgggcgacatccacaccgaccccgccgagagaagacactacagacccaccggctaccagagacccctgcagagcgccctgcaccacgtgcagccctgccccgcctgcggcctgatcgccagaagcgacgtgcaccacccccccgtgctgcccccccccctggccctgcccctgcacctgggcggctggtgggtgagcagcggctgcgaggtgagacccgccgtgctgttcctgaccagactgttcaccttccacggccacagcagaagctgggagggctactaccaccacttcagcgaccccgcctgcagacagcccaccttcaccgtgtacgccgccggcagatacaccagaggcacccccagcaccagagtgagaggcggcaccgagctggtgttcgaggtgaccagagcccacgtgacccccatggaccaggtgaccaccgccatgctgaacttcagcgagcccagcagctgcggcggcgccggcgcctggagcatgggcaccgagagagacgtgaccgccaccaacggctgcctgcccctgggcatcagactgccccacgtggagtacgagctgttcaagatggagcaggaccccctgggccagagcctgctgttcatcggccagagacccaccgacggcagcagccccgacacccccgagaagagacccaccagctaccaggcccccctggtgctgtgccacggcgaggcccccgacttcagcagacccccccagcacagacccagcctgcagaagcaccccagcaccggcggcctgcacatcgcccccttccccctgctgcccctggtgctgggcctggccttcctgcactggctgtag

SEQ ID NO: 116378 - DNA, 1539 bp, Artificial Sequence
  derived and/or modified sequence
atggcggagaatagtggacctggcgttcggcctccgggttgggaagcgcagattaacatcatttcaacacgtctggcactggcacacaccgcacccgctgccggagaagctggtggcagctgtcttcggtgggaaccgcactgtcagcagccactcccagaccgggtgccatctaccgcgattctgccaccgagacttaacggaccttggatttccaccgggtgtgaggttagaccaggcccggaatttcttactagagcttataccttctatccatccagacttttcagagcacatcagttctattacgaggatcccttctgtggtgagcccgcccacagtttgcttgtgaagggaaaggtacggctgcgcagagccagctgggttacaagaggcgctacagaggcagactatcatctgcataaggtcggcattgtgttccactcccggagggctctggtggatgttactggtaggctgaaccaaacacgggccgggagggactgtgcgaggcgcctgccacccgctcgggcgtggctgccaggagcactgtacgagctgaggagcgcgcgcgctcagggggactgtctggaggccttaggcctgaccatgcatgagctttccctggtaagagtgcagaggcgtctgcagccccagccacgcgccagtccacgcctggtagaggaactgtatcttggagatatccatacagatcccgccgagcgcagacactataggcctacggggtaccaaaggccattgcaatcagcactgcatcatgttcagccctgccctgcctgtgggctgatagcgcgatccgatgtgcaccatccacccgtgctcccaccaccccttgctctgcccctgcacctgggtggatggtgggtgtcttccggatgcgaggtccgccccgcggttctctttttaacccgactgtttacattccacggtcattccaggtcctgggagggatattatcaccacttctcggaccctgcttgcaggcaaccgactttcacggtctacgctgccggtcggtatactcggggaaccccctctactcgcgttagaggaggaaccgaactggtattcgaagttactcgagcccatgtgaccccgatggatcaggtcactaccgcaatgcttaacttttcagaacccagctcttgtgggggcgccggtgcttggagcatgggcacagagcgcgacgtgactgccactaatggttgcctacctctgggtatccggctgccacatgtggagtacgagctgtttaagatggagcaggaccccctgggacagtcgctgctctttattggccagcgcccaactgacggttcttctcccgacacaccggagaagcgtcctacctcataccaggcccccctggttctttgtcacggcgaggcacccgacttctctcgacctcctcagcacagaccatcactgcaaaagcacccgagtaccggagggctacacatcgccccattccccctgttgccattggtcctaggactcgcatttctgcactggctctag

SEQ ID NO: 116379 - DNA, 2040 bp, Artificial Sequence
  derived and/or modified sequence
gcttacaactatcaacagccgggaaggctgagcgcgtgtgagcgccgaggggggcgcaggaccctcgcaacttcttcgcaggactccagcctggccgccggcgcccgcagccgtccgagagccctgcgcccgcgcctccccttgcgcaccgtggcagcgcccggcgggcggtcctgccagccccgacgggatgcccgcagccatgctcccctacgcttgcgtcctggtgcttttgggaggggcccagtcaccactgacaaaaatgacagtaaccacagttgaagtgtgcccagctgggggctcatccccaagcaccctcacattatgaatggctgagaattctggccctggagttagaccacctggctgggaagcccagatcaacatcatatcaacccgtctggctttggcccacactgcaccggcggctggggaggccgggggcagctgcctgcgctgggaaccccactgccagcagcccttgccagatagagtgcccagcactgcgatcctgcctccacgccttaatggaccttggatctccacaggctgcgaggtgcgcccaggaccggagttcctgacccgcgcctacaccttctaccccagccggctctttcgagcccaccagttctactacgaggaccccttctgcggggaacctgcccactcgctgctcgtcaagggcaaagtccgcctgcgccgggcctcctgggtcacccggggagccaccgaggccgactaccacctgcacaaggtgggcatcgtcttccacagccgccgggccctggtcgacgtcaccgggcgcctcaaccagacccgcgccggccgggactgcgcgcggcggctgcctccggcccgggcctggctgcctggggcgctgtacgagctgcggagcgcccgggctcagggggactgcctggaggcgctgggcctcaccatgcacgagctcagcctggtccgcgtgcagcgccgcctgcagccgcagccccgggcgtcgccccggctggtggaggagctgtacctgggggacatccacaccgacccggcggagaggcggcactaccggcccacgggctaccagcgcccgctgcagagcgcactgcaccacgtgcagccgtgcccagcctgtggcctcattgcccgctccgatgtgcaccacccgcccgtgctgccgccccctctggccctgcccctgcacctgggcggctggtgggtcagctcggggtgcgaggtgcgcccagcagtcctgttcctcacccggctcttcactttccacgggcacagccgctcctgggaagggtattaccaccacttctcagacccagcctgccggcagcccaccttcaccgtgtatgccgccggccgctacaccaggggcacgccatccaccagggtccgcggcggcaccgagctggtgtttgaggtcacacgggcccatgtgacccccatggaccaggtcaccacggccatgctcaacttctctgagccaagcagctgtgggggtgcgggggcctggtccatgggcactgagcgggatgtcacagccaccaacggctgcctaccgctgggcatccggctcccgcatgtggagtacgagcttttcaagatggaacaagaccccctcgggcaaagcctgctcttcatcggacaaaggcccaccgatggctcaagtcccgataccccagagaaacgtcccacctcctaccaagcacccctggtgctctgtcatggggaggcccccgacttctccaggccaccgcagcacaggccatcgctgcagaagcaccccagcacagggggtcttcacatagcccccttcccacttctgcccctagttctagggctggccttcctccactggctatgacattggacttgacatcaggatggcggctctggacacccattcaacccttcagactccctcctggcagctgtagggaaggaaccattctcctctgctctgtcatggatggatgcacagccccactgcttccaaactctgcctgtgtcccatgtggctcaggacatgagcttaac

SEQ ID NO: 116380 - DNA, 1539 bp, Artificial Sequence
  derived and/or modified sequence
atggctgaaaattctggccctggggtgcggcccccaggctgggaggcccagatcaacatcatcagcacccggctggccctggcccacacagccccagctgctggggaggccggcggcagctgcctgcgctgggagccccactgccagcagcccctgcctgacagagtgcccagcacagccatcctgcccccccggctgaatggcccctggatcagcacaggctgtgaggtgcggcccggccctgagttcctgacccgggcctacaccttctaccccagccgcctcttccgggcccaccagttctactatgaggaccccttctgtggggagcccgcccacagcctgctggtgaagggcaaggtgcggctgcggcgggcctcctgggtgaccaggggggccacagaggccgactaccacctgcacaaggtgggcatcgtgttccacagccggcgggccctggtggatgtgacaggccgcctgaaccagaccagggctggccgggactgtgcccggcggctgcccccagcccgggcctggctgcccggggccctgtatgagctgcggagcgcccgggcccagggcgactgcctggaggccctgggcctgaccatgcatgagctgagcctggtgcgggtgcagaggcggctgcagccccagccccgggccagcccccggctggtggaggagctgtacctgggggacatccacacagatcctgctgagcggcggcactaccggcccaccggctaccagaggcccctgcagagcgccctgcaccacgtgcagccctgcccagcctgtggcctcatcgcccggagtgatgtgcaccacccccctgtgctgcccccacccctggccctgcccctgcacctgggcggctggtgggtgagcagcggctgtgaggtgcggcctgctgtgctcttcctgaccaggctcttcaccttccacggccacagccgctcctgggagggctactaccaccacttcagtgaccctgcctgccggcagcccaccttcaccgtgtatgctgctggccgctacacccggggcacccccagcaccagggtgcggggcggcacagagctggtgtttgaggtgacccgggcccacgtgacccccatggaccaggtgaccacagccatgctgaacttcagcgagcccagcagctgtggcggggccggggcctggagcatgggcacagaaagagatgtgacagccaccaacggctgcctgcccctgggcatccggctgccccacgtggagtatgagctgttcaagatggagcaggaccccctgggccagagcctgctcttcatcggccagaggcccacagatggcagcagcccagacaccccagagaagaggcccaccagctaccaggcccccctggtgctgtgccacggggaggccccagacttcagccggcccccccagcaccggcccagcctgcagaagcaccccagcactggaggcctgcacatcgcccccttccccctgctgcccctggtgctgggcctggccttcctgcactggctgtag

SEQ ID NO: 116381 - DNA, 1539 bp, Artificial Sequence
  derived and/or modified sequence
atggccgagaacagcggccccggcgtgcggccccccggctgggaggcccaaattaatatcatcagcacgagactggccttggctcacactgctcccgcggccggggaggccggagggtcctgcctgagatgggaacctcattgccaacagcccctacccgaccgagtaccctcaaccgctattctgccaccacgactaaatggcccgtggatttcaaccggatgtgaagtccgtcccggtcctgaatttctcacgcgggcctacactttttatccttccaggctgtttcgggcccaccagttttactatgaggatcctttctgtggtgagcccgctcatagcctgttggtcaaggggaaggtcaggctccgcagagccagctgggtaacccgcggcgctacagaagctgattaccatctgcacaaggtcggcatagtttttcattcaaggagagcgttagtagatgtgaccggcaggctcaaccaaactcgtgctgggagagactgtgctcgcaggttaccacccgctcgagcttggctaccgggtgctttgtatgaacttcgatctgccagggcccagggggattgcctggaggcactgggcttgaccatgcatgagctgagcctagtcagggtccagaggcgcctgcaaccccagccccgcgcttcaccaagattagtcgaagaactatatcttggagacatacacactgacccagctgagcggcggcattaccgtccaacgggataccagcgtccgttgcagagcgctctgcaccacgtgcaaccgtgcccagcctgtgggcttattgccaggtctgatgtgcatcaccctcccgtgctgcctccccctcttgccctacctctgcatctgggcgggtggtgggtgtcttctggctgcgaggtgcggccagcagtgctgtttcttaccagactgtttacattccatggccattccaggagctgggaaggctactaccatcacttttctgatcctgcttgtcgccagccaacatttacagtatatgccgctggccgctacaccagggggacaccctcaacgcgggtcagaggaggaactgagctggtttttgaagttactcgggcccacgttacgcctatggatcaggtgacaactgcaatgctgaactttagtgagccgagtagctgtgggggtgctggcgcctggtctatgggtacagagcgggacgtcaccgccacaaatgggtgtttacctctgggaataaggttgcctcacgtggaatacgaactgttcaaaatggaacaagatcctttggggcagtcacttttgttcattggccagaggccaacagatggatcgtctcctgatacaccagagaagcggcccacatcttatcaggctccactcgtcctgtgccacggcgaggcacctgacttcagccgccccccccaacacaggcccagccttcagaagcatcccagtacaggtgggctgcacatcgcgccgtttcccctattgcctctggtcctgggcctggccttcctgcattggctctag

SEQ ID NO: 116382 - DNA, 1539 bp, Artificial Sequence
  derived and/or modified sequence
atggccgagaatagtggcccaggcgtgcgccctcccggatgggaggcccagatcaatattatatctaccagattggccctggctcacactgcgccagccgcaggcgaagccggtggctcctgcttacgctgggaaccccattgccagcagcccctgccagacagggtcccttcgactgccatcctgcctcccaggctgaatggaccctggatctctaccggttgcgaagtgaggccgggtcccgagtttcttaccagggcctatacattttatccttctagactgttccgggctcaccagttctactatgaggaccctttctgtggggagcccgcacattccctgctcgtaaagggcaaagtgaggcttcggcgtgcctcctgggtgacacggggagcgacagaagctgattatcatttgcacaaagtcgggatcgtcttccatagccgcagggccctcgtggacgtgacagggagattgaatcagactagggcgggtcgcgattgtgccaggagactcccaccggcacgagcatggctacccggagccctctacgagcttaggagtgccagagcacagggtgattgtttagaagcactgggcctgactatgcacgagctttccctggttagggttcaacggaggcttcaaccacagccacgagcctctcccaggctagtagaggaactctacctcggagacattcacacagaccctgcagaacggaggcactatcgtcctaccggctatcagaggcccctccaatcagcactccaccatgtccagccctgccccgcatgcgggttaattgcaaggagtgacgtccatcaccctccagtcctgccaccacctcttgcacttccattgcacctcggtggctggtgggtctccagcgggtgcgaagtgcgtcccgctgtgctattcctcactcggttgtttacttttcacggacactcaagatcctgggagggctactaccaccacttcagtgaccctgcatgcaggcagccaacgtttaccgtctacgccgcaggacggtacaccagaggaactccctcaacacgcgtgagaggagggacagaacttgtgttcgaggtgacaagagcgcatgtaacccccatggatcaggtcacaactgccatgctgaacttttcggagccttcaagttgtggcggagccggagcctggagtatgggcactgagcgcgatgtgacagcaacaaacggatgtcttccattgggcatacggcttcctcacgtcgagtatgagttattcaaaatggagcaggacccattggggcagagtttgttatttattggccaaaggcctaccgacggatctagccctgacacccctgagaagcgacctacatcctatcaggctccgctagtactgtgccacggagaggctccggactttagccgccctccccagcataggccgagccttcagaagcacccctctaccgggggactacatatcgctcccttccctcttcttcctttagtgcttggactggctttcctacactggttgtag

SEQ ID NO: 116383 - protein, 357 aa, Artificial Sequence
  derived and/or modified sequence
MAAGKSGGSAGEITFLEALARSESKRDGGFKNNWSFDHEEESEGDTDKDGTNLLSVDEDEDSETSKGKKLNRRSEIVANSSGEFILKTYVRRNKSESFKTLKGNPIGLNMLSNNKKLSENTQNTSLCSGTVVHGRRFHHAHAQIPVVKTAAQSNQILKEYPPHVQKVEINPVRLSRLQGVVILSSDDDDDNDRTNRRESISPQPADSACSSPAPSTGKVEAALNENTCRAERELRSIPEDSELNTVTLPRKARMKDQFGNSIINTPLKRRKVFSQEPPDALALSCQSSFDSVILNCRSIRVGTLFRLLIEPVIVIIKIFFITHKKPDHDPVEIILNTSDLTKCEWCNVRKLPVVFLQ

SEQ ID NO: 116384 - DNA, 1074 bp, Artificial Sequence
  derived and/or modified sequence
atggccgccggcaagagcggcggcagcgccggcgagatcaccttcctggaggccctggccagaagcgagagcaagagagacggcggcttcaagaacaactggagcttcgaccacgaggaggagagcgagggcgacaccgacaaggacggcaccaacctgctgagcgtggacgaggacgaggacagcgagaccagcaagggcaagaagctgaacagaagaagcgagatcgtggccaacagcagcggcgagttcatcctgaagacctacgtgagaagaaacaagagcgagagcttcaagaccctgaagggcaaccccatcggcctgaacatgctgagcaacaacaagaagctgagcgagaacacccagaacaccagcctgtgcagcggcaccgtggtgcacggcagaagattccaccacgcccacgcccagatccccgtggtgaagaccgccgcccagagcaaccagatcctgaaggagtaccccccccacgtgcagaaggtggagatcaaccccgtgagactgagcagactgcagggcgtggtgatcctgagcagcgacgacgacgacgacaacgacagaaccaacagaagagagagcatcagcccccagcccgccgacagcgcctgcagcagccccgcccccagcaccggcaaggtggaggccgccctgaacgagaacacctgcagagccgagagagagctgagaagcatccccgaggacagcgagctgaacaccgtgaccctgcccagaaaggccagaatgaaggaccagttcggcaacagcatcatcaacacccccctgaagagaagaaaggtgttcagccaggagccccccgacgccctggccctgagctgccagagcagcttcgacagcgtgatcctgaactgcagaagcatcagagtgggcaccctgttcagactgctgatcgagcccgtgatcgtgatcatcaagatcttcttcatcacccacaagaagcccgaccacgaccccgtggagatcatcctgaacaccagcgacctgaccaagtgcgagtggtgcaacgtgagaaagctgcccgtggtgttcctgcagtag

SEQ ID NO: 116385 - DNA, 1074 bp, Artificial Sequence
  derived and/or modified sequence
atggccgcggggaaatcaggagggagtgcaggagagatcacctttctggaggccttagcgcgctctgagtctaaaagagatgggggctttaaaaataattggtcttttgaccacgaggaagagtctgagggcgacactgacaaggacggaacaaatctgctaagcgttgacgaggatgaggactccgaaaccagcaaagggaaaaaactcaacagacgctctgaaatcgtggctaattcatcaggagagttcattctcaagacatacgtccgtaggaataaaagcgaatcctttaaaacccttaaaggcaaccccatcggcctgaacatgctctccaataataaaaagttgagtgaaaatacacagaataccagtttgtgttctggtactgtggtgcacgggcgccggttccaccacgcccacgcacagatccccgtggtcaaaacggctgcacagtccaaccagatcctaaaggaatatccccctcacgtgcaaaaggtggagataaatccggtcagactcagtcgactccagggggttgtgatcctgagctccgacgacgacgacgataacgacagaactaatcgccgagaatccatctcacctcagccggcggatagtgcttgcagtagcccagcacctagtacggggaaagtggaggccgcccttaatgagaatacctgccgcgcagagagggagttgagatccattcccgaagattctgaattaaataccgtgacattgccaaggaaggccagaatgaaagaccaatttgggaattcaattataaacacccctctgaagcgaagaaaggttttcagccaagagccccctgatgcactcgcactctcctgtcagtcctcttttgattcagtaatccttaattgcagatcaatccgggtgggcactctctttcgtctgctgattgagcctgtgatcgtgattatcaaaatattctttattactcacaagaaaccggaccacgatccagtggagatcatactgaacaccagcgaccttactaaatgtgagtggtgcaacgtacggaagctgcccgtggtgtttctgcagtag

SEQ ID NO: 116386 - DNA, 1074 bp, Artificial Sequence
  derived and/or modified sequence
atggctgctgggaagagcggcggcagcgctggggagatcaccttcctggaggccctggcccggtctgagagcaagagagatggcggcttcaagaacaactggagctttgaccacgaggaggagagcgagggggacacagacaaggatggcaccaacctgctgtctgtggatgaagatgaggacagcgagaccagcaagggcaagaagctgaacagaagaagtgagatcgtggccaacagcagtggagagttcatcctgaagacctacgtgagaagaaacaagtctgagagcttcaagaccctgaagggcaaccccatcggcctgaacatgctgagcaacaacaagaagctgtctgagaacacccagaacaccagcctgtgcagcggcaccgtggtgcatggaagacgcttccaccacgcccacgcccagatccctgtggtgaagacagctgcccagagcaaccagatcctgaaggagtacccacctcatgtgcagaaggtggagatcaaccctgtgcggctgagccggctgcagggcgtggtgatcctgagcagtgatgatgatgatgacaatgacaggaccaacagaagagagagcatcagcccccagcctgctgacagcgcctgcagcagccctgcccccagcacaggcaaggtggaggccgccctgaatgaaaacacctgcagagctgagcgggagctgcggagcatcccagaagattctgagctgaacacagtgaccctgcccaggaaggccaggatgaaggaccagtttggaaacagcatcatcaacacccccctgaagaggaggaaggtgttcagccaggagcccccagatgccctggccctgagctgccagagcagctttgattctgtcatcctgaactgccgcagcatccgggtgggcaccctcttccggctgctgattgagcctgtgattgtcatcatcaagatcttcttcatcacccacaagaagccagaccatgaccctgtggagatcatcctgaacaccagtgacctgaccaagtgtgagtggtgcaatgtgaggaagctgcctgtggtgttcctgcagtag

SEQ ID NO: 116387 - DNA, 1074 bp, Artificial Sequence
  derived and/or modified sequence
atggccgccggcaagagcggcggcagcgccggcgagatcaccttcctggaggccctcgcaagatcagaatctaagcgagacgggggctttaagaataactggtcgttcgaccatgaggaggaaagtgaaggagacacagacaaggatggaacaaatctcttgtcggtggacgaggacgaagattctgaaacatccaaaggcaaaaagctcaaccgcagatctgagatcgttgctaattcctctggggaattcatcttgaagacttacgtgagacggaacaaatccgaatctttcaaaactctgaagggcaacccaatcggcctgaatatgctaagtaacaataaaaaactgtctgagaacactcagaacacctccctgtgtagtggcaccgtcgtccatgggcgacgcttccaccacgcacacgcccaaatccctgtcgtgaagactgctgcccaatctaatcagattttaaaggagtaccctcctcacgttcaaaaggttgaaataaatccagttcgcttgtctcgactgcagggagtggttatactgtcttctgacgacgacgacgacaacgaccgcaccaaccgccgcgagtcaatttcaccacagccagctgatagcgcttgctcttctccagccccgagcacgggcaaagtggaggccgccctgaatgaaaacacatgccgcgccgaacgagagctgcgaagtatccccgaagattctgagctaaacactgtgaccttgcctaggaaggccagaatgaaagaccagttcggtaatagcataatcaacacaccactaaagaggcgcaaggttttttcccaggagccccccgacgccctggcgctctcctgccagagcagttttgatagcgtgattttaaactgtagaagtatccgagttggcaccctttttaggctgttgatcgaaccggtgatcgtgattattaagattttctttattacccacaaaaagccagaccacgaccccgtcgaaattattctgaatactagcgaccttactaaatgcgagtggtgcaacgtaaggaaactaccagtcgtgttcctgcagtag

SEQ ID NO: 116388 - DNA, 1074 bp, Artificial Sequence
  derived and/or modified sequence
atggccgctggcaagtctggaggctccgcaggcgagatcacgttcctggaagccttagccagatcagaatctaagagggacggaggtttcaagaataattggtctttcgaccatgaggaagagtccgagggcgatactgataaggacggtactaacttgctgtccgtggacgaggacgaggacagcgagaccagcaaaggcaagaaactcaaccgtcgctctgagattgtggctaactccagcggggaattcatcctgaagacatacgtacggagaaataagtcagaatcctttaaaacacttaagggcaaccctatcggtttgaatatgcttagtaataacaagaagctgtccgagaacacccagaacacatccttatgctctggtactgtggtccatggcagaagatttcaccatgctcatgcccagatccctgttgttaagacagccgcacagtctaatcagatcctcaaagagtatcctcctcacgtccagaaagtcgagataaaccccgttcgattgtcacggctccaaggcgtggtaatactcagttctgatgacgacgacgacaatgacagaaccaatcggcgtgagagtattagtcctcagcctgccgactccgcctgcagctcacctgcgccaagtaccggtaaagtggaagccgcacttaacgagaatacgtgccgtgcagaacgtgagcttaggtctattcccgaggattccgagttgaacacagtaactctgccacgaaaggcaaggatgaaggatcagttcggcaactctatcattaacacgcccttaaagagaagaaaagtgttctcccaggaaccccctgacgcattggccctttcatgccaatcttcattcgactcagtgattttgaactgtagaagtatcagagtgggcacattattcagactgctgatcgaaccagtcatagtaattattaagattttcttcattactcacaaaaagccagaccacgaccctgtcgaaatcatcctcaatacttcagatctgaccaaatgtgagtggtgcaacgttcggaagctgcctgtcgtttttttgcagtag

SEQ ID NO: 116389 - protein, 188 aa, Artificial Sequence
  derived and/or modified sequence
MTAPSCAFPVQFRQPSVSGLSQITKSLYISNGVAANNKLMLSSNQITMVINVSVEVVNTLYEDIQYMQVPVADSPNSRLCDFFDPIADHIHSVEMKQGRTLLHCAAGVSRSAALCLAYLMKYHAMSLLDAHTWTKSCRPIIRPNSGFWEQLIHYEFQLFGKNTVHMVSSPVGMIPDIYEKEVRLMIPL

SEQ ID NO: 116390 - protein, 163 aa, Artificial Sequence
  derived and/or modified sequence
MTAPSCAFPVQFRQPSVSGLSQITKSLYISNGVAANNKLMLSSNQITMVINVSVEVVNTLYEDIQYMQVPVADSPNSRLCDFFDPIADHIHSVEMKQGRTLLHCAAGVSRSAALCLAYLMKYHAMSLLDAHTWTKSCRPIIRPNSGFWEQLIHYEFQLFGKNT

SEQ ID NO: 116391 - DNA, 567 bp, Artificial Sequence
  derived and/or modified sequence
atgaccgcccccagctgcgccttccccgtgcagttcagacagcccagcgtgagcggcctgagccagatcaccaagagcctgtacatcagcaacggcgtggccgccaacaacaagctgatgctgagcagcaaccagatcaccatggtgatcaacgtgagcgtggaggtggtgaacaccctgtacgaggacatccagtacatgcaggtgcccgtggccgacagccccaacagcagactgtgcgacttcttcgaccccatcgccgaccacatccacagcgtggagatgaagcagggcagaaccctgctgcactgcgccgccggcgtgagcagaagcgccgccctgtgcctggcctacctgatgaagtaccacgccatgagcctgctggacgcccacacctggaccaagagctgcagacccatcatcagacccaacagcggcttctgggagcagctgatccactacgagttccagctgttcggcaagaacaccgtgcacatggtgagcagccccgtgggcatgatccccgacatctacgagaaggaggtgagactgatgatccccctgtag

SEQ ID NO: 116392 - DNA, 492 bp, Artificial Sequence
  derived and/or modified sequence
atgaccgcccccagctgcgccttccccgtgcagttcagacagcccagcgtgagcggcctgagccagatcaccaagagcctgtacatcagcaacggcgtggccgccaacaacaagctgatgctgagcagcaaccagatcaccatggtgatcaacgtgagcgtggaggtggtgaacaccctgtacgaggacatccagtacatgcaggtgcccgtggccgacagccccaacagcagactgtgcgacttcttcgaccccatcgccgaccacatccacagcgtggagatgaagcagggcagaaccctgctgcactgcgccgccggcgtgagcagaagcgccgccctgtgcctggcctacctgatgaagtaccacgccatgagcctgctggacgcccacacctggaccaagagctgcagacccatcatcagacccaacagcggcttctgggagcagctgatccactacgagttccagctgttcggcaagaacacctag

SEQ ID NO: 116393 - DNA, 2479 bp, Artificial Sequence
  derived and/or modified sequence
gtcgcacatgcgcacagagcccgggcggctacggaagcggtgagactgtctctcggctgcagccctggtgcgacccggcccgttgccgtagagatgggcagggctggatggagtggggtgcggtgagctgagctgaccctgcttcgccacggggactgcagtgaccccggcttgccggcagggcgggtaacaggttgagccagggtggggctgctcaggggcgtggagccgaggccaggatttctctgaagacccggcacaggctattcctttctgcgacgagcccattgctatggaaaccaaagcgttaggccagcggggattgaggctgcgggatcatgacgggtctctctcccgaagaaccttgcctaaggcttccccaagcggctacttcctgagcgaacccgcccacccgcctgaaggagagagttttccatggacacagcctagcagaaagacgcagccttcgtgcttcgctgactgctgaccactgacccaccgccttgatgacagcaccctcgtgtgccttcccagttcagttccggcagccctcagtcagcggcctctcgcagataaccaaaagcctgtatatcagcaatggtgtggccgccaacaacaagctcatgctgtctagcaaccagatcaccatggtcatcaatgtctcagtggaggtagtgaacaccttgtatgaggatatccagtacatgcaggtacctgtggctgactcccctaactcacgtctctgtgacttctttgaccctattgctgaccatatccacagcgtggagatgaagcagggccgtactttgctgcactgtgctgctggtgtgagccgctcagctgccctgtgcctcgcctacctcatgaagtaccacgccatgtccctgctggacgcccacacgtggaccaagtcatgccggcccatcatccgacccaacagcggcttttgggagcagctcatccactatgagttccaattgtttggcaagaacactgtgcacatggtcagttccccagtgggaatgatccctgacatctatgagaaggaagtccgtttgatgattccactgtgagccatcccacgagcccctgcattggagtcagaggtacagatctattgttgatcttacaccaagatccaaacttgaacattctacttttgttgatacagaaaaaaacagatgatgccttttatgagcacaaaaaagagttgctgtagcttttaactttataatccattttttttaagattaaactaattgtgagatggtgaagataaattttctgccctgtgagtgacactggccaggggataggttgaggcagatggtgcccagaagaaagagggcagcacccattgcacatggcaggcctggaatcctgcagccctccccaaaaacagattgacccaggaatgaatctgctacaattccacctcattctttcacacccagagccagagccttaagcatcatggtacctcttgcgcttcttacagtgagtgccaatctactagataaatggccttcaggcagtgctccaggaatcctggggggtcccaggccacctctgcttccaccttcactataagtggcccagttctggttttctagattgtacttatgcataagatagtttttaaagaaagcattccactgtgtaaatttttttttgtctttttttgaaactgtcctgctctgtcacccatcctagagtgcagtagtgtgatcatggctcactgtagccacaacctctcaggctcaagtgatcctcttaccttagcctcctgcgtggctgggactacagatgtttgccaccatgcccgcctcattttttttctttttttatagagatgagattttactatgtcgcccagactggtctcaaactcctggcctcaagcaatcctcacgcctcagcctcccaaagtgttgatgagccactgtaccccgataccactgtataaaaaatttaaaaaaaattgtgagtgctattgtacatggcaaagtttcaaagagctcttggccatccctcaccaaactttggcaaaagatggtgttagtccccttctccagggcacatgagaaaaacaggcctaacatcaggtctcagcggttcctctcacaggccttggcttggaaggctggagcttcggaccaaggcccagccctgtcacctcctcttcatgtgatgtggacccctgggagcatcagtgtcctcatctgtccaatgacagcccttttctcacagagttattgtgaagattcaacaatttcttggcatagtgcctggcacatggtgtgtgcttagcgcaaatggcagctctcatcatgaatgatagactctttcaccctgctggtcccaggtcggcacacacatccccataatggcatttctcctttctgtgcacagcactttattgttacaaagtactcttccaaaaagttaccctgtgtgtaaaaaaaaaaaaaaaaaaaaa

SEQ ID NO: 116394 - DNA, 1157 bp, Artificial Sequence
  derived and/or modified sequence
acatgcgcacagagcccgggcggctacggaagcggtgagactgtctctcggctgcagccctggtgcgacccggcccgttgccgtagagatgggcagggctggatggagtggggtgcggtgagctgagctgaccctgcttcgccacggggactgcagtgaccccggcttgccggcagggcgggtaacaggttgagccagggtggggctgctcaggggcgtggagccgaggccaggatttctctgaagacccggcacaggctattcctttctgcgacgagcccattgctatggaaaccaaagcgttaggccagcggggattgaggctgcgggatcatgacgggtctctctcccgaagaaccttgcctaaggcttccccaagcggctacttcctgagcgaacccgcccacccgcctgaaggagagagctttgtttaagactgagaaagtgagggtccgagagtctaatgaatgctctgggcacccaggccgcacctgaggagcaccgacgactgcacggtctgcggcgcgggaagcagatctgcggctgaacctctaccccaattacttagcggcgactgagcctatcgagcagttttccatggacacagcctagcagaaagacgcagccttcgtgcttcgctgactgctgaccactgacccaccgccttgatgacagcaccctcgtgtgccttcccagttcagttccggcagccctcagtcagcggcctctcgcagataaccaaaagcctgtatatcagcaatggtgtggccgccaacaacaagctcatgctgtctagcaaccagatcaccatggtcatcaatgtctcagtggaggtagtgaacaccttgtatgaggatatccagtacatgcaggtacctgtggctgactcccctaactcacgtctctgtgacttctttgaccctattgctgaccatatccacagcgtggagatgaagcagggccgtactttgctgcactgtgctgctggtgtgagccgctcagctgccctgtgcctcgcctacctcatgaagtaccacgccatgtccctgctggacgcccacacgtggaccaagtcatgccggcccatcatccgacccaacagcggcttttgggagcagctcatccactatgagttccaattgtttggcaagaacact

SEQ ID NO: 116395 - DNA, 567 bp, Artificial Sequence
  derived and/or modified sequence
atgactgccccctcgtgtgcattccctgtccagtttaggcagccgtccgtatccgggttgtcgcaaatcacgaaatcactgtacatcagtaacggcgtagcagctaacaacaagctgatgctgagttctaaccaaataactatggtcattaatgtatcagtagaggtcgtgaacactttgtacgaggatatccagtatatgcaggtcccagtcgcagacagccctaactctagactttgtgatttttttgatcctattgccgatcacattcactccgtggagatgaaacaggggcgcactcttctgcactgtgcagcgggggtctctaggtcggccgcgctgtgtctggcatatctgatgaaataccacgctatgtccttattggacgcacatacgtggacgaagtcttgcaggcccattattcgccccaattcaggcttttgggagcaactgattcactacgagtttcaactttttggtaagaatacagtccacatggtctcctcaccggtgggaatgatccccgatatttacgaaaaagaagtccggcttatgatcccgctgtag

SEQ ID NO: 116396 - DNA, 492 bp, Artificial Sequence
  derived and/or modified sequence
atgacagctccttcttgcgctttcccggtccagtttcgacagccctcagtgtccggactgagccaaatcacaaaatcactgtatatcagcaacggtgtggcagccaacaataaacttatgctgtcttcaaaccagatcactatggtgatcaatgtgtctgtggaagtggtaaacactttatatgaggatatccaatacatgcaggtgcctgtggctgatagcccaaatagccgtctgtgcgacttctttgacccaatcgccgatcacattcactctgttgagatgaaacaaggtcgcaccctgttgcactgtgcagcgggggtgtccaggagcgccgcgctgtgcttagcgtacctcatgaaatatcatgctatgtcccttctcgacgcccatacctggactaagagctgtcggcctattattagacccaatagtggcttttgggaacagttgatacactatgaattccagctttttgggaaaaatacttag

SEQ ID NO: 116397 - DNA, 567 bp, Artificial Sequence
  derived and/or modified sequence
atgactgcccctagttgcgcattcccagtgcagtttcgccagccaagtgtcagcggattgtcacagatcaccaaatcgctgtatatatccaacggcgtcgcagctaataacaaattgatgctgagctcgaatcagataactatggtgatcaacgtttcggtggaggtggtgaataccctgtatgaggacatccaatatatgcaggtgccagtggctgattcacctaacagcaggctctgtgatttcttcgatccaatcgctgatcacatccattccgtggaaatgaaacagggaaggaccctccttcactgtgctgccggcgtctctaggagtgccgcgctgtgcttggcttacttgatgaagtaccacgcaatgtctctcctggacgctcatacgtggacaaagagctgccgtccaataatcagaccaaattctgggttttgggagcagctgatccactatgaattccagctgttcggaaagaacaccgtccatatggtgtccagccctgtgggtatgattcctgatatctatgaaaaggaggtgcgcttgatgatccctttgtag

SEQ ID NO: 116398 - DNA, 567 bp, Artificial Sequence
  derived and/or modified sequence
atgacagccccctcttgtgcctttccagttcagtttcggcagccgagtgtgagtgggctttctcagataactaagtccctctacatttctaatggtgtggcagcaaacaacaagctcatgctctcttcaaaccaaatcacgatggtaattaatgtgagcgtggaggtcgtgaacacactctatgaagatatacagtatatgcaggttcctgtcgccgacagccctaactcacgcctgtgcgacttctttgacccaatcgctgatcatattcacagtgtcgagatgaagcaagggcgcacactcctccactgcgctgcaggtgtatccagatctgccgctctgtgtctcgcttacttgatgaagtaccatgcgatgtcactgctcgacgcccacacttggaccaagagttgtcgaccaattatccggccaaactcagggttctgggagcagctgatacattacgagttccagctgttcggaaagaacacagtgcacatggtctctagccccgtgggtatgattcctgacatttacgaaaaggaggttaggctgatgatccccctgtag

SEQ ID NO: 116399 - DNA, 567 bp, Artificial Sequence
  derived and/or modified sequence
atgacggcccctagctgcgcatttccagtgcagttccgccagccctcagtgtctggcctatcccagattactaagtctctgtatatctccaacggagtggccgctaataacaaactgatgctgagctcaaatcagatcactatggtgattaacgtgtccgtcgaggtggtgaacaccctgtatgaggatatacagtacatgcaggtgccagtcgcggactcgcccaatagcaggctgtgtgatttcttcgaccccattgccgatcacattcattcagtcgaaatgaaacagggacgcacattactgcattgcgctgcaggtgtcagccgatcagcggctctctgcctggcatacctaatgaagtatcacgcaatgtctcttctcgacgcgcacacatggacgaagtcctgcaggccaattatcaggccgaactccggattctgggaacagctgattcactacgagttccagctcttcggcaagaacactgtccacatggtctcatccccagtgggcatgatccctgacatttacgaaaaggaggtgaggctgatgatccctctgtag

SEQ ID NO: 116400 - DNA, 567 bp, Artificial Sequence
  derived and/or modified sequence
atgacagcccccagctgtgccttccctgtgcagttccggcagcccagcgtgtctggcctgagccagatcaccaagagcctgtacatcagcaatggagtggccgccaacaacaagctgatgctgagcagcaaccagatcaccatggtgatcaacgtgtctgtggaggtggtgaacaccctgtatgaggacatccagtacatgcaggtgcctgtggccgacagccccaacagccggctgtgtgacttctttgaccccatcgctgaccacatccacagcgtggagatgaagcagggccgcaccctgctgcactgtgccgccggcgtgagccgctctgctgccctgtgcctggcctacctgatgaagtaccacgccatgagcctgctggatgcccacacctggaccaagagctgccggcccatcatccggcccaacagcggcttctgggagcagctgatccactatgagttccagctgtttgggaagaacacagtgcacatggtgagcagccctgtgggcatgatcccagacatctatgagaaggaggtgcggctgatgatccccctgtag

SEQ ID NO: 116401 - DNA, 492 bp, Artificial Sequence
  derived and/or modified sequence
atgacagcccccagctgtgccttccctgtgcagttccggcagcccagcgtgtctggcctgagccagatcaccaagagcctgtacatcagcaatggagtggccgccaacaacaagctgatgctgagcagcaaccagatcaccatggtgatcaacgtgtctgtggaggtggtgaacaccctgtatgaggacatccagtacatgcaggtgcctgtggccgacagccccaacagccggctgtgtgacttctttgaccccatcgctgaccacatccacagcgtggagatgaagcagggccgcaccctgctgcactgtgccgccggcgtgagccgctctgctgccctgtgcctggcctacctgatgaagtaccacgccatgagcctgctggatgcccacacctggaccaagagctgccggcccatcatccggcccaacagcggcttctgggagcagctgatccactatgagttccagctgtttgggaagaacacctag

SEQ ID NO: 116402 - DNA, 1732 bp, Artificial Sequence
  derived and/or modified sequence
gttgccgtagagatgggcagggctggatggagtggggtgcggtgagctgagctgaccctgcttcgccacggggactgcagtgaccccggcttgccggcagggcgggtaacaggttgagccagggtggggctgctcaggggcgtggagccgaggccaggatttctctgaagacccggcacaggctattcctttctgcgacgagcccattgctatggaaaccaaagcgttaggccagcggggattgaggctgcgggatcatgacgggtctctctcccgaagaaccttgcctaaggcttccccaagcggctacttcctgagcgaacccgcccacccgcctgaaggagagagttttccatggacacagcctagcagaaagacgcagccttcgtgcttcgctgactgctgaccactgacccaccgccttgatgacagcaccctcgtgtgccttcccagttcagttccggcagccctcagtcagcggcctctcgcagataaccaaaagcctgtatatcagcaatggtgtggccgccaacaacaagctcatgctgtctagcaaccagatcaccatggtcatcaatgtctcagtggaggtagtgaacaccttgtatgaggatatccagtacatgcaggtacctgtggctgactcccctaactcacgtctctgtgacttctttgaccctattgctgaccatatccacagcgtggagatgaagcagggccgtactttgctgcactgtgctgctggtgtgagccgctcagctgccctgtgcctcgcctacctcatgaagtaccacgccatgtccctgctggacgcccacacgtggaccaagtcatgccggcccatcatccgacccaacagcggcttttgggagcagctcatccactatgagttccaattgtttggcaagaacactgtgcacatggtcagttccccagtgggaatgatccctgacatctatgagaaggaagtccgtttgatgattccactgtgagccatcccacgagcccctgcattggagtcagaggtacagatctattgttgatcttacaccaagatccaaacttgaacattctacttttgttgatacagaaaaaaacagatgatgccttttatgagcacaaaaaagagttgctgtagcttttaactttataatccattttttttaagattaaactaattgtgagatggtgaagataaattttctgccctgtgagtgacactggccaggggataggttgaggcagatggtgcccagaagaaagagggcagcacccattgcacatggcaggcctggaatcctgcagccctccccaaaaacagattgacccaggaatgaatctgctacaattccacctcattctttcacacccagagccagagccttaagcatcatggtacctcttgcgcttcttacagtggtggttcctgctgccctccaggttgtgcatctgaagcctacaagaaagtttgcctacctggggcagctggatcacaaagttggctggaagtaccagacagtgacagccaccctggaggagaagaggaaggagaaggccaagatccactaccagaataagaaacagctcatgggatggccgggcgcggtggctcacgcctgtaatcctagcactttgggaggcggaggcgggcagatcaggaggtcaggagattgagaccatcctggctaacatggtgaaacccagtctctactaaaaaaataaaaaataaaaa

SEQ ID NO: 116403 - DNA, 567 bp, Artificial Sequence
  derived and/or modified sequence
atgaccgcccccagctgcgccttccccgtgcagttccggcagcccagcgtctccggactatcccagataaccaagagtctgtacatctctaacggagtggccgctaataataagctgatgctcagcagtaaccagattacaatggtgatcaatgtcagcgtagaggtggtcaatacactgtacgaggatattcagtacatgcaggtgcctgtggctgactcccccaatagcagactttgcgatttttttgacccaatcgccgaccacattcattcagttgagatgaaacaggggaggacactgctccactgcgcagctggcgtcagcagaagcgcagcactgtgcttagcttacctgatgaaataccacgccatgtcactgttggacgcccacacttggacaaaaagctgccggcctatcatccgcccaaactccgggttctgggaacaactcatacattacgagttccaactcttcggtaaaaataccgtacacatggttagctcccccgtcggcatgatccccgatatatatgagaaggaagtaagacttatgatcccactgtag

SEQ ID NO: 116404 - DNA, 492 bp, Artificial Sequence
  derived and/or modified sequence
atgaccgcccccagctgcgccttccccgtgcagttccggcagcccagcgtgagtgggctgtcccagatcacaaagtccttatacatatcaaacggggtggctgccaataataagttaatgcttagctccaaccagatcaccatggtgattaacgttagcgttgaagttgtgaacacactgtacgaggatattcagtacatgcaggtgcctgtcgctgactccccaaattctagactgtgcgatttcttcgaccccatcgcagatcacatccactccgtcgagatgaagcagggaagaacccttctgcattgcgccgcaggcgtgagccggtcggcggccctgtgcttggcgtacctgatgaaatatcatgctatgtctctgctcgacgcacacacttggactaagtcatgtaggccaattatacggccaaactctgggttctgggaacagctgatacactatgaatttcaattgttcggcaagaatacctag

SEQ ID NO: 116405 - DNA, 567 bp, Artificial Sequence
  derived and/or modified sequence
atgaccgcccccagctgcgccttccccgtgcagttccggcagccctccgtgtccggcctctctcagattaccaagagcctctacataagcaacggagtagcagcgaataataagcttatgctatcatctaatcagattaccatggtgattaacgtcagcgttgaggtggtgaacacactttatgaggacatccagtacatgcaggtaccggttgctgattctcccaactctcggttatgcgacttctttgatcctatcgcagatcatatccatagtgtcgagatgaaacagggacgaaccttgctgcactgtgccgctggagtgtccagatctgccgcattgtgtttggcctatctgatgaagtatcatgcaatgtccctcctcgacgcccacacttggactaagtcttgccggccaatcatccgacccaacagcggtttctgggagcaactcattcactacgagtttcagctatttggcaagaatacagtgcacatggttagcagtccagtgggaatgattccggacatctatgaaaaggaagtccgcctgatgatcccactgtag

SEQ ID NO: 116406 - DNA, 567 bp, Artificial Sequence
  derived and/or modified sequence
atgaccgcccccagctgcgccttccccgtgcagttccggcagccctctgtgtctgggctgtcacaaattacgaagagcctctatatctcgaacggcgtggctgctaacaacaaactgatgctttccagtaatcagatcaccatggtgataaatgtctctgtggaggtcgttaacacactttacgaggacatacaatatatgcaggtccccgtagccgactcccccaattctcgactgtgtgacttttttgacccaattgctgaccacattcatagtgtggaaatgaaacagggcaggaccctcctgcattgcgctgccggcgtgagcaggtctgcagctttgtgcctggcatatctgatgaaatatcacgctatgtcactattagatgcccatacatggactaaaagctgtaggccgattatccggcccaacagcggtttctgggaacaactcattcactacgaatttcagctgtttggcaagaatactgtgcacatggtgtcgtcgcctgtcggcatgatccccgacatctacgagaaggaggtgcgtctcatgattcccctgtag

SEQ ID NO: 116407 - DNA, 567 bp, Artificial Sequence
  derived and/or modified sequence
atgaccgcccccagctgcgccttccccgtgcagttccggcagcccagtgtgtctggtctctcccagatcactaaaagtttatacattagtaacggcgtcgctgctaacaataaattaatgctgtcgtccaaccagatcacaatggttatcaatgtgagcgtcgaggtggttaataccctgtatgaggatatccagtacatgcaggtcccagtagcggattcccccaactcccggttgtgtgattttttcgatccaattgccgatcatatacactccgtcgagatgaaacagggccggacgctgctccattgcgctgcgggcgtgtccagatccgcggccctgtgcctcgcatacctgatgaaatatcacgctatgtccttgctggacgctcacacttggacaaagtcctgcagaccaataatccggccaaacagtggtttctgggagcagctcatccactacgagtttcagctcttcggtaaaaacaccgtgcacatggtgtcatctcctgttggcatgattcccgatatttacgaaaaggaggtaaggctaatgattcctctatag

SEQ ID NO: 116408 - DNA, 1306 bp, Artificial Sequence
  derived and/or modified sequence
gtctctcggctgcagccctggtgcgacccggcccgttgccgtagagatgggcagggctggatggagtggggtgcggtgagctgagctgaccctgcttcgccacggggactgcagtgaccccggcttgccggcagggcgggtaacaggttgagccagggtggggctgctcaggggcgtggagccgaggccaggatttctctgaagacccggcacaggctattcctttctgcgacgagcccattgctatggaaaccaaagcgttaggccagcggggattgaggctgcgggatcatgacgggtctctctcccgaagaaccttgcctaaggcttccccaagcggctacttcctgagcgaacccgcccacccgcctgaaggagagagttttccatggacacagcctagcagaaagacgcagccttcgtgcttcgctgactgctgaccactgacccaccgccttgatgacagcaccctcgtgtgccttcccagttcagttccggcagccctcagtcagcggcctctcgcagataaccaaaagcctgtatatcagcaatggtgtggccgccaacaacaagctcatgctgtctagcaaccagatcaccatggtcatcaatgtctcagtggaggtagtgaacaccttgtatgaggatatccagtacatgcaggtacctgtggctgactcccctaactcacgtctctgtgacttctttgaccctattgctgaccatatccacagcgtggagatgaagcagggccgtactttgctgcactgtgctgctggtgtgagccgctcagctgccctgtgcctcgcctacctcatgaagtaccacgccatgtccctgctggacgcccacacgtggaccaagtcatgccggcccatcatccgacccaacagcggcttttgggagcagctcatccactatgagttccaattgtttggcaagaacactgtgcacatggtcagttccccagtgggaatgatccctgacatctatgagaaggaagtccgtttgatgattccactgtgagccatcccacgagcccctgcattggagtcagagcccctgcccttgatggatcagctggcaccacccagattgataaactggctcgtctgatcttgtggcccccacccaggaactgactgggcactagaaaacagcttcaacatcctgtgatttcatccctgaccaatcagcactcctgtctcactggcttcccccaacccaccaagttgtccttaaaactctgctccctgaatggtcggggagactgatttcagtaatagtaaaactctggtctcctgca

SEQ ID NO: 116409 - DNA, 1978 bp, Artificial Sequence
  derived and/or modified sequence
acggaagcggtgagactgtctctcggctgcagccctggtgcgacccggcccgttgccgtagagatgggcagggctggatggagtggggtgcggtgagctgagctgaccctgcttcgccacggggactgcagtgaccccggcttgccggcagggcgggtaacaggttgagccagggtggggctgctcaggggcgtggagccgaggccaggatttctctgaagacccggcacaggctattcctttctgcgacgagcccattgctatggaaaccaaagcgttaggccagcggggattgaggctgcgggatcatgacgggtctctctcccgaagaaccttgcctaaggcttccccaagcggctacttcctgagcgaacccgcccacccgcctgaaggagagaggtaaaaccctgggggtcctgacactaagcaggcgaagaagcctattccaatgccagctcccctaggaaacctacccggcccacccctagaagtgatgcttcgctctcgttaactcttggactttgttccatgtttataacttagtatttcacgaacgccccgcggtgtttgttcatttttcccacacataatggaccataaaggtcggcttctttgctttatgactcgttctgaacaagtccttttccgcgctgtgtctcactttcctcttttgtaaaatggaaatattaactctagacgccggtctgattaggttgctttgaagatcgaaccagatgagggaagccaaatacttcataggctgtaaagtggtgaagctgaactgctaccgagttgctatttttttctcctcctccctctcaagctaaacgttctttagatcttttgtgatttcttcaggtggtctttgcgactccctaggctccgacctggaagaaatcttttttacacttccctttcacagagccctgcattttaacttccctatcagaagcgagaaaaatagttatcattttgagagggcttactctatgccaagccctgagaaaactctttacgtggattatctcgtttaatttcacaacatccttttaagttttccatggacacagcctagcagaaagacgcagccttcgtgcttcgctgactgctgaccactgacccaccgccttgatgacagcaccctcgtgtgccttcccagttcagttccggcagccctcagtcagcggcctctcgcagataaccaaaagcctgtatatcagcaatggtgtggccgccaacaacaagctcatgctgtctagcaaccagatcaccatggtcatcaatgtctcagtggaggtagtgaacaccttgtatgaggatatccagtacatgcaggtacctgtggctgactcccctaactcacgtctctgtgacttctttgaccctattgctgaccatatccacagcgtggagatgaagcagggccgtactttgctgcactgtgctgctggtgtgagccgctcagctgccctgtgcctcgcctacctcatgaagtaccacgccatgtccctgctggacgcccacacgtggaccaagtcatgccggcccatcatccgacccaacagcggcttttgggagcagctcatccactatgagttccaattgtttggcaagaacactgtgcacatggtcagttccccagtgggaatgatccctgacatctatgagaaggaagtccgtttgatgattccactgtgagccatcccacgagcccctgcattggagtcagagcccctgcccttgatggatcagctggcaccacccagattgataaactggctcgtctgatcttgtggcccccacccaggaactgactgggcactagaaaacagcttcaacatcctgtgatttcatccctgaccaatcagcactcctgtctcactggcttcccccaacccaccaagttgtccttaaaactctgctccctgaatggtcggggagactgatttcagtaatagtaaaactctggtctcctgca

SEQ ID NO: 116410 - DNA, 567 bp, Artificial Sequence
  derived and/or modified sequence
atgactgctccatcatgcgcgtttccagtgcagtttcggcagccatccgtgtctggtctttcacagatcaccaagtccttatatatttccaatggcgtcgctgccaacaacaagctgatgctgtccagcaatcagataacgatggtcattaatgtgtccgtggaagttgtgaacactctctacgaagacattcagtatatgcaggttcctgttgccgactcccctaattcgaggttgtgcgactttttcgaccctatcgcggatcatatccactcggtggaaatgaagcagggacgaaccttgctgcactgtgcagcaggtgtcagcagatccgccgctctctgtctcgcatacttgatgaagtaccatgccatgtccctgctggatgcacacacttggacaaaatcatgtcgaccaattatacgacctaactccggattctgggaacagctgatccactacgaatttcagcttttcggtaaaaacaccgtacatatggtctcttcccctgttggaatgatacctgatatatacgagaaggaagtccgcctaatgattcccctctag

SEQ ID NO: 116411 - DNA, 492 bp, Artificial Sequence
  derived and/or modified sequence
atgacagccccatcttgcgcattccctgtgcagtttcgccagccaagcgtgtctggcttatcacagataaccaaatcgctttacatttccaacggggttgccgctaacaacaagctgatgttgtcttccaaccaaatcacaatggtaatcaatgtgagcgtggaggtggtcaacactttatacgaggatattcagtatatgcaggtccccgtcgctgatagccccaacagcaggctgtgtgatttctttgatccgattgctgaccatatccatagcgtggaaatgaagcaaggccgaacgctgctgcactgcgctgcaggagtatctcgctcggccgctctttgcctggcttaccttatgaaatatcacgccatgagccttctagacgcacacacctggactaagagctgtcggcctattatacggccaaacagcgggttttgggagcagctgatccattatgagttccaattgttcggaaagaatacttag

SEQ ID NO: 116412 - DNA, 567 bp, Artificial Sequence
  derived and/or modified sequence
atgaccgctccctcctgcgcctttcctgttcaatttcgccagccaagcgtgagtgggctcagccagatcacaaagtctttatacatctcaaatggcgtggctgcgaataacaagctgatgcttagtagcaaccagatcacaatggtgatcaatgtctctgtcgaggtcgtgaatacactatacgaggacatccaatacatgcaggtgccggtcgctgattcacctaatagcaggctctgtgacttttttgacccgatcgctgatcacatccactctgttgaaatgaaacagggccgtactttgctgcattgcgcagcaggagtttctcggagtgcggctctttgcctggcctatcttatgaagtaccacgcaatgtcactactggacgctcatacctggaccaaaagctgccgaccgatcatccgcccaaattctggtttttgggaacagctgatccactacgagttccagcttttcggaaagaacactgttcatatggtatccagccccgtaggaatgatacccgatatctacgagaaggaagtccgtctaatgatcccactgtag

SEQ ID NO: 116413 - DNA, 567 bp, Artificial Sequence
  derived and/or modified sequence
atgacggcgccatcttgcgctttccccgtacagtttcgtcagccttctgtgtctggcctttcccagattacaaagagtctctatatttctaatggggtggcggctaacaacaagttgatgctctcaagcaaccaaattaccatggtgatcaatgtcagcgtcgaggtcgtaaacacactctatgaggatattcagtatatgcaagtccctgtggctgacagtcccaacagcagattatgcgactttttcgatcctatcgcggaccacatccatagcgtggaaatgaaacagggacggacactgctccattgcgccgcaggggtttcccgatctgccgctctgtgccttgcatatctgatgaaatatcatgcaatgagcttgttggatgcccatacctggactaaatcgtgcaggccaattatcaggcccaactccggattttgggagcagctgattcactatgaatttcagttatttggtaaaaacaccgttcacatggtgagctcacccgttggcatgatccctgacatttatgagaaagaagtccgcctgatgataccactgtag

SEQ ID NO: 116414 - DNA, 567 bp, Artificial Sequence
  derived and/or modified sequence
atgacagcgccatcctgtgccttccccgtgcagtttagacaacctagtgtctccggcctttctcagattactaagagtctgtacatttctaatggagttgccgctaataacaagcttatgttgagctccaaccagattaccatggtgattaatgtttctgttgaggttgtgaacacactctatgaagacatccagtacatgcaagtccctgtggccgattcacctaattcacgtctgtgcgacttctttgatccaatcgctgaccacatccatagcgtggagatgaaacaggggaggaccctgctgcactgcgctgctggggtgtcaaggagcgcagccttgtgcctggcctatctcatgaagtatcacgcaatgagcttgctggacgcacatacctggaccaaatcttgtcggccaattatccgcccaaacagtggattctgggagcagttaatacactatgagttccagttgttcgggaagaacaccgtgcacatggtatcctcgcccgtgggaatgattcctgatatctatgaaaaggaagttcgactcatgatacctctgtag

SEQ ID NO: 116415 - DNA, 36 bp, Artificial Sequence
  derived and/or modified sequence
atgaccgcccccagctgcgccttccccgtgcagtag

SEQ ID NO: 116416 - DNA, 36 bp, Artificial Sequence
  derived and/or modified sequence
atgactgctcctagttgtgccttccctgttcagtag

SEQ ID NO: 116417 - DNA, 36 bp, Artificial Sequence
  derived and/or modified sequence
atgacagcccccagctgtgccttccctgtgcagtag

SEQ ID NO: 116418 - DNA, 36 bp, Artificial Sequence
  derived and/or modified sequence
atgactgcaccttcctgtgccttcccagtacaatag

SEQ ID NO: 116419 - protein, 58 aa, Artificial Sequence
  derived and/or modified sequence
MDLLQFLAFLFVLLLSGMGATGTLRTSLDPSLEIYKKMFEVKRREQLLALKNLAQLND

SEQ ID NO: 116420 - DNA, 177 bp, Artificial Sequence
  derived and/or modified sequence
atggacctgttgcagtttctggcttttttgttcgtgctgctgttaagtggaatgggtgccaccgggacactccggactagtctggatccaagtttagagatctacaagaaaatgtttgaggtgaagaggcgggaacaactgcttgcgctgaagaacttagctcagttaaacgattag

SEQ ID NO: 116421 - DNA, 355 bp, Artificial Sequence
  derived and/or modified sequence
ttgctttgctgttagcctgttggaccttcgagcctagctgctcgcacaggactcggccacctgcccttcctgcaccgactggccaggagttcagagcctcatgctgagccaggaggagctccgggtgacgcatacggcaggatcgggattgagaggctgaaaaactcaagaggtttggatatggaccttcttcaattcctggccttcctctttgtcctgcttttgtctgggatgggagccacaggcaccttgaggacctccctggacccaagcctggagatctacaagaagatgtttgaggtgaagcggcgggagcagctgttggcactgaagaacctggcacagctgaacgaca

SEQ ID NO: 116422 - DNA, 177 bp, Artificial Sequence
  derived and/or modified sequence
atggacctgctacagtttctcgcatttctgttcgtgctgcttctgtccgggatgggcgctacgggaacacttagaacaagcctcgacccctcactggagatctacaagaaaatgtttgaagtgaaacgcagagaacaactactggccctgaaaaacctggcccaactgaatgactag

SEQ ID NO: 116423 - DNA, 177 bp, Artificial Sequence
  derived and/or modified sequence
atggacctgctgcagttcctggccttcctgttcgtgctgctgctgagcggcatgggcgccaccggcaccctgagaaccagcctggaccccagcctggagatctacaagaagatgttcgaggtgaagagaagagagcagctgctggccctgaagaacctggcccagctgaacgactag

SEQ ID NO: 116424 - DNA, 177 bp, Artificial Sequence
  derived and/or modified sequence
atggatctcctgcagtttctggcctttctcttcgtcctgttgttgtccggcatgggcgctacaggaaccctgagaacttctctggatcctagcctggagatctacaaaaagatgttcgaggtgaaacgaagggaacaactgctggccctcaagaacctcgcccaactgaatgactag

SEQ ID NO: 116425 - DNA, 177 bp, Artificial Sequence
  derived and/or modified sequence
atggacctgctgcagttcctggccttcctgtttgtgctgctgctgagcggcatgggcgccaccggcaccctgcggaccagcctggaccccagcctggagatctacaagaagatgtttgaggtgaagagaagagagcagctgctggccctgaagaacctggcccagctgaatgactag

SEQ ID NO: 116426 - DNA, 177 bp, Artificial Sequence
  derived and/or modified sequence
atggacctgctgcagttcctggccttcctgttcgtgctgctgctgtctggcatgggcgccacaggcacactccgtacaagtctggaccccagtcttgagatttataagaaaatgttcgaggtgaagcgccgcgaacaacttcttgccctaaagaacctggcgcagctgaacgactag

SEQ ID NO: 116427 - RNA, 177 nt, Artificial Sequence
  derived and/or modified sequence
auggaccugcuacaguuucucgcauuucuguucgugcugcuucuguccgggaugggcgcuacgggaacacuuagaacaagccucgaccccucacuggagaucuacaagaaaauguuugaagugaaacgcagagaacaacuacuggcccugaaaaaccuggcccaacugaaugacuag

SEQ ID NO: 116428 - DNA, 1125 bp, Artificial Sequence
  derived and/or modified sequence
atggcagcgccctctcaacagcgccttgtcgttgtcagcgtgtcgccgcaatcccgcgcgtcactggccgctcgctttcagttgaatccaacagatacagctagaaagcttacatcatttttcaagaaaatcggtgtccatttcgtgttcgataccgcattcagtcgacatttttccttgctcgagagccagcgcgagttcgtcagaagattccgcggccaggcagactgccggcaagcgctgcctctgcttgcgtccgcctgccccgggtggatttgctacgctgagaaaactcacgggagctttatccttccacatatcagcactgccagatctccccagcaggttatgggtagcctagtcaaggattttttcgctcagcagcaacacctgacaccggacaagatatatcacgtgacagtaatgccctgttacgacaaaaaactggaggcctctcgcccggacttttttaatcaagaacaccagacacgggacgtggactgcgtccttacaacaggagaggtctttcgactgctggaagaagaaggagtgtctttgcccgaccttgagccagctcccttagactcactctgttctggggcaagcgctgaagagccaacctctcatcgtggagggggatccggtggatacctggagcacgtgtttaggcacgctgcaagggagttatttggcattcacgtggctgaagtgacatacaagcccttgcggaacaaagactttcaggaggtgaccttggaaaaggagggccaggtcctcctgcatttcgcaatggcctatggcttccgaaacattcagaacctggtccaacgccttaaaaggggcagatgcccataccactatgtggaagtcatggcttgcccgagcggctgcttaaacggcggcgggcaactacaagcacctgacagacccagccgagaactactgcagcacgtcgaacggttatacgggatggttcgcgcagaggcccccgaggacgccccgggagtgcaggaattgtacacacactggttgcagggaaccgacagtgaatgcgccggccggttgctccatacccagtaccatgcagtcgagaaggcatccaccggactgggcatacggtggtag

SEQ ID NO: 116429 - DNA, 1125 bp, Artificial Sequence
  derived and/or modified sequence
atggccgcccccagccagcagaggctggtggtggtgtctgtgagcccccagagccgggccagcctggccgcccgcttccagctgaaccccacagacacagccaggaagctgaccagcttcttcaagaagattggagtgcactttgtgtttgacacagccttcagccgccacttcagcctgctggagagccagcgggagtttgtgcggcgcttccggggccaggccgactgccggcaggccctgcccctgctggccagcgcctgccccggctggatctgctacgccgagaagacccacggcagcttcatcctgccccacatcagcacagcccggagcccccagcaggtgatgggcagcctggtgaaggacttctttgcccagcagcagcacctgaccccagacaagatctaccacgtgacagtgatgccctgctatgacaagaagctggaggccagcaggccagacttcttcaaccaggagcaccagaccagagatgtggactgtgtgctgaccaccggggaggtgttccggctgctggaggaggagggcgtgtccctgcctgacctggagcccgcccccctggacagcctgtgcagcggggccagcgctgaggagcccaccagccacagaggaggcggcagcggcggctacctggagcacgtgttcagacatgctgcccgggagctgtttggcatccacgtggccgaggtgacctacaagcccctgaggaacaaggacttccaggaggtgaccctggagaaggagggccaggtgctgctgcactttgccatggcctacggcttcaggaacatccagaacctggtgcagaggctgaagaggggccgctgcccctaccactacgtggaggtgatggcctgccccagcggctgcctgaatggaggcggccagctgcaggccccagaccggcccagccgggagctgctgcagcacgtggagcggctgtatggcatggtgcgggcagaggccccagaagatgcccctggggtgcaggagctgtacacccactggctgcagggcacagattctgaatgtgccggccgcctgctgcacacccagtaccacgctgtggagaaggccagcacaggcctgggcatccgctggtag

SEQ ID NO: 116430 - DNA, 1125 bp, Artificial Sequence
  derived and/or modified sequence
atggccgcccccagccagcagcggctggtggtggtgagcgtgagcccacagagccgggcctcgcttgcagcgagattccaactcaatccaaccgacaccgctcgcaaactcacgagctttttcaaaaaaatcggggtgcactttgtgttcgacaccgccttctccaggcacttctcccttctcgagtctcagcgagagtttgtccgaagatttagggggcaagcagactgcaggcaggccctgcccctgctcgcgagtgcttgccccggatggatctgttatgccgagaaaacacatgggagctttatcttacctcatatttcaactgcccgcagcccccagcaagttatgggcagtctggtgaaggacttcttcgctcagcagcagcatctaacccccgacaagatctaccatgtcacagtgatgccgtgttatgacaagaaattggaggcgtctaggccggacttctttaaccaggagcaccagacccgtgacgttgattgtgtcctgaccaccggcgaagtattcagactgttagaagaggaaggcgtatcattgccagaccttgagccagcccctttggatagcctgtgtagcggggcctccgctgaggagcccaccagtcatcggggcggagggagtggtggatatttggaacacgtcttccggcacgcagccagggagcttttcggcatacacgtcgccgaggtgacctataagccactgaggaataaggacttccaggaggtgacactggagaaagagggccaagttctgttacacttcgccatggcatacgggttcagaaatattcagaacctggttcaaaggttaaagagaggaaggtgcccataccactatgttgaggtcatggcatgtcccagcggctgtctaaatggtggcgggcagcttcaggctcccgacagaccttccagagaactcctacagcatgtggagagactgtacggaatggttagagcagaggcccccgaggatgcacccggagtccaggagctttacactcactggctccagggtaccgattctgaatgcgctggacgactgctgcatacacagtaccacgctgtggaaaaggcatccacaggtctagggatcaggtggtag

SEQ ID NO: 116431 - DNA, 1003 bp, Artificial Sequence
  derived and/or modified sequence
agtgcggccgtcatggcgtcgcccttcagcggggcgctgcagctgacggacctggatgacttcatcgggccgtctcaggagtgcatcaagcctgtcaaagtggaaaaaagggcgggaagtggcgtggccaagattcgcattgaagatgacgggagctacttccaaattaaccaagacggcgggacccggaggctggagaaggccaaggtctcgctaaacgactgcctggcgtgcagcggctgcatcacctccgcagagaccgtgcttatcacccagcagagccacgaggagctgaagaaggttctagatgctaacaaggggtgcacttcgtcttcgacaccgccttctcaaggcacttcagcctcctggagagccagcgagagtttgtgcggcgattccgaggacaggccgactgcagacaggcgctgcccctgctggcctctgcctgcccaggctggatctgctatgccgagaagactcacggcagcttcatcctcccccacatcagcaccgcccggtccccgcagcaggtcatgggctccctggtcaaggacttcttcgcccagcagcagcacttgacccctgacaagatctaccacgtcacagtgatgccctgctatgacaaaaagctggaagcctccagacccgactttttcaaccaggagcaccagacacgggatgtggactgtgtcctcacaacaggagaagttttcaggttgctggaggaagagggcgtctccctccccgacctggaaccagcccctctggacagcctgtgcagcggtgcctctgcagaggagcccaccagccatcggggagggggctcggggggctacctggagcacgtgttccggcacgcggcccgagagctctttggaatccatgtggctgaggttacctacaaacccctgaggaacaaagacttccaggaggtgacactggagaaggagggccaggtgctgctgcacttcgcaatggcgtacggcttccgcaacatccagaa

SEQ ID NO: 116432 - DNA, 1125 bp, Artificial Sequence
  derived and/or modified sequence
atggccgcaccttcgcagcaacgcctagttgtcgtctccgtgtctccacaatcgcgcgcaagtcttgctgccaggtttcagttaaatcctactgatacagcaagaaaactgacttcattctttaaaaagatcggcgtgcacttcgtgtttgataccgctttctccagacactttagtcttctggagtcccagagggagttcgtgcggcgattcaggggccaggccgactgtaggcaggccctgcccctgcttgcgagtgcgtgcccaggatggatctgctatgccgaaaagacccacgggagcttcatcctcccacacatttctaccgcccgaagtcctcagcaggtgatgggcagcctggtgaaggacttcttcgctcagcagcagcatctgacaccagacaaaatctatcatgtcacagttatgccatgctacgataagaaactggaggccagccgccctgatttcttcaaccaggaacatcagactcgcgatgttgattgtgtcttaaccacaggggaggtcttcagacttttagaggaggagggggttagtctccccgacctggaaccggcaccgctggacagcttatgctccggagccagcgcggaggaacctaccagccaccggggagggggatccgggggttatctggagcacgtgtttagacacgccgctcgcgagttgttcggtatccatgtggcagaagtgacctataagcctctccgtaacaaggactttcaggaggtcaccctcgaaaaggagggccaggttctgctacacttcgccatggcttatggattccgcaacattcagaatctggttcagcgccttaagagagggcgatgcccctaccactacgtcgaagtcatggcatgtccctcagggtgtctgaacggaggagggcaactgcaggcgcctgatcgtccctccagggaactgctgcagcacgtcgagcgactttacggcatggtcagagctgaagccccagaggatgcccctggcgtgcaggagctttatacacactggctccaaggcacagattccgagtgtgctggcaggctgctgcacacccagtatcatgcagtcgaaaaagcatctaccggcctcggcatcagatggtag

SEQ ID NO: 116433 - DNA, 1125 bp, Artificial Sequence
  derived and/or modified sequence
atggccgcccccagccagcagagactggtggtggtgagcgtgagcccccagagcagagccagcctggccgccagattccagctgaaccccaccgacaccgccagaaagctgaccagcttcttcaagaagatcggcgtgcacttcgtgttcgacaccgccttcagcagacacttcagcctgctggagagccagagagagttcgtgagaagattcagaggccaggccgactgcagacaggccctgcccctgctggccagcgcctgccccggctggatctgctacgccgagaagacccacggcagcttcatcctgccccacatcagcaccgccagaagcccccagcaggtgatgggcagcctggtgaaggacttcttcgcccagcagcagcacctgacccccgacaagatctaccacgtgaccgtgatgccctgctacgacaagaagctggaggccagcagacccgacttcttcaaccaggagcaccagaccagagacgtggactgcgtgctgaccaccggcgaggtgttcagactgctggaggaggagggcgtgagcctgcccgacctggagcccgcccccctggacagcctgtgcagcggcgccagcgccgaggagcccaccagccacagaggcggcggcagcggcggctacctggagcacgtgttcagacacgccgccagagagctgttcggcatccacgtggccgaggtgacctacaagcccctgagaaacaaggacttccaggaggtgaccctggagaaggagggccaggtgctgctgcacttcgccatggcctacggcttcagaaacatccagaacctggtgcagagactgaagagaggcagatgcccctaccactacgtggaggtgatggcctgccccagcggctgcctgaacggcggcggccagctgcaggcccccgacagacccagcagagagctgctgcagcacgtggagagactgtacggcatggtgagagccgaggcccccgaggacgcccccggcgtgcaggagctgtacacccactggctgcagggcaccgacagcgagtgcgccggcagactgctgcacacccagtaccacgccgtggagaaggccagcaccggcctgggcatcagatggtag

SEQ ID NO: 116434 - protein, 470 aa, Artificial Sequence
  derived and/or modified sequence
MSRLGALGGARAGLGLLLGTAAGLGFLCLLYSQRWKRTQRHGRSQSLPNSLDYTQTSDPGRHVMLLRAVPGGAGDASVLPSLPREGQEKVLDRLDFVLTSLVALRREVEELRSSLRGLAGEIVGEVRCHMEENQRVARRRRFPFVRERSDSTGSSSVYFTASSGATFTDAESEGGYTTANAESDNERDSDKESEDGEDEVSCETVKMGRKDSLDLEEEAASGASSALEAGGSSGLEDVLPLLQQADELHRGDEQGKREGFQLLLNNKLVYGSRQDFLWRLARAYSDMCELTEEVSEKKSYALDGKEEAEAALEKGDESADCHLWYAVLCGQLAEHESIQRRIQSGFSFKEHVDKAIALQPENPMAHFLLGRWCYQVSHLSWLEKKTATALLESPLSATVEDALQSFLKAEELQPGFSKAGRVYISKCYRELGKNSEARWWMKLALELPDVTKEDLAIQKDLEELEVILRD

SEQ ID NO: 116435 - protein, 407 aa, Artificial Sequence [sequence omitted]

SEQ ID NO: 116436 - protein, 287 aa, Artificial Sequence
  derived and/or modified sequence
MSRLGALGGARAGLGLLLGTAAGLGFLCLLYSQRWKRTQRHGRSQSLPNSLDYTQTSDPGRHVMLLRAVPGGAGDASVLPSLPREGQEKVLDRLDFVLTSLVALRREVEELRSSLRGLAGEIVGEVRCHMEENQRVARRRRFPFVRERSDSTGSSSVYFTASSGATFTDAESEGGYTTANAESDNERDSDKESEDGEDEVSCETVKMGRKDSLDLEEEAASGASSALEAGGSSGLEDVLPLLQQADELHRGDEQGKREGFQLLLNNKLVYGSRQDFLWRLARAYSDM

SEQ ID NO: 116437 - DNA, 3138 bp, Artificial Sequence
  derived and/or modified sequence
tgttatcatagtccataaaatcggtctttttagttgccacaattataagaagttgcatacaattacaagagtaaaacagaattataagacagcacgttaggtttaagatttatggccgggtgcggcggctcacgcactttgggagcccgaggcgggcggatcgcactttgagagaccaggagagcgggacccagtctctacaaaataaaaataaaaataaaatgtggggagagcgtgacgttttccaggtacagaggggaggtccaggcagaagcgcaggtagaaagtgtgaatatgctgagcgtattccgggagcagcaagttaagccggtgtgaccggagggaaatggaggcctggctgccggacggtgagggtgactgcgcgagcgtccgcccaagaagtctccctgccttcccgcctttcccctgtcttgggccccttcttgctttcctttcgcgctctgtgctgactccgcccctccggcggcgcccgtggccccgcccctgagggaaacagacaaggggcggggccggcgcggtcatctctctgcgccttcccgcagggcgccgagcacctggcgccgcctgcctgacgtcacggtcactgacagcgtgagcccgcggcggctgctgccatggtggctggcggccgggtaagggtctgagtggatctcctgccaggccagagcgccttcgggggccgcggcggaaggccaggagtttgcagccagggcgccgggtttgtggtctgcagtgtcgtgaggctgaggtgggggttgaaggcccagaagccggactctgtgacccgggtcggggggtgtactggaggggcggctacgtccaggctgggtgagaagagaggcagtggggcccaggaggctggaggaagccttagggttcagactggggtgcacgtagtcgagagctcagggtttgggcaaggggatacctgccggggttcagccttgagggtgggtttaccgggttcacgaatctctctctctccttacccccgcccgcccgcccgcctgcctgctcccggtgacttctgctggccgcaggtgcagcatgtctagactgggagccctgggtggtgcccgtgccgggctgggactgttgctgggtaccgccgccggccttggattcctgtgcctcctttacagccagcgatggaaacggacccagcgtcatggccgcagccagagcctgcccaactccctggactatacgcagacttcagatcccggacgccacgtgatgctcctgcgggctgtcccaggtggggctggagatgcctcagtgctgcccagccttccacgggaaggacaggagaaggtgctggaccgcctggactttgtgctgaccagccttgtggcgctgcggcgggaggtggaggagctgagaagcagcctgcgagggcttgcgggggagattgttggggaggtccgatgccacatggaagagaaccagagagtggctcggcggcgaaggtttccgtttgtccgggagaggagtgactccactggctccagctctgtctacttcacggcctcctcgggagccacgttcacagatgctgagagtgaagggggttacacaacagccaatgcggagtctgacaatgagcgggactctgacaaagaaagtgaggacggggaagatgaagtgagctgtgagactgtgaagatggggagaaaggattctcttgacttggaggaagaggcagcttcaggtgcctccagtgccctggaggctggaggttcctcaggcttggaggatgtgctgcccctcctgcagcaggccgacgagctgcacaggggtgatgagcaaggcaagcgggagggcttccagctgctgctcaacaacaagctggtgtatggaagccggcaggactttctctggcgcctggcccgagcctacagtgacatgtgtgagctcactgaggaggtgagcgagaagaagtcatatgccctagatggaaaagaagaagcagaggctgctctggagaagggggatgagagtgctgactgtcacctgtggtatgcggtgctttgtggtcagctggctgagcatgagagcatccagaggcgcatccagagtggctttagcttcaaggagcatgtggacaaagccattgctctccagccagaaaaccccatggctcactttcttcttggcaggtggtgctatcaggtctctcacctgagctggctagaaaaaaaaactgctacagccttgcttgaaagccctctcagtgccactgtggaagatgccctccagagcttcctaaaggctgaagaactacagccaggattttccaaagcaggaagggtatatatttccaagtgctacagagaactagggaaaaactctgaagctagatggtggatgaagttggccctggagctgccagatgtcacgaaggaggatttggctatccagaaggacctggaagaactggaagtcattttacgagactaaccacgtttcactggccttcatgacttgatgccactatttaaggtgggggggcggggaggcttttttccttagaccttgctgagatcaggaaaccacacaaatctgtctcctgggtctgactgctacccactaccactccccattagttaatttattctaacctctaacctaatctagaattggggcagtactcatggcttccgtttctgttgttctctcccttgagtaatctcttaaaaaaatcaagattcacacctgccccaggattacacatgggtagagcctgcaagacctgagaccttccaattgctggtgaggtggatgaacttcaaagctataggaacaaagcacataacttgtcactttaatctttttcactgactaataggactcagtacatatagtcttaagatcataccttacctaccaaggtaaaaagagggatcagagtggcccacagacattgctttcttatcacctatcatgtgaattctacctgtattcctgggctggaccacttgataacttccagtgtcctggcagcttttggaatgacagcagtggtatggggtttatgatgctataaaacaatgtctgaaaagttgcctagaatatattttgttacaaacttgaaataaaccaaatttgatgttatca

SEQ ID NO: 116438 - DNA, 2251 bp, Artificial Sequence
  derived and/or modified sequence
gacgtcacggtcactgacagcgtgagcccgcggcggctgctgccatggtggctggcggccgggtaagggtctgagtggatctcctgccaggccagagcgccttcgggggccgcggcggaaggccaggagtttgcagccagggcgccgggtttgtggtctgcagtgtcgtgaggctgaggtgcagcatgtctagactgggagccctgggtggtgcccgtgccgggctgggactgttgctgggtaccgccgccggccttggattcctgtgcctcctttacagccagcgatggaaacggacccagcgtcatggccgcagccagagcctgcccaactccctggactatacgcagacttcagatcccggacgccacgtgatgctcctgcgggctgtcccaggtggggctggagatgcctcagtgctgcccagccttccacgggaaggacaggagaaggtgctggaccgcctggactttgtgctgaccagccttgtggcgctgcggcgggaggtggaggagctgagaagcagcctgcgagggcttgcgggggagattgttggggaggtccgatgccacatggaagagaaccagagagtggctcggcggcgaaggtttccgtttgtccgggagaggagtgactccactggctccagctctgtctacttcacggcctcctcgggagccacgttcacagatgctgagagtgaagggggttacacaacagccaatgcggagtctgacaatgagcgggactctgacaaagaaagtgaggacggggaagatgaagtgagctgtgagactgtgaagatggggagaaaggattctcttgacttggaggaagaggcagcttcaggtgcctccagtgccctggaggctggaggttcctcaggcttggaggatgtgctgcccctcctgcagcaggccgacgagctgcacaggggtgatgagcaaggcaagcgggagggcttccagctgctgctcaacaacaagctggtgtatggaagccggcaggactttctctggcgcctggcccgagcctacagtgacatgtgtgagctcactgaggaggtgagcgagaagaagtcatatgccctagatggaaaagaagaagcagaggctgctctggagaagggggatgagagtgctgactgtcacctgtggtatgcggtgctttgtggtcagctggctgagcatgagagcatccagaggcgcatccagagtggctttagcttcaaggagcatgtggacaaagccattgctctccagccagaaaaccccatggctcactttcttcttggcaggtggtgctatcaggtctctcacctgagctggctagaaaaaaaaactgctacagccttgcttgaaagccctctcagtgccactgtggaagatgccctccagagcttcctaaaggctgaagaactacagccaggattttccaaagcaggaagggtatatatttccaagtgctacagagaactagggaaaaactctgaagctagatggtggatgaagttggccctggagctgccagatgtcacgaaggaggatttggctatccagaaggacctggaagaactggaagtcattttacgagactaaccacgtttcactggccttcatgacttgatgccactatttaaggtgggggggcggggaggcttttttccttagaccttgctgagatcaggaaaccacacaaatctgtctcctgggtctgactgctacccactaccactccccattagttaatttattctaacctctaacctaatctagaattggggcagtactcatggcttccgtttctgttgttctctcccttgagtaatctcttaaaaaaatcaagattcacacctgccccaggattacacatgggtagagcctgcaagacctgagaccttccaattgctggtgaggtggatgaacttcaaagctataggaacaaagcacataacttgtcactttaatctttttcactgactaataggactcagtacatatagtcttaagatcataccttacctaccaaggtaaaaagagggatcagagtggcccacagacattgctttcttatcacctatcatgtgaattctacctgtattcctgggctggaccacttgataacttccagtgtcctggcagcttttggaatgacagcagtggtatggggtttatgatgctataaaacaatgtctgaaaagttgcctagaatatattttgttacaaacttgaaataaaccaaatttgatgtt

SEQ ID NO: 116439 - DNA, 2139 bp, Artificial Sequence
  derived and/or modified sequence
tgacagcgtgagcccgcggcggctgctgccatggtggctggcggccgggtaagggtctgagtggatctcctgccaggccagagcgccttcgggggccgcggcggaaggccaggagtttgcagccagggcgccgggtttgtggtctgcagtgtcgtgaggctgaggtgcagcatgtctagactgggagccctgggtggtgcccgtgccgggctgggactgttgctgggactatacgcagacttcagatcccggacgccacgtgatgctcctgcgggctgtcccaggtggggctggagatgcctcagtgctgcccagccttccacgggaaggacaggagaaggtgctggaccgcctggactttgtgctgaccagccttgtggcgctgcggcgggaggtggaggagctgagaagcagcctgcgagggcttgcgggggagattgttggggaggtccgatgccacatggaagagaaccagagagtggctcggcggcgaaggtttccgtttgtccgggagaggagtgactccactggctccagctctgtctacttcacggcctcctcgggagccacgttcacagatgctgagagtgaagggggttacacaacagccaatgcggagtctgacaatgagcgggactctgacaaagaaagtgaggacggggaagatgaagtgagctgtgagactgtgaagatggggagaaaggattctcttgacttggaggaagaggcagcttcaggtgcctccagtgccctggaggctggaggttcctcaggcttggaggatgtgctgcccctcctgcagcaggccgacgagctgcacaggggtgatgagcaaggcaagcgggagggcttccagctgctgctcaacaacaagctggtgtatggaagccggcaggactttctctggcgcctggcccgagcctacagtgacatgtgtgagctcactgaggaggtgagcgagaagaagtcatatgccctagatggaaaagaagaagcagaggctgctctggagaagggggatgagagtgctgactgtcacctgtggtatgcggtgctttgtggtcagctggctgagcatgagagcatccagaggcgcatccagagtggctttagcttcaaggagcatgtggacaaagccattgctctccagccagaaaaccccatggctcactttcttcttggcaggtggtgctatcaggtctctcacctgagctggctagaaaaaaaaactgctacagccttgcttgaaagccctctcagtgccactgtggaagatgccctccagagcttcctaaaggctgaagaactacagccaggattttccaaagcaggaagggtatatatttccaagtgctacagagaactagggaaaaactctgaagctagatggtggatgaagttggccctggagctgccagatgtcacgaaggaggatttggctatccagaaggacctggaagaactggaagtcattttacgagactaaccacgtttcactggccttcatgacttgatgccactatttaaggtgggggggcggggaggcttttttccttagaccttgctgagatcaggaaaccacacaaatctgtctcctgggtctgactgctacccactaccactccccattagttaatttattctaacctctaacctaatctagaattggggcagtactcatggcttccgtttctgttgttctctcccttgagtaatctcttaaaaaaatcaagattcacacctgccccaggattacacatgggtagagcctgcaagacctgagaccttccaattgctggtgaggtggatgaacttcaaagctataggaacaaagcacataacttgtcactttaatctttttcactgactaataggactcagtacatatagtcttaagatcataccttacctaccaaggtaaaaagagggatcagagtggcccacagacattgctttcttatcacctatcatgtgaattctacctgtattcctgggctggaccacttgataacttccagtgtcctggcagcttttggaatgacagcagtggtatggggtttatgatgctataaaacaatgtctgaaaagttgcctagaatatattttgttacaaacttgaaataaaccaaatttgatgtt

SEQ ID NO: 116440 - DNA, 1008 bp, Artificial Sequence
  derived and/or modified sequence
agacaaggggcggggccggcgcggtcatctctctgcgccttcccgcagggcgccgagcacctggcgccgcctgcctgacgtcacggtcactgacagcgtgagcccgcggcggctgctgccatggtggctggcggccgggtgcagcatgtctagactgggagccctgggtggtgcccgtgccgggctgggactgttgctgggtaccgccgccggccttggattcctgtgcctcctttacagccagcgatggaaacggacccagcgtcatggccgcagccagagcctgcccaactccctggactatacgcagacttcagatcccggacgccacgtgatgctcctgcgggctgtcccaggtggggctggagatgcctcagtgctgcccagccttccacgggaaggacaggagaaggtgctggaccgcctggactttgtgctgaccagccttgtggcgctgcggcgggaggtggaggagctgagaagcagcctgcgagggcttgcgggggagattgttggggaggtccgatgccacatggaagagaaccagagagtggctcggcggcgaaggtttccgtttgtccgggagaggagtgactccactggctccagctctgtctacttcacggcctcctcgggagccacgttcacagatgctgagagtgaagggggttacacaacagccaatgcggagtctgacaatgagcgggactctgacaaagaaagtgaggacggggaagatgaagtgagctgtgagactgtgaagatggggagaaaggattctcttgacttggaggaagaggcagcttcaggtgcctccagtgccctggaggctggaggttcctcaggcttggaggatgtgctgcccctcctgcagcaggccgacgagctgcacaggggtgatgagcaaggcaagcgggagggcttccagctgctgctcaacaacaagctggtgtatggaagccggcaggactttctctggcgcctggcccgagcctacagtgacatgtg

SEQ ID NO: 116441 - DNA, 1413 bp, Artificial Sequence
  derived and/or modified sequence
atgtccagacttggtgcacttgggggagcacgggctggactggggctgcttctgggcaccgcagccggtctcggttttctatgtctcctgtattctcaaaggtggaaacgtactcaaagacacggtcggtcccagagccttcctaactctctggactacacacagacgtcagatccggggcggcacgtgatgctcctgagagccgttcctggaggagctggtgatgccagcgtgctgccatccttgccaagggagggccaggagaaggtgttagaccggctggatttcgtgctgacatctttggttgctcttagacgcgaagttgaggaactgagaagctccctgaggggtctggccggggagattgtcggggaagtgcggtgtcacatggaagagaaccagagggtggctagacggaggcggttcccgttcgtgagagaacgcagcgactctactggaagttccagtgtgtactttacagcttcatccggcgccacattcaccgatgccgagtccgagggagggtacacaaccgctaacgctgaaagcgacaacgagagagactccgataaagagagcgaggatggggaggacgaagtctcctgcgagaccgtcaagatgggccgcaaggactcccttgatctggaggaggaggctgcatccggtgcctctagtgccttggaggccggcggtagtagtggtctggaagacgtgctcccactgctccagcaagcagatgagttgcataggggtgatgagcaggggaaacgtgaggggtttcagctcctgctgaacaacaagcttgtgtatggtagtcggcaagatttcctgtggaggttagcccgggcctattctgacatgtgcgagctcacagaggaggttagcgaaaagaagtcttacgcactcgacggcaaagaggaagcagaggcagcgttagaaaagggagatgagagcgccgattgccatctctggtatgccgtactgtgcgggcagcttgccgaacacgaatcgattcagcgtcgcatacagtcagggtttagcttcaaggagcatgtcgacaaggctatcgctctccagcccgaaaatcctatggcacactttctgttaggcaggtggtgctaccaagtatctcacctgtcctggctcgagaaaaagacggccactgctctcctggaatccccactctctgccaccgttgaggatgcactccaatcatttctaaaagcggaggagctgcagccaggattttctaaggcgggtagagtgtacatttctaagtgttatcgtgaactgggcaagaatagcgaggctaggtggtggatgaaactcgccctcgagctcccggacgtcactaaggaagatctggccatccagaaagacctggaggaactggaggttattctgagagattag

SEQ ID NO: 116442 - DNA, 1413 bp, Artificial Sequence
  derived and/or modified sequence
atgagccgcttgggagcgctaggcggggccagggccggacttggactgcttttaggcactgccgctggcctgggctttctgtgcctcctgtactctcagcggtggaaacgcactcagaggcatgggcggtctcaatccctgccaaacagtctggactatacccagacgtctgatccgggtcgacacgtgatgcttctccgcgcagtcccgggcggcgctggtgacgcctccgtgttaccctcactccctcgagaaggacaggaaaaagttctcgaccgattagactttgtgttgactagcttggttgcattgcgtcgggaagtggaagagctgcgcagcagcttacggggcctagctggagagatagtgggtgaagtccgatgccatatggaggagaaccagagggtggcacgccggcgtcgatttcccttcgtgagagaaagatcagattctaccgggagcagctcggtgtactttaccgcttccagcggggcaactttcactgatgcagagtcagagggaggttacacgacagctaacgcagagtctgataacgaacgggattccgacaaagagtctgaggacggggaggacgaagtttcatgtgagaccgtgaagatgggccgtaaggactcactggatcttgaagaagaggccgcatctggcgccagtagtgccctcgaggccggaggcagctccggcctggaggacgtgctgcctctgttgcagcaggcggacgaactgcaccggggtgatgaacagggtaaaagagagggttttcagcttctgctgaacaataagctcgtgtacgggtcacgacaggatttcctgtggaggctcgctcgggcttatagcgatatgtgtgagctgacagaagaggtatcagaaaaaaaaagctatgccctcgacgggaaagaagaagccgaggcagcgttggagaaaggagatgagtcagccgattgccacctttggtatgcggtgttatgtgggcagctcgccgagcacgagagtatacagaggaggatccaatcaggcttctcctttaaagagcacgttgataaggccatcgctctacagcccgaaaacccgatggcccatttcctccttggtaggtggtgttatcaggtgtctcacttgtcatggctagagaagaagaccgccacagccctgctggaatcccccctttctgcaactgtggaagacgccctgcagtccttcctcaaggctgaagagcttcagccagggttttctaaggcagggagagtttatatcagtaagtgctatagagaactgggaaaaaactctgaggctcgatggtggatgaagttagcactggagctccccgacgtgactaaggaagacctagcgatacaaaaggaccttgaggaactggaggttatactaagagattag

SEQ ID NO: 116443 - DNA, 1224 bp, Artificial Sequence
  derived and/or modified sequence
atgcttctgagggccgtgcctggcggagccggggacgcatccgtcctaccttctctgcccagagaaggtcaggagaaggtgctggacagactggatttcgtactgacctcccttgtggccctgcggcgggaggtcgaggaattgagaagcagcctcagggggctggccggcgagatcgtaggggaggtgcgttgtcacatggaagaaaaccagcgtgtggcaagacggcggagattcccctttgtccgcgaacgatcagactctaccgggtcatcctccgtgtacttcacagcatcctccggagcaacttttacagatgctgaaagcgaaggcggttatacaacagcgaatgccgaatctgataacgagagagactcagataaggaaagtgaggacggtgaggatgaagtctcatgcgagactgtgaaaatgggccggaaagactctctcgatttggaagaagaggcagccagcggtgcctcctctgccttagaagcaggaggctcttctggtctcgaagacgtactgcccctgctgcaacaagccgatgagctgcatagaggggatgagcagggcaaacgcgaaggcttccagctccttcttaataataagttggtgtacggcagccggcaggacttcctatggcggcttgcccgggcatatagtgatatgtgtgagctgaccgaggaggtttcagaaaaaaaatcttatgcattggatggcaaagaggaggctgaggccgccctggagaaaggcgacgagagcgccgactgtcacctctggtacgccgtgctttgtggccaacttgccgagcacgaatctattcagcgcagaattcagtccggttttagttttaaagaacatgtcgacaaggctatcgccttacagccagaaaaccccatggcacattttctgctggggagatggtgctatcaggtgtcacatctgagttggctggagaagaaaacagccaccgcattactcgaaagccccctgtctgcaaccgtcgaggacgccttacagagttttcttaaggccgaggaattgcagccaggcttcagcaaagcgggacgtgtgtacatcagtaaatgttaccgggagcttggtaaaaactctgaggcccgctggtggatgaagctcgccctggaactcccagatgtaactaaggaagatctcgccattcagaaagacctggaggaactcgaagtcatcctccgcgattag

SEQ ID NO: 116444 - DNA, 864 bp, Artificial Sequence
  derived and/or modified sequence
atgtcccgcctaggggccctgggcggagccagggccggcctgggattgttgctcggtaccgccgccggtctgggcttcttgtgcctcctttattcacaacggtggaagcggacacaaaggcacggtaggagccaaagcctgccgaactcactggactatacccagacctccgatcccggacgccacgtcatgctgctgagggcggtgccgggtggagccggcgacgccagtgtgcttccctcgctcccgcgggaaggacaggaaaaagtgctagatcgactcgatttcgtccttacttccttggtcgctctgcgtagggaagttgaagaactgagatctagcctccgtggcctcgcgggcgagatcgtcggagaggttcggtgccatatggaggaaaaccagcgcgtggcacgcagaaggaggtttcccttcgtcagagagcgctctgacagcaccggaagtagctcagtctacttcacagcgagctctggcgcaaccttcacagatgctgaaagcgaaggggggtatactactgccaacgctgaatcggataacgaacgcgattcagataaggagtccgaagatggagaggacgaagtatcatgtgaaacggtgaaaatgggcaggaaagactcgctggaccttgaagaagaagctgcaagtggagcaagctcggcactcgaagctggcgggagctctggactggaggatgtcctgcccctactgcagcaagcggatgagttgcacagaggcgacgagcagggcaaaagagaggggttccagctgctgctcaataataagttggtgtatggatcacggcaagatttcctttggagactggcccgggcttactctgatatgtag

SEQ ID NO: 116445 - DNA, 1413 bp, Artificial Sequence
  derived and/or modified sequence
atgagccggctgggcgccctgggcggggcccgggccggcctgggcctgctgctgggcacagctgctggcctgggcttcctgtgcctgctgtacagccagcgctggaagaggacccagagacatggccgcagccagagcctgcccaacagcctggactacacccagaccagtgaccccggccgccacgtgatgctgctgcgggctgtgcctgggggcgctggagatgcctctgtgctgcccagcctgccccgggagggccaggagaaggtgctggaccggctggactttgtgctgaccagcctggtggccctgcggcgggaggtggaggagctgcggagcagcctgcggggcctggccggggagatcgtgggggaggtgcgctgccacatggaggagaaccagagggtggccaggagaagacgcttcccctttgtgcgggagaggagtgacagcacaggcagcagctctgtgtacttcaccgccagcagcggggccaccttcacagatgctgagagcgagggcggctacaccacagccaatgctgagagtgacaatgaaagagacagcgacaaggagagtgaagatggagaagatgaggtgtcctgtgagaccgtgaagatgggcaggaaggacagcctggacctggaggaggaggccgccagcggggccagcagcgccctggaggccggcggcagcagcggcctggaggatgtgctgcccctgctgcagcaggctgatgagctgcacagaggagatgagcagggcaagcgggagggcttccagctgctgctgaacaacaagctggtgtatggcagccggcaggacttcctgtggaggctggcccgggcctacagcgacatgtgtgagctgacagaggaggtgtctgagaagaagagctatgccctggatggcaaggaggaggccgaggccgccctggagaagggagatgagagcgctgactgccacctgtggtatgctgtgctgtgtggccagctggccgagcacgagagcatccagaggcgcatccagagcggcttctccttcaaggagcacgtggacaaggccatcgccctgcagcctgagaaccccatggcccacttcctgctgggccgctggtgctaccaggtgagccacctgtcctggctggagaagaagacagccacagccctgctggagagccccctgagcgccaccgtggaggatgccctgcagagcttcctgaaggccgaggagctgcagcccggcttcagcaaggccggccgggtgtacatcagcaagtgctaccgggagctgggcaagaacagcgaggcccgctggtggatgaagctggccctggagctgcctgatgtgaccaaggaggacctggccatccagaaggacctggaggagctggaggtgatcctgcgggactag

SEQ ID NO: 116446 - DNA, 1224 bp, Artificial Sequence
  derived and/or modified sequence
atgctgctgcgggctgtgcctggaggagctggagatgcctctgtgctgcccagcctgccccgggagggccaggagaaggtgctggaccggctggactttgtgctgaccagcctggtggccctgcggcgggaggtggaggagctgcggagcagcctgcggggcctggccggggagatcgtgggggaggtgcgctgccacatggaggagaaccagagggtggccaggagaagacgcttcccctttgtgcgggagaggagtgacagcacaggcagcagctctgtgtacttcaccgccagcagcggggccaccttcacagatgctgagagcgagggcggctacaccacagccaatgctgagagtgacaatgaaagagacagcgacaaggagagtgaagatggagaagatgaggtgtcctgtgaaacagtgaagatgggcaggaaggacagcctggacctggaggaggaggccgccagcggggccagcagcgccctggaggccggcggcagcagcggcctggaggatgtgctgcccctgctgcagcaggctgatgagctgcacagaggagatgagcagggcaagcgggagggcttccagctgctgctgaacaacaagctggtgtatggcagccggcaggacttcctgtggaggctggcccgggcctacagcgacatgtgtgagctgacagaggaggtgtctgagaagaagagctatgccctggatggcaaggaggaggccgaggccgccctggagaagggagatgaatctgctgactgccacctgtggtatgctgtgctgtgtggccagctggccgagcacgagagcatccagaggcgcatccagagcggcttctccttcaaggagcacgtggacaaggccatcgccctgcagcctgagaaccccatggcccacttcctgctgggccgctggtgctaccaggtgagccacctgtcctggctggagaagaagacagccacagccctgctggagagccccctgagcgccaccgtggaggatgccctgcagagcttcctgaaggccgaggagctgcagcccggcttcagcaaggccggccgggtgtacatcagcaagtgctaccgggagctgggcaagaacagcgaggcccgctggtggatgaagctggccctggagctgcctgatgtgaccaaggaggacctggccatccagaaggacctggaggagctggaggtgatcctgcgggactag

SEQ ID NO: 116447 - DNA, 864 bp, Artificial Sequence
  derived and/or modified sequence
atgagccggctgggcgccctgggcggggcccgggccggcctgggcctgctgctgggcacagctgctggcctgggcttcctgtgcctgctgtacagccagcgctggaagaggacccagagacatggccgcagccagagcctgcccaacagcctggactacacccagaccagtgaccccggccgccacgtgatgctgctgcgggctgtgcctgggggcgctggagatgcctctgtgctgcccagcctgccccgggagggccaggagaaggtgctggaccggctggactttgtgctgaccagcctggtggccctgcggcgggaggtggaggagctgcggagcagcctgcggggcctggccggggagatcgtgggggaggtgcgctgccacatggaggagaaccagagggtggccaggagaagacgcttcccctttgtgcgggagaggagtgacagcacaggcagcagctctgtgtacttcaccgccagcagcggggccaccttcacagatgctgagagcgagggcggctacaccacagccaatgctgagagtgacaatgaaagagacagcgacaaggagagtgaagatggagaagatgaggtgtcctgtgagaccgtgaagatgggcaggaaggacagcctggacctggaggaggaggccgccagcggggccagcagcgccctggaggccggcggcagcagcggcctggaggatgtgctgcccctgctgcagcaggctgatgagctgcacagaggagatgagcagggcaagcgggagggcttccagctgctgctgaacaacaagctggtgtatggcagccggcaggacttcctgtggaggctggcccgggcctacagcgacatgtag

SEQ ID NO: 116448 - DNA, 1413 bp, Artificial Sequence
  derived and/or modified sequence
atgagccggctgggcgccctgggcggcgcccgggccggcctgggcctgctgcttggaaccgctgcaggccttggattcctttgcctgttgtactcacaacggtggaagcggacccagaggcatggacgaagtcagtctctgccaaactcactggactatactcagaccagtgaccccggaaggcatgtgatgctgctccgagccgtccccggcggcgctggggatgcctctgtactgccaagccttccccgggaggggcaggaaaaagtcctggataggttggattttgtgcttactagtctggttgctctgaggcgagaggtggaggagttgcgctctagcctccgaggcctagcaggggagatcgttggagaagttcggtgtcacatggaagagaatcagcgcgttgcaagacggcgcaggtttcctttcgtgagggagcggtcagatagcacagggtcttcttcggtctatttcacggcttcaagtggagccacctttactgacgccgagagcgagggaggctataccactgcaaacgccgaaagcgacaacgaaagagattcagataaagagtccgaagatggagaggatgaagtatcatgtgaaactgtcaagatgggtcgaaaggattcactggatcttgaggaggaggctgcgagcggggcgagttcagctttagaggctggaggtagttccgggctggaagacgtgttgccacttctgcagcaggccgacgagcttcatcggggagacgagcaaggcaaacgggagggattccaactcctgctcaacaataaattggtctacgggagccgccaggacttcctatggagactggccagagcctactcagatatgtgcgagctgactgaagaagtgagcgagaaaaagtcctatgccctagacggaaaggaggaggccgaggctgccctggagaagggggacgagagcgctgattgccacctgtggtacgcggtgctttgcggtcagctggcagagcacgagtcaatacagaggcgtatccaatctggcttctcatttaaggagcacgtagataaagccatcgcacttcagcctgagaatccaatggcccatttcctactgggtcgatggtgctaccaggtctcccacctgagctggttggagaagaaaacagccactgccctgctggagagtcccctgtccgccactgtggaggacgccctccagtccttccttaaagcagaagaattacagccaggcttctccaaagctggtagggtgtatatatcaaaatgctatcgtgagctggggaaaaattctgaggccaggtggtggatgaaactggccctggagctgcctgacgtgactaaagaagacctcgccattcaaaaggatctggaagagctggaagttattctccgcgactag

SEQ ID NO: 116449 - DNA, 1413 bp, Artificial Sequence
  derived and/or modified sequence
atgagccggctgggcgccctgggcggcgcccgggccggcctgggcttgctgcttgggacagccgcggggctaggtttcctttgccttctatatagccaacggtggaagcgcacacagcgccatggacgtagtcagtccctgcctaactctcttgactacacccagactagtgatcccggaaggcacgttatgctgctgagggccgtgccgggcggcgctggagatgccagtgtattgccctcgttaccccgggagggccaagagaaggtgctcgatcgtttggactttgtcctgaccagtctcgtggcactccgtcgggaggtggaagagctcaggagctccctgagaggcctggcaggcgagatcgtcggtgaggtgcggtgtcacatggaggagaaccagagggtggcacgcagacggagattcccattcgttagagagagatcagactcgactgggtctagtagcgtgtattttactgcttctagtggtgcgacattcaccgatgctgagtccgaaggtggatacacgacggctaacgccgagagtgataatgagagagatagtgacaaagaatccgaggatggagaggatgaggtaagctgcgagacagttaaaatgggacggaaagatagccttgacttggaagaggaggccgccagtggcgcatctagcgcgcttgaagccggagggtcttctgggcttgaggacgttctcccgctgcttcaacaggctgacgaattacaccgcggagatgagcagggaaaacgggaggggttccagctgcttttaaataacaagctggtgtacggcagccgacaggactttttgtggagactagctagggcttatagtgacatgtgcgagcttactgaggaagtgagcgagaagaagagctatgccctcgatggtaaggaggaagccgaagccgcccttgagaaaggcgatgaaagcgccgactgtcatctctggtacgcagtcctttgcggtcagctagcagagcatgagtcgatccaacgacggatccaatctggtttttcgttcaaagaacatgtggataaggccatcgccctccagccggaaaatccaatggcccacttcttattaggacggtggtgttatcaagtctcacacctgtcttggctggagaagaaaaccgcaacagcactgctggaatctcctctctcagcaactgtggaagatgctctgcagtcgttcctaaaagccgaagaattgcagcccggtttttctaaagccggccgggtgtacatatcgaaatgctatcgggaattgggcaaaaatagcgaagcacgatggtggatgaagttagcgctcgaactgcctgacgtgaccaaggaggacctggctatccagaaggaccttgaagaacttgaagtgattcttagggattag

SEQ ID NO: 116450 - DNA, 1224 bp, Artificial Sequence
  derived and/or modified sequence
atgctgctgcgggccgtgcccggcggcgccggcgacgccagcgtgctcccttccctgcccagagaaggccaggaaaaagttctggaccggctggatttcgtgctgaccagtctggtggcccttaggcgtgaggtagaagaactccgtagtagtttgcgaggattggccggcgaaatagtcggagaagttcgatgccatatggaggagaaccaacgagtggcacgcagacgaagatttcccttcgtgcgagaaaggtctgattctaccggtagctcttctgtgtattttaccgcatcctcaggcgcaacatttacggacgcggaatccgaaggaggatacactacagccaatgccgagtcagacaatgaacgggactcagataaggagtctgaagacggcgaagatgaggtcagctgcgaaacggtaaaaatgggacgcaaagactcacttgacctggaagaagaagccgcgtcgggagcttcatccgctctcgaggctggcggttccagcgggttggaagacgtattgccgttactacagcaggccgatgaactgcaccggggagatgaacagggcaagcgagaggggtttcagctcctgctgaataacaagctcgtctacggatctcggcaagacttcttgtggcggctggccagggcttacagtgatatgtgcgaactgacagaggaagtctctgaaaagaaatcctatgcactcgacggtaaggaagaagctgaggctgctctagagaaaggtgacgagtctgccgactgccacctgtggtatgccgtgctctgcggccagctagccgagcatgaatccatacagcggcggatccagagcggcttttccttcaaggagcacgttgacaaagcgatagctcttcagcctgagaatccaatggcacatttcttgctaggcaggtggtgttaccaagtcagccatctatcctggctcgaaaagaaaactgcaaccgctctgttggaatctcctctgtcagcgacggtcgaagacgccttgcaatctttcttgaaggccgaagagttgcagccaggcttctcaaaagcaggacgagtgtacatttcaaagtgttatagggagctcggcaaaaattcagaagcccggtggtggatgaagctggctttggaactgccagacgtgacgaaggaggatctcgctatccagaaggacctggaagagctggaagtgattctccgcgattag

SEQ ID NO: 116451 - DNA, 864 bp, Artificial Sequence
  derived and/or modified sequence
atgagccggctgggcgccctgggcggcgcccgggccggcctgggcctcctgttggggaccgcagcaggacttggatttctatgcctcttgtattcgcagcggtggaagagaacacagaggcacggaagaagtcagtccttacccaactctctagactatacccagacatccgaccccggaagacacgtgatgctgcttcgggcggtgccaggcggcgccggcgatgcctccgtccttccgagcctgccgcgcgaaggacaagaaaaggtgctggacagactggattttgtgctcacgtctctcgtggcattacgtcgagaagtagaggagctgaggtctagccttaggggactcgccggtgaaattgtgggcgaagttaggtgccacatggaggaaaatcagcgggtggcacgaagacggcgcttccccttcgtgagagagaggagtgatagcactggtagttcatccgtctactttacagcctctagtggagccacgtttacagacgcagagagcgaaggtggatacacaactgcaaacgcggagagcgacaacgaacgagattccgacaaagagtccgaagatggtgaagatgaagtgtcctgcgaaaccgtgaaaatgggacggaaagatagtcttgacctggaggaggaggccgcttctggcgcgagcagtgcactggaggcagggggctcaagtggtctggaagatgtgctaccacttctgcagcaggccgatgagttacacagaggtgatgaacaggggaagcgagagggatttcagttgctgctgaataataagctggtgtacgggtcccggcaggacttcctgtggcggctggcccgcgcatattcagatatgtag

SEQ ID NO: 116452 - DNA, 1413 bp, Artificial Sequence
  derived and/or modified sequence
atgtcaagacttggggcattgggtggcgcaagagccggactgggcctgctccttggcacggctgccggactgggttttctgtgcctcctgtacagccaacgttggaagaggacgcagcgccacggtcggtctcagagtctccctaacagtctggattacacccagacctccgacccaggccgtcacgtgatgttgttgcgagcggtgcctggtggtgctggcgatgcaagcgtactgcctagtctgccgagggagggtcaggagaaagttttagatcggctggatttcgtgctcacctcactggtggcattgcgaagggaggtggaggagctgcgcagcagcctgaggggactggcgggagaaatcgtcggcgaagtgcggtgccacatggaagaaaatcagagggtcgccaggcggaggaggttcccatttgtccgcgaaagatcagatagtacagggtcctctagcgtgtattttaccgcgtcctcaggggcaacctttactgacgccgagtctgaaggcggatacaccacggctaatgcagaaagcgacaacgagagggactctgacaaagagagcgaagacggcgaagacgaggtgtcctgcgagacggtaaaaatgggtaggaaggactcgttggacctggaggaagaggcagcttccggcgcttcatctgcccttgaggccggtggcagctcaggcctcgaagacgtcttaccactcctgcagcaggcggatgagctccaccggggagatgaacagggaaaacgcgagggatttcagttactgttgaacaacaagttggtctacggttcgagacaggatttcctctggcgcctcgcaagggcttactcagatatgtgcgagctgacagaggaggtgtccgagaaaaagagctacgccctggatggcaaggaggaagccgaggccgcactggagaaaggtgacgagagtgccgattgtcacctatggtatgcagtgttgtgtgggcagcttgctgagcacgagagtatccagagacgcattcagtcgggtttctcgtttaaagagcacgtcgacaaggctatcgccttgcaaccagaaaatccaatggctcactttcttttgggtcgctggtgttatcaggtatcacatctttcttggctagagaaaaagaccgctaccgctcttctcgagagtccgcttagcgccacggtcgaggatgccttacagtcattccttaaagctgaagagcttcagcccggattcagtaaagctggcagggtttacattagtaagtgctatcgagagctgggaaaaaatagcgaggccaggtggtggatgaaattggcacttgagctacccgatgttaccaaagaagacttggctatacagaaagacttggaagagttagaagtgattcttagggattag

SEQ ID NO: 116453 - DNA, 1413 bp, Artificial Sequence
  derived and/or modified sequence
atgtcacgcctaggtgcactgggtggcgcaagggcaggtctggggctgctgcttggtacagccgctggactgggcttcctgtgtcttctctatagccaacggtggaagaggacccaacgccatgggaggagtcagtctctacctaatagcctggactatacccagaccagcgaccccggaagacacgtcatgttgctgcgtgctgtgccaggcggtgccggagatgcctctgtgcttccgtcacttcctcgcgaaggccaggagaaagtcctcgatcgtctggatttcgttctcacatctctggtcgcgctccggcgtgaagttgaagagctgagatcctccctacgcggacttgccggagagattgtgggagaggtgcggtgccatatggaagagaaccagcgcgtcgccaggaggcgcaggttcccatttgtgcgagagaggtctgacagtacagggagctcctcggtgtactttacggcaagcagcggtgcgacctttacggacgccgaaagcgagggcggatacacaaccgccaacgctgagtccgataacgagagggactctgacaaggaatccgaggacggcgaggacgaggtgagctgtgagactgtgaaaatggggaggaaagactcccttgaccttgaggaggaagccgcaagtggggcttcatccgcactggaggcgggaggctcatcaggactggaggatgtattgccactgctgcagcaggcagatgagctgcaccggggagacgagcagggcaaacgtgaggggtttcagctgctgctcaataacaagctggtgtatggctccaggcaggacttcctttggaggttggcaagggcttactccgatatgtgtgagttgacggaagaggtctccgaaaagaagagttacgccctcgatggtaaggaagaggctgaggctgctttggagaagggcgacgagagcgccgattgtcacctttggtatgcagttctgtgcggacagctggccgagcacgagtccatccagcgacgcattcaaagcggattctcgttcaaggagcacgtagataaggccattgcccttcagcccgaaaatcctatggcccactttctccttggtcgatggtgttaccaggtaagccatctaagctggctggaaaaaaaaactgcaaccgccctactggaaagcccattgtcagcgacagtggaggatgcgctgcaatcattcctgaaggccgaagaactgcagcctggtttttcgaaagcaggaagggtgtatataagcaagtgctaccgagaactcggtaagaactcagaggcccgttggtggatgaaactcgcgctggaactgcccgacgtcactaaggaggacttagcaatccagaaggacctcgaggaactcgaggttatcctgagggactag

SEQ ID NO: 116454 - DNA, 1224 bp, Artificial Sequence
  derived and/or modified sequence
atgttgctccgcgctgttcctgggggtgctggcgatgcctcggtgcttcccagcctgcctcgggaaggtcaggagaaggttctggatagactcgatttcgtactgaccagtctggttgctcttcggagagaggtggaagagctaaggtccagcctccggggactcgctggtgaaatcgttggagaggtgcggtgccatatggaggagaatcagcgggtggctagaaggcggaggtttccgtttgtgcgtgagaggagcgattctactggatcatcaagcgtatatttcacagcctcatctggtgcaacctttaccgatgccgaaagcgagggtggctataccacggctaatgctgaatccgacaacgaacgggactctgacaaggagagcgaggacggggaagacgaggtgtcatgtgagacagttaaaatgggcaggaaagactctttggacttagaggaggaggccgctagtggcgcttcaagcgcactcgaagctggtggctcttctggcctggaggacgtgctgccactgttgcagcaagccgatgaacttcaccgcggtgatgaacagggtaaaagggaaggcttccagcttctactcaacaataagctggtgtatgggagtaggcaagatttcctgtggcgcttggcgagagcgtacagcgacatgtgtgagctcacagaggaggtgtccgaaaaaaagtcgtacgctctggacggtaaggaagaggcggaagccgcactcgagaaaggtgatgaatccgccgactgtcacctttggtatgctgtgctgtgtggccaacttgctgagcatgagagcatccagagacggattcagagtggtttcagttttaaagagcacgtcgacaaagccattgccttgcaaccggagaatcctatggctcatttcctactagggcgatggtgctaccaggtctcacacttgtcttggttggagaagaaaaccgcaaccgctctcttggagagtccgttgagtgctactgtcgaggacgccctgcagagcttcttgaaggccgaagagctgcagcctgggtttagtaaagctggccgtgtatacatcagcaagtgctacagggaacttggcaaaaacagcgaagcgaggtggtggatgaagctggcacttgagctgccggacgtgacaaaggaagacctggccattcagaaagacctggaagagctggaagtcatcctccgagactag

SEQ ID NO: 116455 - DNA, 864 bp, Artificial Sequence
  derived and/or modified sequence
atgagtaggctgggcgctttaggcggagcccgagctggcctggggctgcttctgggcactgctgctgggctgggctttctgtgcctcttatattcccagaggtggaaaaggactcaacgacacggacgatcccagtccctccccaactcactcgactacacacaaacatctgatcctgggagacatgtcatgctgttaagggcggtccccggaggtgctggtgacgcaagtgtgttgccctctctacccagggaagggcaggagaaagtgctggaccggctggacttcgtgctaaccagcttagtcgctctgagacgtgaggtggaggagctgaggtctagcctgagagggctcgctggggaaatcgtcggcgaggtacgctgccacatggaggagaaccagagggtcgcccgtcgcaggcgcttccccttcgtgcgcgagcggtctgattccacaggctcttcatcagtgtacttcaccgcatcctccggggcaacgttcaccgacgctgagtctgagggcggttacacaacagccaatgccgagtcagataacgaaagagatagtgataaagagtcagaggacggcgaggatgaggtatcatgtgagacggtcaaaatgggtcggaaggattccctcgatctggaagaggaggcagcctccggagcatcaagcgcattagaagctggaggaagttctggcttagaagatgtgctgcccctgcttcagcaagccgatgagttacatcgaggagatgagcaagggaaacgcgaagggttccagctgctgctgaataacaagcttgtttatggctcccggcaggactttctgtggcgattggcacgggcttatagtgatatgtag

SEQ ID NO: 116456 - DNA, 1413 bp, Artificial Sequence
  derived and/or modified sequence
atgagcagactgggcgccctgggcggcgccagagccggcctgggcctgctgctgggcaccgccgccggcctgggcttcctgtgcctgctgtacagccagagatggaagagaacccagagacacggcagaagccagagcctgcccaacagcctggactacacccagaccagcgaccccggcagacacgtgatgctgctgagagccgtgcccggcggcgccggcgacgccagcgtgctgcccagcctgcccagagagggccaggagaaggtgctggacagactggacttcgtgctgaccagcctggtggccctgagaagagaggtggaggagctgagaagcagcctgagaggcctggccggcgagatcgtgggcgaggtgagatgccacatggaggagaaccagagagtggccagaagaagaagattccccttcgtgagagagagaagcgacagcaccggcagcagcagcgtgtacttcaccgccagcagcggcgccaccttcaccgacgccgagagcgagggcggctacaccaccgccaacgccgagagcgacaacgagagagacagcgacaaggagagcgaggacggcgaggacgaggtgagctgcgagaccgtgaagatgggcagaaaggacagcctggacctggaggaggaggccgccagcggcgccagcagcgccctggaggccggcggcagcagcggcctggaggacgtgctgcccctgctgcagcaggccgacgagctgcacagaggcgacgagcagggcaagagagagggcttccagctgctgctgaacaacaagctggtgtacggcagcagacaggacttcctgtggagactggccagagcctacagcgacatgtgcgagctgaccgaggaggtgagcgagaagaagagctacgccctggacggcaaggaggaggccgaggccgccctggagaagggcgacgagagcgccgactgccacctgtggtacgccgtgctgtgcggccagctggccgagcacgagagcatccagagaagaatccagagcggcttcagcttcaaggagcacgtggacaaggccatcgccctgcagcccgagaaccccatggcccacttcctgctgggcagatggtgctaccaggtgagccacctgagctggctggagaagaagaccgccaccgccctgctggagagccccctgagcgccaccgtggaggacgccctgcagagcttcctgaaggccgaggagctgcagcccggcttcagcaaggccggcagagtgtacatcagcaagtgctacagagagctgggcaagaacagcgaggccagatggtggatgaagctggccctggagctgcccgacgtgaccaaggaggacctggccatccagaaggacctggaggagctggaggtgatcctgagagactag

SEQ ID NO: 116457 - DNA, 1224 bp, Artificial Sequence
  derived and/or modified sequence
atgctgctgagagccgtgcccggcggcgccggcgacgccagcgtgctgcccagcctgcccagagagggccaggagaaggtgctggacagactggacttcgtgctgaccagcctggtggccctgagaagagaggtggaggagctgagaagcagcctgagaggcctggccggcgagatcgtgggcgaggtgagatgccacatggaggagaaccagagagtggccagaagaagaagattccccttcgtgagagagagaagcgacagcaccggcagcagcagcgtgtacttcaccgccagcagcggcgccaccttcaccgacgccgagagcgagggcggctacaccaccgccaacgccgagagcgacaacgagagagacagcgacaaggagagcgaggacggcgaggacgaggtgagctgcgagaccgtgaagatgggcagaaaggacagcctggacctggaggaggaggccgccagcggcgccagcagcgccctggaggccggcggcagcagcggcctggaggacgtgctgcccctgctgcagcaggccgacgagctgcacagaggcgacgagcagggcaagagagagggcttccagctgctgctgaacaacaagctggtgtacggcagcagacaggacttcctgtggagactggccagagcctacagcgacatgtgcgagctgaccgaggaggtgagcgagaagaagagctacgccctggacggcaaggaggaggccgaggccgccctggagaagggcgacgagagcgccgactgccacctgtggtacgccgtgctgtgcggccagctggccgagcacgagagcatccagagaagaatccagagcggcttcagcttcaaggagcacgtggacaaggccatcgccctgcagcccgagaaccccatggcccacttcctgctgggcagatggtgctaccaggtgagccacctgagctggctggagaagaagaccgccaccgccctgctggagagccccctgagcgccaccgtggaggacgccctgcagagcttcctgaaggccgaggagctgcagcccggcttcagcaaggccggcagagtgtacatcagcaagtgctacagagagctgggcaagaacagcgaggccagatggtggatgaagctggccctggagctgcccgacgtgaccaaggaggacctggccatccagaaggacctggaggagctggaggtgatcctgagagactag

SEQ ID NO: 116458 - DNA, 864 bp, Artificial Sequence
  derived and/or modified sequence
atgagcagactgggcgccctgggcggcgccagagccggcctgggcctgctgctgggcaccgccgccggcctgggcttcctgtgcctgctgtacagccagagatggaagagaacccagagacacggcagaagccagagcctgcccaacagcctggactacacccagaccagcgaccccggcagacacgtgatgctgctgagagccgtgcccggcggcgccggcgacgccagcgtgctgcccagcctgcccagagagggccaggagaaggtgctggacagactggacttcgtgctgaccagcctggtggccctgagaagagaggtggaggagctgagaagcagcctgagaggcctggccggcgagatcgtgggcgaggtgagatgccacatggaggagaaccagagagtggccagaagaagaagattccccttcgtgagagagagaagcgacagcaccggcagcagcagcgtgtacttcaccgccagcagcggcgccaccttcaccgacgccgagagcgagggcggctacaccaccgccaacgccgagagcgacaacgagagagacagcgacaaggagagcgaggacggcgaggacgaggtgagctgcgagaccgtgaagatgggcagaaaggacagcctggacctggaggaggaggccgccagcggcgccagcagcgccctggaggccggcggcagcagcggcctggaggacgtgctgcccctgctgcagcaggccgacgagctgcacagaggcgacgagcagggcaagagagagggcttccagctgctgctgaacaacaagctggtgtacggcagcagacaggacttcctgtggagactggccagagcctacagcgacatgtag

SEQ ID NO: 116459 - protein, 995 aa, Artificial Sequence
  derived and/or modified sequence
MRRKGRCHRGSAARHPSSPCSVKHSPTRETLTYAQAQRMVEIEIEGRLHRISIFDPLEIILEDDLTAQEMSECNSNKENSERPPVCLRTKRHKNNRVKKKNEALPSAHGTPASASALPEPKVRIVEYSPPSAPRRPPVYYKFIEKSAEELDNEVEYDMDEEDYAWLEIVNEKRKGDCVPAVSQSMFEFLMDRFEKESHCENQKQGEQQSLIDEDAVCCICMDGECQNSNVILFCDMCNLAVHQECYGVPYIPEGQWLCRHCLQSRARPADCVLCPNKGGAFKKTDDDRWGHVVCALWIPEVGFANTVFIEPIDGVRNIPPARWKLTCYLCKQKGVGACIQCHKANCYTAFHVTCAQKAGLYMKMEPVKELTGGGTTFSVRKTAYCDVHTPPGCTRRPLNIYGDVEMKNGVCRKESSVKTVRSTSKVRKKAKKAKKALAEPCAVLPTVCAPYIPPQRLNRIANQVAIQRKKQFVERAHSYWLLKRLSRNGAPLLRRLQSSLQSQRSSQQRENDEEMKAAKEKLKYWQRLRHDLERARLLIELLRKREKLKREQVKVEQVAMELRLTPLTVLLRSVLDQLQDKDPARIFAQPVSLKEVPDYLDHIKHPMDFATMRKRLEAQGYKNLHEFEEDFDLIIDNCMKYNARDTVFYRAAVRLRDQGGVVLRQARREVDSIGLEEASGMHLPERPAAAPRRPFSWEDVDRLLDPANRAHLGLEEQLRELLDMLDLTCAMKSSGSRSKRAKLLKKEIALLRNKLSQQHSQPLPTGPGLEGFEEDGAALGPEAGEEGDKSPPKLEPSDALPLPSNSETNSEPPTLKPVELNPEQSKLFKRVTFDNESHSACTQSALVSGRPPEPTRASSGDVPAAAASAVAEPASDVNRRTSVLFCKSKSSFRGWRLFCSQGKGRGAHAETPRWRRSPQESAWTQVSPTALGVRGASRSRAAAWGGRPHPDDAVPPSPASPPATARSATRALMRPNVGGANRLLCDGTRWRTAVS

SEQ ID NO: 116460 - DNA, 1950 bp, Artificial Sequence
  derived and/or modified sequence
atgaaagccgccaaggaaaagctcaaaagagagcaggtcaaagttgagcaggtggccatggagctgcggttaaccccactcactgtacttctccgctccgtcctggaccaacttcaagacaaggatccagctcgcatttttgcgcaaccagtctcgttgaaggaggtaccggattacctggatcacattaaacacccaatggacttcgcaacaatgcggaagcgactggaagcccaagggtacaaaaaccttcatgaattcgaggaggactttgatctgattatagacaactgcatgaagtacaatgcacgggacactgtgttctaccgagccgcagtgcgcttacgggatcaaggcggcgttgtgttgcgccaggctagaagggaagttgatagcatcggtctagaggaggcctcaggaatgcacttgccggagcgccccgcagcggcaccgagacgtcccttctcatgggaggacgtggataggctgctcgacccagccaacagagctcatctcggactagaggaacagctacgcgagctccttgacatgctcgacctgacttgtgccatgaagtcctccgggagccgtagcaagcgcgccaagttactaaagaaagagatcgcactgcttagaaacaaactgtctcagcaacattcacagcctcttcctactggacctgggctggagggattcgaggaagacggggccgcccttgggccggaagccggtgaggaaggtgataaatccccgcccaagctcgagccaagcgatgcgctccccttgccatcaaactccgaaacaaacagcgaacctccaactcttaaacccgtggagctgaatcccgaacagtcaaaactctttaagcgcgtgaccttcgataatgagtcccactcggcctgcacccagtccgccttagtgagtggcagacctcccgagcctacccgcgcatcctccggagacgtgcccgcagcagctgctagtgctgtagcagaacctgcctccgatgtcaaccggcgaacgagcgttctattctgcaaaagcaagagcgtgtctcctcccaaaagcgccaaaaacactgaaactcagcctaccagcccgcaactgggcaccaagactttcctgagtgtggttctgccaagactggaaacccttctgcaaccccgaaaacgctccaggtccacttgcggggactctgaggtagaggaagaatctccagggaaacgactcgatgccggcctcacgaatgggttcgggggcgcgaggagtgagcaggagcccggggggggcctgggacgcaaagccacccctaggcgtcgatgcgcctctgaatcatcaatttcttcaagcaactcccctctttgtgactcaagctttaacgcccccaagtgcggtaggggcaagccggccctggtgcgtcggcacaccctggaggatcgctccgaattgatttcgtgtattgagaacggaaattacgccaaggccgcccggatcgccgctgaagtcggtcagtcctccatgtggattagtactgatgctgcagctagcgtactggaacctttgaaggtggtgtgggctaagtgctctggttatccatcatatccagcactgattatcgaccccaaaatgcctagagtgccggggcatcacaacggagtgacaatacctgctccacctttggacgttcttaaaattggggaacatatgcagacaaagtccgatgagaagttgttcctggtattgttcttcgataataaaaggagctggcagtggctccctaagtccaagatggtccctctgggcatagacgaaactatcgataaactgaagatgatggaggggcgtaactcttctattaggaaggctgttcgcattgccttcgatcgcgccatgaaccatctatcaagggttcacggcgaaccgacaagcgacttatctgacatagattag

SEQ ID NO: 116461 - DNA, 1950 bp, Artificial Sequence
  derived and/or modified sequence
atgaaggccgccaaggagaagctgaagcgggagcaggtgaaggtggagcaggtggccatggagctgcggctgacccccctgactgtgctgctgcggtctgtgctggaccagctgcaggacaaggaccctgcccgcatctttgcccagcctgtgtccctgaaggaggtgcctgactacctggaccacatcaagcaccccatggactttgccaccatgaggaagaggctggaggcccagggctacaagaacctgcatgaatttgaagaagattttgacctgatcatcgacaactgcatgaagtacaatgcccgggacaccgtcttctacagagctgctgtgcggctgcgggaccagggcggcgtggtgctgcggcaggcccggcgggaggtggacagcatcggcctggaggaggccagcggcatgcacctgcctgagaggcctgctgctgccccccggcggcccttctcctgggaggatgtggaccggctgctggaccctgccaacagagcccacctgggcctggaggagcagctgcgggagctgctggacatgctggacctgacctgtgccatgaagagcagcggcagccgcagcaagagggccaagctgctgaagaaggagatcgccctgctgaggaacaagctgagccagcagcacagccagcccctgcccactggacctggcctggagggctttgaggaggatggagctgccctgggccctgaggccggggaggagggggacaagagcccccccaagctggagcccagtgatgccctgcccctgcccagcaacagcgagaccaacagcgagccccccaccctgaagcctgtggagctgaaccctgagcagagcaagctgttcaagagggtgacctttgacaatgaaagccacagcgcctgcacccagagcgccctggtgtctggccggcccccagagcccacccgggccagcagtggagatgtgcctgctgctgctgccagcgctgtggccgagcccgccagtgatgtgaacagaaggacctctgtgctcttctgcaagagcaagtctgtgtccccacccaagagcgccaagaacacagagacccagcccaccagcccccagctgggcaccaagaccttcctgtctgtggtgctgccccggctggagaccctgctgcagcccaggaagaggagccgcagcacctgtggggacagcgaggtggaggaggagagccctgggaagaggctggatgctggcctgaccaacggctttggaggagcccggtctgagcaggagcccggcggcggcctgggcaggaaggccacccccaggagaagatgtgccagcgagagcagcatcagcagcagcaacagccccctgtgtgacagcagcttcaatgcccccaagtgtggccggggcaagccagccctggtgagaagacacaccctggaggacagaagtgagctgatcagctgcattgaaaatggaaattatgccaaggccgccagaattgctgctgaggtgggccagagctccatgtggatcagcacagatgctgctgcctctgtgctggagcccctgaaggtggtgtgggccaagtgcagcggctaccccagctacccagccctgatcatcgaccccaagatgccccgggtgcccggccaccacaatggagtgaccatcccagccccacccctggatgtgctgaagattggagagcacatgcagaccaagagtgatgagaagctgttcctggtgctcttctttgacaacaagaggtcctggcagtggctgcccaagagcaagatggtgcccctgggcattgatgagaccatcgacaagctgaagatgatggagggcaggaacagcagcatcaggaaggctgtgagaattgcctttgaccgggccatgaaccacctgagccgggtgcacggggagcccaccagtgacctgagtgacatcgactag

SEQ ID NO: 116462 - DNA, 1950 bp, Artificial Sequence
  derived and/or modified sequence
atgaaggccgccaaggagaagctgaagcgggagcaggtgaaggtggagcaggtcgctatggaactgaggctgacccctctcaccgttctgcttagaagcgtcttggaccaattgcaagacaaggatcctgcaagaatatttgcacagcccgtgtcactgaaagaggtgcctgactatctggatcacattaagcatccaatggatttcgccacaatgcggaagcgactcgaagctcagggctacaagaacctgcacgagttcgaagaggattttgatctgattatcgacaactgtatgaagtataacgcccgcgatactgttttttatagagccgccgtcagactccgggatcagggaggcgtggttctgagacaggcgcggcgggaagtggactcgatcggtctggaagaggcctccggaatgcaccttcccgaaagaccagcggcggcacctagacggcccttcagctgggaggatgtcgataggctgttggatccggcaaaccgggcacatttgggccttgaggaacaactgcgggagctgctggacatgctggatttgacatgtgccatgaaatcaagcggatctcgcagcaagcgggccaagctgcttaagaaagagatcgcccttctgaggaacaagttgtcgcagcagcattcccaaccactccctacgggccctgggttggaagggttcgaagaggacggcgcggctttggggcctgaggcaggcgaggaaggtgacaagagcccgccaaaactggagcccagcgacgcactgcctctcccctctaatagcgagaccaactccgaacccccgacactgaaacccgtcgaactcaaccccgaacagagcaagttgtttaagcgcgtcacattcgacaacgagtcccattccgcatgcacccagtcagccctggtgtcgggcagacctcccgagcctacccgcgcctcttctggggacgttcctgcagccgccgcttctgcagtggctgaaccagcaagcgacgtgaatagacgaacgagcgtgcttttctgtaagtcaaaaagcgtgtcacccccaaaatccgctaagaatactgagacacagcccacatcaccacagttgggtaccaagaccttccttagtgtcgtattgcccaggctggagaccctactccaaccgcggaagcgtagcagatcgacctgcggtgattctgaagtcgaagaggagagtcccgggaaaaggctggatgccgggctgacaaatggcttcgggggcgcaaggtcggagcaagagcccgggggcggcctcggaagaaaagccaccccacgcagaagatgtgccagcgagtcctcaatatcttcttctaattctcctctttgcgattcaagcttcaatgcccctaaatgtggcagggggaagcccgcgctggtccgcaggcacaccttggaagataggtctgaactcatctcttgcatagaaaacggcaactacgctaaggcagctcggatcgccgcagaggtgggtcagagctctatgtggatatccaccgatgcagccgcctccgtactggagccactgaaggtagtatgggcaaagtgttctggttatccgagctatccagccctcattatcgaccccaagatgcctcgtgtgccgggtcatcacaacggggtcaccataccagcacccccactggatgtgctgaagattggggagcacatgcagactaaatcggatgaaaagctgtttttggtgctgttctttgacaataaaaggagttggcaatggctccccaagtccaagatggttcccctgggcatcgacgagaccatcgacaagctcaaaatgatggagggccgtaatagctccatcagaaaggcggtccgtatcgcctttgaccgggccatgaatcacctcagccgcgttcatggtgagcctacctccgacctatccgacatcgactag

SEQ ID NO: 116463 - DNA, 1950 bp, Artificial Sequence
  derived and/or modified sequence
atgaaagccgctaaggaaaaactgaagcgcgaacaagtaaaggttgagcaggtcgctatggagctgagactgactccactgacggtcttgctgcgcagcgtgctggatcagctccaggacaaagacccagccaggattttcgcgcagcccgtgtccttgaaggaagtgcctgactatctggaccacattaaacaccccatggactttgcaacaatgcgaaagcggttggaggctcaggggtacaagaacttgcacgagtttgaagaggatttcgacctgatcatcgacaactgcatgaagtacaatgcgagagatacggtcttctaccgcgctgcagtgagactgcgtgaccagggcggtgtggttttgagacaggctagaagagaggtcgacagcattgggttggaggaagcttcaggaatgcacctgcccgaacgcccagctgctgctcccaggcgtccattctcttgggaggatgtcgataggctgcttgacccggcaaatcgtgcacacctggggctggaagaacagctgcgcgaacttttagacatgttagacttgacgtgtgccatgaagtcaagtggctcaaggtctaaaagagccaaactgttgaaaaaggagattgccctgctaagaaacaagctctcccagcaacacagccaaccactacctaccggcccaggactcgagggcttcgaggaggatggcgcagcactgggacccgaggccggagaagaaggggacaaaagccctcctaagctggaaccttccgacgctctccccttaccttctaacagtgagaccaattctgagccccctaccctaaagccggtcgaactgaacccagagcagtctaagctttttaagcgcgtgacttttgataatgaatctcactcagcatgcactcaaagcgcgctggtttctggcagaccccctgaaccgacacgagcttcatcaggtgacgtccccgctgctgctgccagtgctgtggccgaaccagctagcgatgttaataggaggacgtctgtgctattctgtaagagtaaatcggtgtcacctcccaaatctgcgaagaacaccgagacccagcctacttctccccaactgggcacgaagacctttttgtccgtagtcttaccaagattggagactctgctacagcccaggaagcggagccgctccacatgtggcgattctgaagtggaggaagagagccctggcaaacggttggacgccggtctcacgaatggctttggtggcgcaagatccgaacaggaaccaggtggaggcctgggcaggaaggccactcccagaagacgctgtgctagtgagagtagcatctcttcatcaaactcacccctgtgcgatagctcctttaatgcaccgaagtgcggcagaggcaaacccgctctcgttagacgccataccctcgaagacaggagcgaattgatctcttgcatcgagaatggaaattacgctaaagccgcaagaatcgcagctgaggtcggtcagtcgtcaatgtggatcagtacggatgctgccgcatccgtgttggagccgttgaaggtggtgtgggccaagtgttctgggtatccgtcataccctgccttaataatcgaccccaagatgccacgcgtgccgggacatcacaatggtgtgactatacccgctcctccgctggacgtgctgaagattggggagcatatgcaaaccaaaagcgacgaaaagttattcctggttctgttttttgacaacaaacgctcctggcagtggctccctaagtcaaagatggtgcctttgggaatcgatgaaacaattgacaagctgaaaatgatggaggggcgaaattcatcaattagaaaggctgttcgaatcgcttttgacagggccatgaaccacttgtctcgcgtacacggcgaaccaaccagtgatctgagcgatatagattag

SEQ ID NO: 116464 - DNA, 2327 bp, Artificial Sequence
  derived and/or modified sequence
gctcggttaaaacggtcaggtccacatccaaggtcaggaagaaggcaaaaaaggctaagaaagctctggctgagccctgcgcggtcctgccgaccgtgtgcgctccttatattcccccgcagaggttaaataggattgcgaatcaggtggccattcagcggaagaagcagtttgtggagcgagcccacagctactggctgctcaagcggctgtccaggaacggggcccccctgctgcggcggctgcagtccagcctgcagtctcagcgaagctcacagcagagagaaaatgatgaggagatgaaggctgccaaagagaagctcaagcgtgagcaggtgaaggtggagcaggtcgccatggagctgcggctgaccccgctgacggtgctgctgcgctcagtgctggaccagctgcaagacaaggaccccgccaggatatttgcgcagcccgtgagtctgaaggaggtaccagattatttggatcacattaaacatcccatggactttgccacaatgaggaaacggttagaagctcaagggtataaaaacctccatgagtttgaggaggattttgatctcattatagataactgcatgaagtacaatgccagggacaccgtgttctatagagccgcggtgaggctgcgcgatcagggaggtgttgttctgaggcaggcccggcgcgaggtggacagcatcggcttggaagaggcctcggggatgcacctgcctgagcggcctgctgcggcaccgcggcggcctttctcctgggaagacgtggacaggttgctggaccccgccaacagagcccacctgggcctggaggagcagctgagagagctgctggacatgctcgacctcacctgcgctatgaagtccagcggctcccggagcaagcgggcaaagctgctcaaaaaggaaattgcccttctccgaaacaagctgagccagcagcacagccagcccctgcccacggggccaggcttggaaggcttcgaagaggacggagctgcgctggggccggaggcgggcgaggaaggagataaatctccccctaaacttgaaccatcagatgcattacctcttccttcaaactcggagactaattcagaaccaccaaccctcaaaccagtagaactcaacccagagcagagtaaacttttcaaaagagtcacatttgataatgaatcacatagcgcttgcactcagagcgcactggtaagcggacgccctccagagcccacccgcgccagtagtggcgatgtgccggcggcggcggcctccgcggtggcggagccagcaagcgatgtaaacagacgcacttctgttctcttctgcaaatcgaaaagtgtaagccccccaaagtctgccaagaacactgaaacccagccaacttctcctcagctagggaccaaaacctttttgtctgtagtccttccgaggttggagactcttctgcagccaaggaaaaggtcgcggagcacatgcggagactccgaggtggaggaggagtccccaggaaagcgcctggacgcaggtctcaccaacggctttgggggtgcgaggagcgagcaggagccgggcggcggcctggggaggaaggccacaccccgacgacgctgtgcctccgagtccagcatctcctccagcaacagcccgctctgcgactcgagctttaatgcgcccaaatgtgggcggggcaaaccggctcttgtgcgacggcacacgctggaggaccgcagtgagctgatctcctgcatcgagaatgggaactacgccaaggcggccaggatcgcagccgaagtcggccagagcagcatgtggatctccactgatgccgccgcctcggtgctggagcctctgaaggtggtgtgggccaagtgcagcggctacccctcctacccggcactgatcatcgaccccaagatgccccgtgtgcctggccaccacaacggcgtcaccatcccggccccacccctggacgtgctgaagattggggagcacatgcagaccaagtctgatgagaagctgttcctcgttctcttttttgataataagagaagttggcagtggcttcctaagtccaaaatggttccccttggtattgacgaaactatagacaagttaaagatgatggaagggaggaattccagcatccggaaggccgtgcggatcgcttttgaccgcgccatgaaccacctgagccgcgtccacggggagccgaccagcgacctcagtgacattgactgacggcccggccgccagcgcgggtcttgtccatagtgttgataagctgtacatgtttgtatattgttcaaaacttaactt

SEQ ID NO: 116465 - DNA, 1950 bp, Artificial Sequence
  derived and/or modified sequence
atgaaggccgccaaggagaagctgaagagagagcaggtgaaggtggagcaggtggccatggagctgagactgacccccctgaccgtgctgctgagaagcgtgctggaccagctgcaggacaaggaccccgccagaatcttcgcccagcccgtgagcctgaaggaggtgcccgactacctggaccacatcaagcaccccatggacttcgccaccatgagaaagagactggaggcccagggctacaagaacctgcacgagttcgaggaggacttcgacctgatcatcgacaactgcatgaagtacaacgccagagacaccgtgttctacagagccgccgtgagactgagagaccagggcggcgtggtgctgagacaggccagaagagaggtggacagcatcggcctggaggaggccagcggcatgcacctgcccgagagacccgccgccgcccccagaagacccttcagctgggaggacgtggacagactgctggaccccgccaacagagcccacctgggcctggaggagcagctgagagagctgctggacatgctggacctgacctgcgccatgaagagcagcggcagcagaagcaagagagccaagctgctgaagaaggagatcgccctgctgagaaacaagctgagccagcagcacagccagcccctgcccaccggccccggcctggagggcttcgaggaggacggcgccgccctgggccccgaggccggcgaggagggcgacaagagcccccccaagctggagcccagcgacgccctgcccctgcccagcaacagcgagaccaacagcgagccccccaccctgaagcccgtggagctgaaccccgagcagagcaagctgttcaagagagtgaccttcgacaacgagagccacagcgcctgcacccagagcgccctggtgagcggcagaccccccgagcccaccagagccagcagcggcgacgtgcccgccgccgccgccagcgccgtggccgagcccgccagcgacgtgaacagaagaaccagcgtgctgttctgcaagagcaagagcgtgagcccccccaagagcgccaagaacaccgagacccagcccaccagcccccagctgggcaccaagaccttcctgagcgtggtgctgcccagactggagaccctgctgcagcccagaaagagaagcagaagcacctgcggcgacagcgaggtggaggaggagagccccggcaagagactggacgccggcctgaccaacggcttcggcggcgccagaagcgagcaggagcccggcggcggcctgggcagaaaggccacccccagaagaagatgcgccagcgagagcagcatcagcagcagcaacagccccctgtgcgacagcagcttcaacgcccccaagtgcggcagaggcaagcccgccctggtgagaagacacaccctggaggacagaagcgagctgatcagctgcatcgagaacggcaactacgccaaggccgccagaatcgccgccgaggtgggccagagcagcatgtggatcagcaccgacgccgccgccagcgtgctggagcccctgaaggtggtgtgggccaagtgcagcggctaccccagctaccccgccctgatcatcgaccccaagatgcccagagtgcccggccaccacaacggcgtgaccatccccgccccccccctggacgtgctgaagatcggcgagcacatgcagaccaagagcgacgagaagctgttcctggtgctgttcttcgacaacaagagaagctggcagtggctgcccaagagcaagatggtgcccctgggcatcgacgagaccatcgacaagctgaagatgatggagggcagaaacagcagcatcagaaaggccgtgagaatcgccttcgacagagccatgaaccacctgagcagagtgcacggcgagcccaccagcgacctgagcgacatcgactag

SEQ ID NO: 116466 - protein, 1058 aa, Artificial Sequence
  derived and/or modified sequence
MRRKGRCHRGSAARHPSSPCSVKHSPTRETLTYAQAQRMVEIEIEGRLHRISIFDPLEIILEDDLTAQEMSECNSNKENSERPPVCLRTKRHKNNRVKKKNEALPSAHGTPASASALPEPKVRIVEYSPPSAPRRPPVYYKFIEKSAEELDNEVEYDMDEEDYAWLEIVNEKRKGDCVPAVSQSMFEFLMDRFEKESHCENQKQGEQQSLIDEDAVCCICMDGECQNSNVILFCDMCNLAVHQECYGVPYIPEGQWLCRHCLQSRARPADCVLCPNKGGAFKKTDDDRWGHVVCALWIPEVGFANTVFIEPIDGVRNIPPARWKLTCYLCKQKGVGACIQCHKANCYTAFHVTCAQKAGLYMKMEPVKELTGGGTTFSVRKTAYCDVHTPPGCTRRPLNIYGDVEMKNGVCRKESSVKTVRSTSKVRKKAKKAKKALAEPCAVLPTVCAPYIPPQRLNRIANQVAIQRKKQFVERAHSYWLLKRLSRNGAPLLRRLQSSLQSQRSSQQRENDEEMKAAKEKLKYWQRLRHDLERARLLIELLRKREKLKREQVKVEQVAMELRLTPLTVLLRSVLDQLQDKDPARIFAQPVSLKEVPDYLDHIKHPMDFATMRKRLEAQGYKNLHEFEEDFDLIIDNCMKYNARDTVFYRAAVRLRDQGGVVLRQARREVDSIGLEEASGMHLPERPAAAPRRPFSWEDVDRLLDPANRAHLGLEEQLRELLDMLDLTCAMKSSGSRSKRAKLLKKEIALLRNKLSQQHSQPLPTGPGLEGFEEDGAALGPEAGEEVLPRLETLLQPRKRSRSTCGDSEVEEESPGKRLDAGLTNGFGGARSEQEPGGGLGRKATPRRRCASESSISSSNSPLCDSSFNAPKCGRGKPALVRRHTLEDRSELISCIENGNYAKAARIAAEVGQSSMWISTDAAASVLEPLKVVWAKCSGYPSYPALIIDPKMPRVPGHHNGVTIPAPPLDVLKIGEHMQTKSDEKLFLVLFFDNKRSWQWLPKSKMVPLGIDETIDKLKMMEGRNSSIRKAVRIAFDRAMNHLSRVHGEPTSDLSDID

SEQ ID NO: 116467 - DNA, 4617 bp, Artificial Sequence
  derived and/or modified sequence
atccgataggaccaggtagccactgagcatgcctgtctggtgggcatagcctctgtgcctggtggggtccagccctgtatgtggacttcctgggggaccgcctgcatgctgggaaagtcctgcaactgtgggctctgggccggacccctcctccttggggagcgttgctgtggtctccgcagcctgttggtgtggtccgagaggggactggtgtgtggtggtagggacgcaggtgctcaggagggctcctcaggctgcctctctgcctgttactgctgctccctccctggtcctggggactcgctcaggcctggatgtgtggttttggacaccttggaaagaggttagctgtgagttttgctttgattgggctttgagctgctgagctagatctgtccaagcatgcttttgtggttttctcgagtctttggtcaccctgcgtagaattacctttacttttgccttcattttaggtaatcattaccaaatgaggaggaaaggacgatgtcatcgaggctctgcagcgaggcatccttcttccccatgcagtgttaaacactcccctacgcgagaaacgctgacctacgctcaagctcaaaggatggtagagatagaaattgaagggcgcttgcacaggatcagtatttttgatcccctggagatcatattggaagatgacctcactgctcaagagatgagtgagtgcaacagcaacaaggaaaacagcgagcggcctcctgtctgcttaagaactaagcgtcacaaaaacaacagagtcaaaaagaaaaacgaggccctccccagcgcccacggcacgccggcctcggccagtgccctcccggagcccaaggtgcgcatcgtggagtacagccctccgtccgcccccaggaggcctcctgtgtactacaagttcatcgagaagtcggccgaggaactggacaacgaggtggagtatgacatggacgaggaggactatgcctggctggagatcgtcaatgagaagcgcaagggcgactgcgtccccgccgtgtcgcagagcatgtttgagttcctgatggaccgcttcgagaaggagtcgcactgcgagaaccagaagcagggcgagcagcagtctctgatcgacgaggacgccgtgtgctgcatctgcatggacggggagtgtcagaacagcaacgtgatcctcttctgcgacatgtgcaacctggccgtgcaccaggagtgctacggggtgccctacatccccgagggccagtggctctgccgccactgcctgcagtcgcgggcccggcccgccgactgtgtgctgtgccccaacaagggtggtgccttcaaaaagacagatgacgaccgctggggtcacgtggtgtgtgccctgtggatcccagaggtcggctttgccaacacggtgttcatcgagcccatcgatggggtgaggaacatccctccagcccggtggaaactgacatgctacctctgtaagcagaagggcgtgggtgcctgcatccagtgccacaaagcaaactgctacacagcattccatgtgacgtgtgcccagaaggctggcctgtacatgaaaatggagcccgtgaaggaactgactggcggtggcaccaccttctccgtcagaaagaccgcttactgtgatgtccacacgcctccaggctgcacccggaggcctctgaatatttacggggatgtcgaaatgaaaaatggcgtctgtcgaaaagagagctcggttaaaacggtcaggtccacatccaaggtcaggaagaaggcaaaaaaggctaagaaagctctggctgagccctgcgcggtcctgccgaccgtgtgcgctccttatattcccccgcagaggttaaataggattgcgaatcaggtggccattcagcggaagaagcagtttgtggagcgagcccacagctactggctgctcaagcggctgtccaggaacggggcccccctgctgcggcggctgcagtccagcctgcagtctcagcgaagctcacagcagagagaaaatgatgaggagatgaaggctgccaaagagaagctgaagtactggcagcggctgcggcacgacctggagcgcgctcgcctgctgatcgagctgctgcgcaagcgggagaagctcaagcgtgagcaggtgaaggtggagcaggtcgccatggagctgcggctgaccccgctgacggtgctgctgcgctcagtgctggaccagctgcaagacaaggaccccgccaggatatttgcgcagcccgtgagtctgaaggaggtaccagattatttggatcacattaaacatcccatggactttgccacaatgaggaaacggttagaagctcaagggtataaaaacctccatgagtttgaggaggattttgatctcattatagataactgcatgaagtacaatgccagggacaccgtgttctatagagccgcggtgaggctgcgcgatcagggaggtgttgttctgaggcaggcccggcgcgaggtggacagcatcggcttggaagaggcctcggggatgcacctgcctgagcggcctgctgcggcaccgcggcggcctttctcctgggaagacgtggacaggttgctggaccccgccaacagagcccacctgggcctggaggagcagctgagagagctgctggacatgctcgacctcacctgcgctatgaagtccagcggctcccggagcaagcgggcaaagctgctcaaaaaggaaattgcccttctccgaaacaagctgagccagcagcacagccagcccctgcccacggggccaggcttggaaggcttcgaagaggacggagctgcgctggggccggaggcgggcgaggaagtccttccgaggttggagactcttctgcagccaaggaaaaggtcgcggagcacatgcggagactccgaggtggaggaggagtccccaggaaagcgcctggacgcaggtctcaccaacggctttgggggtgcgaggagcgagcaggagccgggcggcggcctggggaggaaggccacaccccgacgacgctgtgcctccgagtccagcatctcctccagcaacagcccgctctgcgactcgagctttaatgcgcccaaatgtgggcggggcaaaccggctcttgtgcgacggcacacgctggaggaccgcagtgagctgatctcctgcatcgagaatgggaactacgccaaggcggccaggatcgcagccgaagtcggccagagcagcatgtggatctccactgatgccgccgcctcggtgctggagcctctgaaggtggtgtgggccaagtgcagcggctacccctcctacccggcactgatcatcgaccccaagatgccccgtgtgcctggccaccacaacggcgtcaccatcccggccccacccctggacgtgctgaagattggggagcacatgcagaccaagtctgatgagaagctgttcctcgttctcttttttgataataagagaagttggcagtggcttcctaagtccaaaatggttccccttggtattgacgaaactatagacaagttaaagatgatggaagggaggaattccagcatccggaaggccgtgcggatcgcttttgaccgcgccatgaaccacctgagccgcgtccacggggagccgaccagcgacctcagtgacattgactgacggcccggccgccagcgcgggtcttgtccatagtgttgataagctgtacatgtttgtatattgttcaaaacttaacttattctgatttttagttatagctctttaattctttttccccggggaggggggaggttttatttccaagttttctaggaacccatctccgtctgggcgctgtgagtggggtgggcacgtccgggcagcccagtgcgtctgtcgcacgtccccaggccgtgctgctggcgtcactttctttgatatgtagctttttcttaaagacttttgaatgtttaataattttgtaaatcatgctctttacacagagtaccacttatttaataagacgggatgtaaatttacaatgacaaatgtgtattttaagaaagaaaatgacattattttgaatggtactttgtggaaagaggggagaataaagttatgctgtgtacatcacttgcagatcaccaaaaacactccgctgcccgtgaccgccggtgggtgtgtccccgctcccgtcgtcccgcccacctcaaaccccgcaggtgtgcctcccagcggattatttattgtagaaagtgtattcatttgctttataatgaaaaatacatttgcaaaggtatattgatatgcatttttatacaggcacataaaaattcaacttggcttgggagcagaatgcattgcattgtataaatgactctggcctgtgtgtactttgattttataacttgtaatcttttgtttacaatgaggggctttctgtaacttgttttaatttagaacactttggtagcaatagaaactttggatacatttttgtatggtacctgtgatgtatatagaattagtactttatttttatttttaagaggtaaagcattatgttggggaaagtagggtgggtttccaaatttgcattttttatattaaaaataaagtcaagaaaaaaaaaa

SEQ ID NO: 116468 - DNA, 3177 bp, Artificial Sequence
  derived and/or modified sequence
atgagacggaagggcaggtgccaccgcggcagcgcggcaagacatccatccagtccctgtagtgttaaacactcccctacaagggaaacactcacatatgcacaggcccaaaggatggtcgaaattgaaattgagggtcgactgcataggatttccatcttcgatccactcgaaataattctggaggatgatcttacagctcaggagatgtccgagtgcaacagcaacaaagaaaacagtgagcggccgcccgtctgccttaggacaaaaaggcataagaataacagggtgaaaaagaagaatgaggccctcccatcagcacatggaacacccgccagcgcctctgccctccccgagcccaaggtgcgaatagtcgaatattccccgcccagtgctcctcggagaccacctgtgtactataaattcatcgaaaagagtgcggaagagttagacaacgaggtcgaatatgatatggacgaggaggattacgcatggctggagatcgtgaatgagaaacgaaagggcgactgcgtacctgcagtatcccagagtatgtttgagttcctgatggatcgcttcgagaaggagagccattgtgaaaatcagaagcagggcgaacagcagtcactgattgatgaggatgcagtgtgctgcatttgtatggatggagagtgccaaaattccaacgtgatattattctgcgatatgtgtaatctggccgtgcatcaggaatgttatggggtgccatacattcctgaggggcaatggctttgtcgccactgtctccagtcacgggctcggcctgccgattgcgttttgtgccctaacaagggcggggctttcaagaaaaccgatgacgaccgttggggtcatgtggtctgtgcattgtggatacccgaagtagggtttgctaatacagtgttcatcgaaccgattgacggcgtcaggaacattccacccgccagatggaagctgacctgttacctctgcaaacagaagggcgtaggcgcctgtattcaatgccacaaggcaaattgctatacagcattccatgtgacgtgcgcacagaaggccggcctctatatgaaaatggagccggtgaaagagctgacaggcggcggcacaaccttcagtgttcgtaagaccgcttattgtgacgtacatacaccccctgggtgtacacgccgcccactcaacatctacggcgatgtagaaatgaaaaatggcgtgtgcaggaaggaatcctcggtaaaaaccgtgaggtcaacttcaaaggtaagaaagaaagctaaaaaggcaaaaaaggcactggcggaaccctgcgcggtgctgccaacagtttgcgccccttacattccacctcagaggctgaatcggattgccaaccaggttgctatccagaggaaaaagcagtttgtggaacgagctcactcttattggctgctcaagagactgtcgagaaacggggcccctctgctgcggagactccagtccagtctgcagtctcagaggtcttcccagcaaagagaaaacgacgaggagatgaaagccgctaaggagaaactcaaatattggcagaggctgagacatgacctggaaagagctcgcctgttgatagaacttctacgcaagcgtgagaaactcaagagagaacaggtcaaggtggaacaggtggccatggagctgcggttaactcccctgacagtgctacttcgatcagtactcgatcagttacaagacaaggaccctgcaaggattttcgctcagcccgtgtctcttaaagaggttccagactaccttgatcacataaaacaccccatggacttcgccactatgcggaagcggcttgaagcccagggctacaagaacctgcacgaatttgaagaggacttcgacctcatcatagacaactgcatgaagtataacgccagagacacggtgttttatcgcgccgcggttagactgcgagatcagggtggtgtggttcttaggcaagctcgaagggaagtcgattctattggcctggaagaagcctctggcatgcatttaccagagaggccagctgccgcaccccgccggcctttttcatgggaagatgtggaccgattgctggaccccgcaaatagagcacatctgggactggaggaacaactacgggagctactagatatgctggatttaacgtgcgctatgaagagtagcggaagccgaagtaagcgtgccaagctcctcaaaaaggagattgcattgctgagaaataagctcagtcagcaacattcgcaaccattacccaccggccccgggctggaggggtttgaagaagatggtgcagctctgggcccggaggctggcgaagaagtgctcccgcggctggaaaccctgctgcagcccaggaaaagatctcgtagcacgtgcggcgacagcgaggttgaagaggagagcccgggaaagagactagacgctggactgaccaatgggtttggaggtgcccgaagcgagcaggaaccaggtggtggactcgggcgcaaagcaactcctagacggaggtgtgcatctgaatctagcatatcttccagcaattcacccctctgtgactcttcctttaacgctcctaagtgcggcaggggaaaacccgctctagttagacgccacacactcgaggacagatccgagttgatctcttgtatagagaacgggaactacgccaaggccgcgcgtattgcagctgaggtgggacagtctagcatgtggattagcacagacgcagccgcttctgtgctcgagcccttgaaggtggtttgggccaagtgcagtggctatccaagttaccctgcactgattattgacccaaaaatgccccgggtgcccggacaccataacggggtgactattcctgctccgcccctggatgtgctgaaaattggagagcacatgcaaacaaaatccgacgaaaaactatttctggtcctcttttttgataataaaaggtcctggcaatggctccccaagtctaagatggttcctctggggattgatgagacaatagacaagctcaaaatgatggaggggcgaaactcatcaatcagaaaagcagtcaggatagcctttgaccgcgctatgaaccacttgagccgggtgcacggggagcctacgtccgatttgtccgatatcgattag

SEQ ID NO: 116469 - DNA, 3177 bp, Artificial Sequence
  derived and/or modified sequence
atgaggaggaagggccgctgccaccggggcagcgctgcccggcaccccagcagcccctgcagcgtgaagcacagccccacccgggagaccctgacctacgcccaggcccagaggatggtggagattgaaattgagggccgcctgcaccgcatcagcatctttgaccccctggagatcatcctggaggatgacctgacagcccaggagatgtctgagtgcaacagcaacaaggagaacagcgagaggcctcctgtgtgcctgcggaccaagaggcacaagaacaacagagtgaagaagaagaatgaggccctgcccagcgcccacggcaccccagccagcgccagcgccctgcctgagcccaaggtgcgcatcgtggagtacagccccccatctgccccccggcggccccctgtgtactacaagttcatcgagaagtctgctgaggagctggacaatgaggtggagtatgacatggatgaagaagattatgcctggctggagatcgtgaatgagaagaggaagggggactgtgtgcctgctgtgtcccagagcatgtttgagttcctgatggacagatttgagaaggagagccactgtgagaaccagaagcagggcgagcagcagagcctgattgatgaagatgctgtgtgctgcatctgcatggatggagagtgccagaacagcaatgtcatcctcttctgtgacatgtgcaacctggccgtgcaccaggagtgctacggcgtgccctacatccctgagggccagtggctgtgccgccactgcctgcagagccgggcccggcctgctgactgtgtgctgtgccccaacaagggcggggccttcaagaagacagatgatgaccgctggggccacgtggtgtgtgccctgtggatccctgaggtgggctttgccaacacagtgttcatcgagcccattgatggagtgaggaacatccccccagcccgctggaagctgacctgctacctgtgcaagcagaagggcgtgggcgcctgcatccagtgccacaaggccaactgctacacagccttccacgtgacctgtgcccagaaggccggcctgtacatgaagatggagcctgtgaaggagctgactggaggcggcaccaccttctctgtgaggaagacagcctactgtgatgtgcacaccccacctggctgcacccggcggcccctgaacatctatggagatgtggagatgaagaatggagtgtgcaggaaggagagctctgtgaagacagtgcgcagcaccagcaaggtgaggaagaaggccaagaaggccaagaaggccctggccgagccctgtgctgtgctgcccaccgtgtgtgccccctacatccccccccagaggctgaaccgcatcgccaaccaggtggccatccagaggaagaagcagtttgtggagcgggcccacagctactggctgctgaagaggctgagcagaaatggagcccccctgctgcggcggctgcagagcagcctgcagagccagaggagcagccagcagcgggagaatgatgaggagatgaaggccgccaaggagaagctgaagtactggcagaggctgcggcatgacctggagcgggcccggctgctgattgagctgctgaggaagcgggagaagctgaagcgggagcaggtgaaggtggagcaggtggccatggagctgcggctgacccccctgactgtgctgctgcggtctgtgctggaccagctgcaggacaaggaccctgcccgcatctttgcccagcctgtgtccctgaaggaggtgcctgactacctggaccacatcaagcaccccatggactttgccaccatgaggaagaggctggaggcccagggctacaagaacctgcatgaatttgaagaagattttgacctgatcatcgacaactgcatgaagtacaatgcccgggacaccgtcttctacagagctgctgtgcggctgcgggaccagggcggcgtggtgctgcggcaggcccggcgggaggtggacagcatcggcctggaggaggccagcggcatgcacctgcctgagaggcctgctgctgccccccggcggcccttctcctgggaggatgtggaccggctgctggaccctgccaacagagcccacctgggcctggaggagcagctgcgggagctgctggacatgctggacctgacctgtgccatgaagagcagcggcagccgcagcaagagggccaagctgctgaagaaggagatcgccctgctgaggaacaagctgagccagcagcacagccagcccctgcccactggacctggcctggagggctttgaggaggatggagctgccctgggccctgaggccggggaggaggtgctgccccggctggagaccctgctgcagcccaggaagaggagccgcagcacctgtggggacagcgaggtggaggaggagagccctgggaagaggctggatgctggcctgaccaatggatttggaggagcccggtctgagcaggagcccggcggcggcctgggcaggaaggccaccccaagaagaagatgtgccagcgagagcagcatcagcagcagcaacagccccctgtgtgacagcagcttcaatgcccccaagtgtggccggggcaagccagccctggtgcggcggcacaccctggaggacagaagtgagctgatcagctgcattgaaaatggaaattatgccaaggccgccagaattgctgctgaggtgggccagagctccatgtggatcagcacagatgctgctgcctctgtgctggagcccctgaaggtggtgtgggccaagtgcagcggctaccccagctacccagccctgatcatcgaccccaagatgccccgggtgcccggccaccacaacggggtgaccatcccagccccacccctggatgtgctgaagatcggggagcacatgcagaccaagagtgatgagaagctgttcctggtgctcttctttgacaacaagaggtcctggcagtggctgcccaagagcaagatggtgcccctgggcattgatgagaccatcgacaagctgaagatgatggagggcaggaacagcagcatcaggaaggctgtgcgcatcgcctttgaccgggccatgaaccacctgagccgggtgcatggagagcccaccagtgacctgagtgacattgattag

SEQ ID NO: 116470 - DNA, 3177 bp, Artificial Sequence
  derived and/or modified sequence
atgcggcggaagggccggtgccaccggggcagcgccgcccggcacccttctagcccgtgctcagtcaaacactcgcctactagggagactctcacttatgcccaggcacagagaatggtagaaatcgaaatagaggggcgactacacagaatctctatatttgaccctctcgagataatactagaagacgacctgacagcacaggaaatgagcgagtgtaattccaacaaagagaactcagaacgtcctcctgtttgtctccgtacaaagaggcataagaacaatcgcgtgaaaaagaaaaatgaggccctgccaagcgcccacggcacacctgcatctgctagtgcgttaccggaaccaaaagtgaggatagtggagtatagtcctccgtctgcaccacggcgaccccccgtgtactacaaattcattgaaaagtcagcagaggagctagacaatgaggtggaatacgacatggatgaagaggactacgcctggctcgagattgtgaatgaaaaacgcaaaggggactgcgtaccggctgtgtcccagtcaatgttcgaatttttgatggaccggttcgagaaagaaagccattgtgagaaccagaagcagggagagcagcagagcctgatcgatgaagacgccgtttgctgtatttgtatggatggggaatgtcagaattcaaacgtgatactgttctgcgatatgtgcaacctggccgtccatcaggaatgctacggggtcccgtacatccccgaaggccagtggctctgcaggcactgccttcagtcccgggcacggcctgccgactgtgttctgtgtccaaacaaaggaggcgccttcaaaaaaaccgacgatgaccgatgggggcacgtggtctgtgcgctgtggattcctgaggtgggatttgcaaatactgtcttcatcgagccaatcgatggagtccgcaacatccctccagccaggtggaagcttacgtgctacctgtgcaaacagaaaggggtcggggcatgtattcaatgccacaaggcgaactgctacacagcctttcatgttacttgcgcccagaaagctggattgtacatgaagatggagccagtcaaagagttgacagggggaggcactacctttagcgttaggaagacagcttattgcgacgtacatacccccccaggatgcacaagaaggcctctgaatatttatggggacgtagagatgaaaaacggagtttgccgcaaggaatcctcggtgaaaactgttcgttccacttctaaggtccggaagaaagccaagaaagctaaaaaggctctggcagaaccatgtgcggtgctgcccaccgtttgcgccccttacatcccaccccagagactgaatcgcatcgccaaccaggtggccattcagaggaaaaagcagttcgtggagcgcgcccattcttattggctgctcaagcgtctgagtaggaatggcgccccactactgaggagactgcagtcatcactgcaaagtcagcggagcagtcaacagagggaaaatgatgaggagatgaaggccgcaaaggaaaaattaaagtactggcagagactgagacacgacctggagcgggcccggttgcttatagagctcctgcgtaagcgcgagaagctaaaacgtgagcaagtaaaggtggagcaggtggctatggaactgagattgaccccattaacggtcctgctaagatctgtgttggaccagttacaggacaaagatcctgccaggatatttgctcagccagtctctcttaaggaggtgccagactacctggatcacattaagcacccaatggacttcgcgactatgcgcaagagactggaggcgcagggctacaaaaatttacacgaatttgaggaggacttcgacctcattattgataactgtatgaaatacaacgcgcgtgatacagtcttttacagggctgctgtccgcctgcgtgaccagggtggcgtggtgctccggcaggcgaggcgggaagtggacagcatcggactcgaagaagccagtggcatgcaccttcctgagcggccagccgccgctccaagaaggcccttttcctgggaggatgtggataggctgctggaccctgccaatagagcccatctgggattggaggagcaacttcgagaattgctagacatgctggatctgacatgtgcaatgaagtcatcagggagtcgcagcaagagggctaaactgctaaagaaagaaatcgcccttctccggaacaaattaagccagcagcatagccagccgctgcctacggggcctggtctcgaaggattcgaggaggacggagcggctctcggacctgaggcgggggaggaggttctgccacgcctggagaccctattgcagccccgcaagagaagcaggtctacatgcggggactctgaggtggaggaggaaagtcccggcaagcgcctcgatgcagggctcactaatggattcggtggtgcacggagcgagcaggagcccggcggtggcctggggaggaaagccacccctaggcgtagatgcgcctccgagtccagcatttccagctcaaatagtcccctttgtgattctagcttcaatgccccaaaatgcggccggggtaagccagctctggtgcgacgacataccttggaggataggtctgagttaatctcctgtatagaaaatggcaattacgccaaagccgccaggatcgccgccgaagtaggacagagtagtatgtggattagtaccgacgccgccgcgtcagtcctggaaccactgaaagtggtgtgggctaagtgcagtggctatcctagttaccctgcattgattattgatcccaaaatgcctagggtgccaggtcaccataacggtgtgacaattcccgcaccaccactggacgtcctcaagatcggagaacacatgcagacaaaatcagacgaaaaattgttcttggtattattctttgataataaacgtagctggcagtggctgccaaaatctaaaatggttccactgggaatagatgaaaccattgataagctcaagatgatggaaggccgcaacagctcaatccggaaagctgtgcggattgccttcgacagagccatgaaccatctgagccgtgtccatggggaacccacttcagacctgtccgatatcgactag

SEQ ID NO: 116471 - DNA, 3177 bp, Artificial Sequence
  derived and/or modified sequence
atgaggaggaaaggaagatgccatcgagggtctgcagcacgccatccctcttccccatgcagcgtgaaacattcccctactcgggagactttgacctacgctcaggcacagcgcatggtggagatcgagattgaggggcgattacataggatatctatctttgaccctctggaaatcatactggaggatgacttaactgcccaagaaatgagcgagtgcaacagcaataaggagaacagtgaacgcccacccgtgtgtctgaggaccaagcgtcacaagaataatagagtaaaaaaaaaaaacgaggccctcccttcagcgcacggaacaccagcgtcagcctccgctctccctgaacccaaggtaaggattgtggaatattcacctccgtctgctccaaggaggccacccgtttactataagtttatagagaagagcgcagaggagctcgacaacgaggtggaatacgatatggatgaagaggactatgcttggctggaaattgtgaacgagaagcgcaagggagactgtgtaccagccgtaagccaatcaatgttcgagttcctgatggaccgattcgagaaggagagccactgcgaaaaccagaagcagggggagcagcagagcttgattgacgaggatgctgtgtgttgtatctgcatggatggcgagtgccagaacagtaacgtgatcctgttctgcgatatgtgtaatctggcggtccaccaagagtgttatggtgtcccatatattccggaaggccagtggctctgccgacattgcctgcagagtagggcccgaccagccgactgtgtactctgtccaaataaagggggtgcattcaaaaaaacagacgatgacaggtggggccatgtggtctgtgccctgtggattccagaggtaggctttgccaataccgtgttcattgaacccatagacggcgtccgcaatattccccctgcacgatggaaactcacctgttacctttgcaagcagaaaggcgtcggcgcatgtattcaatgccacaaggccaattgttacaccgcttttcacgtcacctgtgcgcagaaggccggactctacatgaaaatggagcccgttaaggagcttacaggcggtggtacaacattctctgtccgaaagacagcttactgcgatgttcacacccctcccggatgtacaagacgacccttgaacatctacggggatgtggagatgaagaacggcgtgtgcaggaaagagtccagcgtcaagactgttagaagtacatccaaggtcagaaagaaggcaaagaaggccaagaaagcactcgccgaaccgtgcgctgtgttgccaactgtgtgcgctccatacattccgcctcagcgcctcaatcggatcgcaaatcaggtggcaattcagagaaaaaagcagtttgtggagagagcacactcctactggctcttaaagcggttaagccggaacggagcaccactgctgcggcgtttgcaatctagtctacagagccagcgcagttctcagcagcgtgagaacgacgaggagatgaaggccgcaaaggagaagctcaaatattggcagagactgcgtcatgacctagagcgtgctcggcttttaatcgagttgctgcggaagcgggagaagttgaagcgcgaacaggtcaaggtggagcaagtggctatggagctgcgactgaccccgcttaccgtccttctgagatctgtcttagatcagcttcaggacaaagatcccgcacggatctttgcccagcccgtcagcctcaaggaggtccctgattatctggatcatatcaagcatccaatggacttcgccacaatgcgaaaacgtctggaggcacaggggtacaaaaatctacatgagttcgaagaagatttcgacctaattatcgataactgcatgaaatataatgcccgagacacagttttttatcgcgcagctgtcagactccgggatcaagggggagtggtcctgcgccaggcgaggagagaggtggactccatcgggcttgaagaagccagcgggatgcacctgccggagaggcccgctgccgcacccaggaggccttttagctgggaagatgtcgacaggttacttgaccctgctaatcgtgctcacctcgggctggaagaacaactgcgagaactcctcgacatgctggaccttacatgtgcgatgaagtcctcaggatcacgcagtaagcgcgcaaaacttttgaagaaagagattgctctgcttagaaacaagctgtcccaacagcacagtcaacctttaccaactggtccgggtctggaagggttcgaagaggatggggctgccctggggccagaagccggagaagaagtgctgccccgtcttgaaaccctgctccagcccagaaagcgcagtagatccacctgtggtgacagcgaggtcgaggaggagtcccctggcaaaaggcttgacgcaggactaactaatggcttcggaggcgcacggtccgagcaggagcctggcggaggcctggggcgaaaagccaccccaaggcggagatgcgcttcagagtcttccatcagcagcagtaactctcctctgtgcgattcctcattcaacgctcccaagtgtgggcgtggaaagcctgccctcgtccggagacacacgttggaagaccggtcagaactgatctcatgtatcgagaacggcaactatgccaaagcggctaggatagccgcagaggtgggccaaagcagtatgtggataagcacagatgccgctgccagcgtgttggaacctctcaaggtggtgtgggctaaatgctccggctacccatcctaccctgctctgatcattgatcccaaaatgcctcgagtccccggacatcataatggagttaccatacccgcacctccactggatgtgttaaagatcggagagcacatgcaaaccaagtccgatgaaaaactgttcctggtattattttttgataacaagcggtcctggcagtggctgcctaagtctaagatggttccactcgggatcgatgaaactatcgataaactgaagatgatggagggccgaaactcatcgattcgcaaggccgtgcgtatcgccttcgaccgagctatgaaccacctgtcccgggtacatggcgaaccgaccagcgacttgagcgatatcgactag

SEQ ID NO: 116472 - DNA, 4614 bp, Artificial Sequence
  derived and/or modified sequence
atccgataggaccaggtagccactgagcatgcctgtctggtgggcatagcctctgtgcctggtggggtccagccctgtatgtggacttcctgggggaccgcctgcatgctgggaaagtcctgcaactgtgggctctgggccggacccctcctccttggggagcgttgctgtggtctccgcagcctgttggtgtggtctgagaggggactggtgtgtggtggtagggacgcaggtgctcaggagggctcctcaggctgcctctctgcctgttactgctgctccctccctggtcctggggactcgctcaggcctggatgtgtggttttggacaccttggaaagaggttagctgtgagttttgctttgattgggctttgagctgctgagctagatctgtccaagcatgcttttgtggttttctcgagtctttggtcaccctgcgtagaattacctttacttttgccttcattttaggtaatcattaccaaatgaggaggaaaggacgatgtcatcgaggctctgcagcgaggcatccttcttccccatgcagtgttaaacactcccctacgcgagaaacgctgacctacgctcaagctcaaaggatggtagagatagaaattgaagggcgcttgcacaggatcagtatttttgatcccctggagatcatattggaagatgacctcactgctcaagagatgagtgagtgcaacagcaacaaggaaaacagcgagcggcctcctgtctgcttaagaactaagcgtcacaaaaacaacagagtcaaaaagaaaaacgaggccctccccagcgcccacggcacgccggcctcggccagtgccctcccggagcccaaggtgcgcatcgtggagtacagccctccgtccgcccccaggaggcctcctgtgtactacaagttcatcgagaagtcggccgaggaactggacaacgaggtggagtatgacatggacgaggaggactatgcctggctggagatcgtcaatgagaagcgcaagggcgactgcgtccccgccgtgtcgcagagcatgtttgagttcctgatggaccgcttcgagaaggagtcgcactgcgagaaccagaagcagggcgagcagcagtctctgatcgacgaggacgccgtgtgctgcatctgcatggacggggagtgtcagaacagcaacgtgatcctcttctgcgacatgtgcaacctggccgtgcaccaggagtgctacggggtgccctacatccccgagggccagtggctctgccgccactgcctgcagtcgcgggcccggcccgccgactgtgtgctgtgccccaacaagggtggtgccttcaaaaagacagatgacgaccgctggggtcacgtggtgtgtgccctgtggatcccagaggtcggctttgccaacacggtgttcatcgagcccatcgatggggtgaggaacatccctccagcccggtggaaactgacatgctacctctgtaagcagaagggcgtgggtgcctgcatccagtgccacaaagcaaactgctacacagcattccatgtgacgtgtgcccagaaggctggcctgtacatgaaaatggagcccgtgaaggaactgactggcggtggcaccaccttctccgtcagaaagaccgcttactgtgatgtccacacgcctccaggctgcacccggaggcctctgaatatttacggggatgtcgaaatgaaaaatggcgtctgtcgaaaagagagctcggttaaaacggtcaggtccacatccaaggtcaggaagaaggcaaaaaaggctaagaaagctctggctgagccctgcgcggtcctgccgaccgtgtgcgctccttatattcccccgcagaggttaaataggattgcgaatcaggtggccattcagcggaagaagcagtttgtggagcgagcccacagctactggctgctcaagcggctgtccaggaacggggcccccctgctgcggcggctgcagtccagcctgcagtctcagcgaagctcacagcagagagaaaatgatgaggagatgaaggctgccaaagagaagctgaagtactggcagcggctgcggcacgacctggagcgcgctcgcctgctgatcgagctgctgcgcaagcgggagaagctcaagcgtgagcaggtgaaggtggagcaggtcgccatggagctgcggctgaccccgctgacggtgctgctgcgctcagtgctggaccagctgcaagacaaggaccccgccaggatatttgcgcagcccgtgagtctgaaggaggtaccagattatttggatcacattaaacatcccatggactttgccacaatgaggaaacggttagaagctcaagggtataaaaacctccatgagtttgaggaggattttgatctcattatagataactgcatgaagtacaatgccagggacaccgtgttctatagagccgcggtgaggctgcgcgatcagggaggtgttgttctgaggcaggcccggcgcgaggtggacagcatcggcttggaagaggcctcggggatgcacctgcctgagcggcctgctgcggcaccgcggcggcctttctcctgggaagacgtggacaggttgctggaccccgccaacagagcccacctgggcctggaggagcagctgagagagctgctggacatgctcgacctcacctgcgctatgaagtccagcggctcccggagcaagcgggcaaagctgctcaaaaaggaaattgcccttctccgaaacaagctgagccagcagcacagccagcccctgcccacggggccaggcttggaaggcttcgaagaggacggagctgcgctggggccggaggcgggcgaggaagtccttccgaggttggagactcttctgcagccaaggaaaaggtcgcggagcacatgcggagactccgaggtggaggaggagtccccaggaaagcgcctggacgcaggtctcaccaacggctttgggggtgcgaggagcgagcaggagccgggcggcggcctggggaggaaggccacaccccgacgacgctgtgcctccgagtccagcatctcctccagcaacagcccgctctgcgactcgagctttaatgcgcccaaatgtgggcggggcaaaccggctcttgtgcgacggcacacgctggaggaccgcagtgagctgatctcctgcatcgagaatgggaactacgccaaggcggccaggatcgcagccgaagtcggccagagcagcatgtggatctccactgatgccgccgcctcggtgctggagcctctgaaggtggtgtgggccaagtgcagcggctacccctcctacccggcactgatcatcgaccccaagatgccccgtgtgcctggccaccacaacggcgtcaccatcccggccccacccctggacgtgctgaagattggggagcacatgcagaccaagtctgatgagaagctgttcctcgttctcttttttgataataagagaagttggcagtggcttcctaagtccaaaatggttccccttggtattgacgaaactatagacaagttaaagatgatggaagggaggaattccagcatccggaaggccgtgcggatcgcttttgaccgcgccatgaaccacctgagccgcgtccacggggagccgaccagcgacctcagtgacattgactgacggcccggccgccagcgcgggtcttgtccatagtgttgataagctgtacatgtttgtatattgttcaaaacttaacttattctgatttttagttatagctctttaattctttttccccggggaggggggaggttttatttccaagttttctaggaacccatctccgtctgggcgctgtgagtggggtgggcacgtccgggcagcccagtgcgtctgtcgcacgtccccaggccgtgctgctggcgtcactttctttgatatgtagctttttcttaaagacttttgaatgtttaataattttgtaaatcatgctctttacacagagtaccacttatttaataagacgggatgtaaatttacaatgacaaatgtgtattttaagaaagaaaatgacattattttgaatggtactttgtggaaagaggggagaataaagttatgctgtgtacatcacttgcagatcaccaaaaacactccgctgcccgtgaccgccggtgggtgtgtccccgctcccgtcgtcccgcccacctcaaaccccgcaggtgtgcctcccagcggattatttattgtagaaagtgtattcatttgctttataatgaaaaatacatttgcaaaggtatattgatatgcatttttatacaggcacataaaaattcaacttggcttgggagcagaatgcattgcattgtataaatgactctggcctgtgtgtactttgattttataacttgtaatcttttgtttacaatgaggggctttctgtaacttgttttaatttagaacactttggtagcaatagaaactttggatacatttttgtatggtacctgtgatgtatatagaattagtactttatttttatttttaagaggtaaagcattatgttggggaaagtagggtgggtttccaaatttgcattttttatattaaaaataaagtcaagatttgga

SEQ ID NO: 116473 - DNA, 4312 bp, Artificial Sequence
  derived and/or modified sequence
caatctagtttcaacatacaatgaggatttctgtctgatacagagaaagatacccagtgtctggagggtctgtcttaagaagtgctcttgaagtctgctgggatttcctttcgggactcacagagggaagcctgctccctgagggctttttctcaggcccaatagatcagggtaatcattaccaaatgaggaggaaaggacgatgtcatcgaggctctgcagcgaggcatccttcttccccatgcagtgttaaacactcccctacgcgagaaacgctgacctacgctcaagctcaaaggatggtagagatagaaattgaagggcgcttgcacaggatcagtatttttgatcccctggagatcatattggaagatgacctcactgctcaagagatgagtgagtgcaacagcaacaaggaaaacagcgagcggcctcctgtctgcttaagaactaagcgtcacaaaaacaacagagtcaaaaagaaaaacgaggccctccccagcgcccacggcacgccggcctcggccagtgccctcccggagcccaaggtgcgcatcgtggagtacagccctccgtccgcccccaggaggcctcctgtgtactacaagttcatcgagaagtcggccgaggaactggacaacgaggtggagtatgacatggacgaggaggactatgcctggctggagatcgtcaatgagaagcgcaagggcgactgcgtccccgccgtgtcgcagagcatgtttgagttcctgatggaccgcttcgagaaggagtcgcactgcgagaaccagaagcagggcgagcagcagtctctgatcgacgaggacgccgtgtgctgcatctgcatggacggggagtgtcagaacagcaacgtgatcctcttctgcgacatgtgcaacctggccgtgcaccaggagtgctacggggtgccctacatccccgagggccagtggctctgccgccactgcctgcagtcgcgggcccggcccgccgactgtgtgctgtgccccaacaagggtggtgccttcaaaaagacagatgacgaccgctggggtcacgtggtgtgtgccctgtggatcccagaggtcggctttgccaacacggtgttcatcgagcccatcgatggggtgaggaacatccctccagcccggtggaaactgacatgctacctctgtaagcagaagggcgtgggtgcctgcatccagtgccacaaagcaaactgctacacagcattccatgtgacgtgtgcccagaaggctggcctgtacatgaaaatggagcccgtgaaggaactgactggcggtggcaccaccttctccgtcagaaagaccgcttactgtgatgtccacacgcctccaggctgcacccggaggcctctgaatatttacggggatgtcgaaatgaaaaatggcgtctgtcgaaaagagagctcggttaaaacggtcaggtccacatccaaggtcaggaagaaggcaaaaaaggctaagaaagctctggctgagccctgcgcggtcctgccgaccgtgtgcgctccttatattcccccgcagaggttaaataggattgcgaatcaggtggccattcagcggaagaagcagtttgtggagcgagcccacagctactggctgctcaagcggctgtccaggaacggggcccccctgctgcggcggctgcagtccagcctgcagtctcagcgaagctcacagcagagagaaaatgatgaggagatgaaggctgccaaagagaagctgaagtactggcagcggctgcggcacgacctggagcgcgctcgcctgctgatcgagctgctgcgcaagcgggagaagctcaagcgtgagcaggtgaaggtggagcaggtcgccatggagctgcggctgaccccgctgacggtgctgctgcgctcagtgctggaccagctgcaagacaaggaccccgccaggatatttgcgcagcccgtgagtctgaaggaggtaccagattatttggatcacattaaacatcccatggactttgccacaatgaggaaacggttagaagctcaagggtataaaaacctccatgagtttgaggaggattttgatctcattatagataactgcatgaagtacaatgccagggacaccgtgttctatagagccgcggtgaggctgcgcgatcagggaggtgttgttctgaggcaggcccggcgcgaggtggacagcatcggcttggaagaggcctcggggatgcacctgcctgagcggcctgctgcggcaccgcggcggcctttctcctgggaagacgtggacaggttgctggaccccgccaacagagcccacctgggcctggaggagcagctgagagagctgctggacatgctcgacctcacctgcgctatgaagtccagcggctcccggagcaagcgggcaaagctgctcaaaaaggaaattgcccttctccgaaacaagctgagccagcagcacagccagcccctgcccacggggccaggcttggaaggcttcgaagaggacggagctgcgctggggccggaggcgggcgaggaagtccttccgaggttggagactcttctgcagccaaggaaaaggtcgcggagcacatgcggagactccgaggtggaggaggagtccccaggaaagcgcctggacgcaggtctcaccaacggctttgggggtgcgaggagcgagcaggagccgggcggcggcctggggaggaaggccacaccccgacgacgctgtgcctccgagtccagcatctcctccagcaacagcccgctctgcgactcgagctttaatgcgcccaaatgtgggcggggcaaaccggctcttgtgcgacggcacacgctggaggaccgcagtgagctgatctcctgcatcgagaatgggaactacgccaaggcggccaggatcgcagccgaagtcggccagagcagcatgtggatctccactgatgccgccgcctcggtgctggagcctctgaaggtggtgtgggccaagtgcagcggctacccctcctacccggcactgatcatcgaccccaagatgccccgtgtgcctggccaccacaacggcgtcaccatcccggccccacccctggacgtgctgaagattggggagcacatgcagaccaagtctgatgagaagctgttcctcgttctcttttttgataataagagaagttggcagtggcttcctaagtccaaaatggttccccttggtattgacgaaactatagacaagttaaagatgatggaagggaggaattccagcatccggaaggccgtgcggatcgcttttgaccgcgccatgaaccacctgagccgcgtccacggggagccgaccagcgacctcagtgacattgactgacggcccggccgccagcgcgggtcttgtccatagtgttgataagctgtacatgtttgtatattgttcaaaacttaacttattctgatttttagttatagctctttaattctttttccccggggaggggggaggttttatttccaagttttctaggaacccatctccgtctgggcgctgtgagtggggtgggcacgtccgggcagcccagtgcgtctgtcgcacgtccccaggccgtgctgctggcgtcactttctttgatatgtagctttttcttaaagacttttgaatgtttaataattttgtaaatcatgctctttacacagagtaccacttatttaataagacgggatgtaaatttacaatgacaaatgtgtattttaagaaagaaaatgacattattttgaatggtactttgtggaaagaggggagaataaagttatgctgtgtacatcacttgcagatcaccaaaaacactccgctgcccgtgaccgccggtgggtgtgtccccgctcccgtcgtcccgcccacctcaaaccccgcaggtgtgcctcccagcggattatttattgtagaaagtgtattcatttgctttataatgaaaaatacatttgcaaaggtatattgatatgcatttttatacaggcacataaaaattcaacttggcttgggagcagaatgcattgcattgtataaatgactctggcctgtgtgtactttgattttataacttgtaatcttttgtttacaatgaggggctttctgtaacttgttttaatttagaacactttggtagcaatagaaactttggatacatttttgtatggtacctgtgatgtatatagaattagtactttatttttatttttaagaggtaaagcattatgttggggaaagtagggtgggtttccaaatttgcattttttatattaaaaataaagtcaagatttgga

SEQ ID NO: 116474 - DNA, 3177 bp, Artificial Sequence
  derived and/or modified sequence
atgagaagaaagggcagatgccacagaggcagcgccgccagacaccccagcagcccctgcagcgtgaagcacagccccaccagagagaccctgacctacgcccaggcccagagaatggtggagatcgagatcgagggcagactgcacagaatcagcatcttcgaccccctggagatcatcctggaggacgacctgaccgcccaggagatgagcgagtgcaacagcaacaaggagaacagcgagagaccccccgtgtgcctgagaaccaagagacacaagaacaacagagtgaagaagaagaacgaggccctgcccagcgcccacggcacccccgccagcgccagcgccctgcccgagcccaaggtgagaatcgtggagtacagcccccccagcgcccccagaagaccccccgtgtactacaagttcatcgagaagagcgccgaggagctggacaacgaggtggagtacgacatggacgaggaggactacgcctggctggagatcgtgaacgagaagagaaagggcgactgcgtgcccgccgtgagccagagcatgttcgagttcctgatggacagattcgagaaggagagccactgcgagaaccagaagcagggcgagcagcagagcctgatcgacgaggacgccgtgtgctgcatctgcatggacggcgagtgccagaacagcaacgtgatcctgttctgcgacatgtgcaacctggccgtgcaccaggagtgctacggcgtgccctacatccccgagggccagtggctgtgcagacactgcctgcagagcagagccagacccgccgactgcgtgctgtgccccaacaagggcggcgccttcaagaagaccgacgacgacagatggggccacgtggtgtgcgccctgtggatccccgaggtgggcttcgccaacaccgtgttcatcgagcccatcgacggcgtgagaaacatcccccccgccagatggaagctgacctgctacctgtgcaagcagaagggcgtgggcgcctgcatccagtgccacaaggccaactgctacaccgccttccacgtgacctgcgcccagaaggccggcctgtacatgaagatggagcccgtgaaggagctgaccggcggcggcaccaccttcagcgtgagaaagaccgcctactgcgacgtgcacaccccccccggctgcaccagaagacccctgaacatctacggcgacgtggagatgaagaacggcgtgtgcagaaaggagagcagcgtgaagaccgtgagaagcaccagcaaggtgagaaagaaggccaagaaggccaagaaggccctggccgagccctgcgccgtgctgcccaccgtgtgcgccccctacatccccccccagagactgaacagaatcgccaaccaggtggccatccagagaaagaagcagttcgtggagagagcccacagctactggctgctgaagagactgagcagaaacggcgcccccctgctgagaagactgcagagcagcctgcagagccagagaagcagccagcagagagagaacgacgaggagatgaaggccgccaaggagaagctgaagtactggcagagactgagacacgacctggagagagccagactgctgatcgagctgctgagaaagagagagaagctgaagagagagcaggtgaaggtggagcaggtggccatggagctgagactgacccccctgaccgtgctgctgagaagcgtgctggaccagctgcaggacaaggaccccgccagaatcttcgcccagcccgtgagcctgaaggaggtgcccgactacctggaccacatcaagcaccccatggacttcgccaccatgagaaagagactggaggcccagggctacaagaacctgcacgagttcgaggaggacttcgacctgatcatcgacaactgcatgaagtacaacgccagagacaccgtgttctacagagccgccgtgagactgagagaccagggcggcgtggtgctgagacaggccagaagagaggtggacagcatcggcctggaggaggccagcggcatgcacctgcccgagagacccgccgccgcccccagaagacccttcagctgggaggacgtggacagactgctggaccccgccaacagagcccacctgggcctggaggagcagctgagagagctgctggacatgctggacctgacctgcgccatgaagagcagcggcagcagaagcaagagagccaagctgctgaagaaggagatcgccctgctgagaaacaagctgagccagcagcacagccagcccctgcccaccggccccggcctggagggcttcgaggaggacggcgccgccctgggccccgaggccggcgaggaggtgctgcccagactggagaccctgctgcagcccagaaagagaagcagaagcacctgcggcgacagcgaggtggaggaggagagccccggcaagagactggacgccggcctgaccaacggcttcggcggcgccagaagcgagcaggagcccggcggcggcctgggcagaaaggccacccccagaagaagatgcgccagcgagagcagcatcagcagcagcaacagccccctgtgcgacagcagcttcaacgcccccaagtgcggcagaggcaagcccgccctggtgagaagacacaccctggaggacagaagcgagctgatcagctgcatcgagaacggcaactacgccaaggccgccagaatcgccgccgaggtgggccagagcagcatgtggatcagcaccgacgccgccgccagcgtgctggagcccctgaaggtggtgtgggccaagtgcagcggctaccccagctaccccgccctgatcatcgaccccaagatgcccagagtgcccggccaccacaacggcgtgaccatccccgccccccccctggacgtgctgaagatcggcgagcacatgcagaccaagagcgacgagaagctgttcctggtgctgttcttcgacaacaagagaagctggcagtggctgcccaagagcaagatggtgcccctgggcatcgacgagaccatcgacaagctgaagatgatggagggcagaaacagcagcatcagaaaggccgtgagaatcgccttcgacagagccatgaaccacctgagcagagtgcacggcgagcccaccagcgacctgagcgacatcgactag

SEQ ID NO: 116475 - DNA, 3177 bp, Artificial Sequence
  derived and/or modified sequence
atgagacgcaaggggcggtgccacaggggttcagctgcacggcaccccagctcaccctgcagcgttaaacattcaccaactcgtgagacgctgacctatgcccaggcacaacgtatggtcgagatcgaaatagagggtcgcttgcataggatctcgattttcgaccccctggagatcattctcgaagatgacctcacagcccaggaaatgtccgagtgcaattccaacaaggaaaattccgagcggccaccagtgtgcctgagaaccaagcgccacaagaacaatcgcgtgaagaagaaaaacgaggccctcccctccgcccacggtactcctgctagtgctagcgcattgcctgaaccgaaagttaggatcgtcgaatactctccccctagcgctccaaggagaccgcccgtgtactataagtttatcgagaagtccgctgaggaactcgataacgaagttgagtacgatatggatgaggaggactacgcatggctggagatcgtgaatgaaaaacgaaagggagactgtgtgcccgctgtgtcacagagcatgtttgaattcctgatggacaggtttgagaaggaaagccattgtgagaaccagaaacagggtgagcagcagtcccttattgatgaagacgccgtctgctgcatctgtatggacggggaatgtcagaactcaaatgttatcttattttgtgatatgtgtaatctggcagtccatcaggagtgctatggtgtgccatacattcctgaaggacagtggctgtgcaggcattgtctccaaagcagagctaggccagccgattgtgtgctgtgccctaataaaggcggggcttttaaaaaaaccgatgatgacaggtggggacacgttgtctgcgctttatggatccccgaagtgggctttgctaatactgtttttattgaacccattgacggcgtccgtaatatccctcctgccagatggaagctgacgtgttacctctgcaagcagaaaggcgtgggcgcatgcatacagtgccacaaagcaaactgctacacggcatttcacgtgacatgtgctcagaaggccgggctgtacatgaagatggaacccgtcaaggaacttaccggcggaggtactacattcagtgtgaggaaaacagcctattgcgacgttcatactccgcctggctgtacaagaaggcctctaaacatctacggcgacgttgaaatgaagaacggggtatgtagaaaggagtcaagtgtgaaaacagtgcgctcaacctctaaggtgagaaaaaaagccaagaaagcaaagaaggctctggctgagccttgcgccgtgttacccaccgtttgcgccccctatatcccaccacagcgtctgaacagaatcgcaaaccaggtggcgattcagcggaagaagcagtttgtcgaacgcgcccactcctattggctcttaaagcgccttagtcggaacggcgcacctctcctccgccgcttgcaaagttcgctgcagtctcaacggagcagtcaacaaagagagaatgatgaggaaatgaaagctgcaaaagagaaactgaagtactggcaacgcctgagacatgacttggaacgcgcacgtcttctgatcgagctcctgagaaagagggagaaactgaagcgggagcaagtcaaagtggaacaggtcgcaatggaactcagactgacccccctgacagtcctactgaggtcagtgctcgatcagctccaggacaaggaccctgcccgaatcttcgcacagccagtttccctgaaggaagtgccggattatcttgaccatatcaagcatccaatggacttcgctaccatgcggaagaggctggaggcgcagggctacaaaaatctccatgaatttgaggaagactttgacctcatcatagataactgcatgaagtacaacgcacgggacactgttttttacagggcggccgtgagactccgcgaccagggaggcgtggttcttcgacaggcaaggcgcgaggtcgatagtataggtctggaagaggcgtcgggcatgcacctgcccgagcgtccagcagccgcaccaaggaggccatttagctgggaggacgtggataggttacttgaccctgccaaccgggcccatcttggactcgaagagcaactgcgagaactgctagacatgctcgatcttacatgcgctatgaagagtagcggttcccgctctaagagggcaaagctcttgaaaaaggaaatcgctttgttacggaacaagctgagccagcagcatagtcagcctttgcccaccggacctggcctagagggattcgaagaggatggggcagcactgggacctgaggccggagaggaggtcttgcctagactcgagaccctgttgcaaccacgcaagcgctcgcgttcaacatgtggtgatagtgaagtggaggaggagtctccaggaaaacgattggatgctgggctgactaacggatttggcggggcaaggtccgaacaggagcctggaggtgggctgggcagaaaggccaccccgcgcaggcggtgcgctagcgaaagttcaattagctctagcaatagtcccctgtgtgattcttccttcaacgcacctaaatgcggccggggcaagccggccctggtgagaaggcataccctggaagataggtcagagcttatcagctgtatcgagaatgggaattatgccaaggcagcacggattgccgcagaagttgggcagtcaagtatgtggatttctaccgacgctgccgcctcagtgctggagccattgaaggttgtttgggcgaaatgcagtggctacccttcctatcccgccttgatcatcgatcctaagatgccacgtgtgccaggccaccacaacggtgtgacgattccagccccgcccttagatgtcttgaagatcggagaacacatgcagacaaagtccgacgaaaaactttttctggtgctgttctttgataataagagatcctggcagtggttacctaagtctaagatggtgcccctcggcattgacgaaacgatcgataagctgaagatgatggaaggacgcaattcatctattcgaaaagccgtgcgtattgcttttgatagggcgatgaaccacttatctcgggtgcacggcgagcctacaagtgatctaagtgatattgactag

SEQ ID NO: 116476 - DNA, 3177 bp, Artificial Sequence
  derived and/or modified sequence
atgcggcggaagggccggtgccaccggggcagcgccgcccggcacccatcgtctccgtgcagtgtgaagcacagtcccacccgggagactctgacgtatgcgcaggctcaacgaatggtggagattgagatcgaaggcagactgcatcgcatttcaatattcgatccattggagattattctggaggacgatctcacagcccaggaaatgtctgaatgcaactctaataaagagaacagcgaacgtcctcccgtgtgcttgcggaccaaacggcataagaacaatagggtcaagaaaaagaacgaagctttgccgtccgcccacggtactccagcaagcgcaagcgccctgcccgaacctaaggtaaggatcgtggaatattctccaccttcagcccccagacggccgcccgtctactacaaattcatcgagaagtccgcagaagagctggacaatgaggtggagtacgatatggatgaggaagactatgcctggctcgaaatcgtcaatgaaaagagaaagggagattgcgtacctgcggtctcccagtctatgtttgagtttctgatggacagatttgaaaaggagtcacactgcgagaaccagaagcagggcgagcagcaaagtctgattgacgaggacgcagtgtgctgcatctgcatggacggagagtgccaaaatagtaatgtaatcctgttttgtgacatgtgtaacctggctgtgcaccaggagtgctatggcgttccttacataccagaggggcaatggctttgtaggcactgtctacagtcccgggcacggcctgctgactgcgttctgtgtcctaataaaggcggggcattcaaaaagactgacgacgataggtgggggcatgtggtctgtgccctgtggattccagaggttggtttcgccaacacagtgttcattgaaccaatcgacggcgtgaggaatattcctccagccagatggaaactgacctgctacctttgtaaacagaagggggtgggcgcttgcattcagtgccacaaggccaactgttataccgccttccacgttacgtgtgcccagaaagcgggtctgtacatgaaaatggagcccgtcaaagagctcacaggcggaggtaccacgttttcagtgagaaaaacagcctactgtgacgtgcatacacctcccggatgtaccagacgccccctaaacatctatggggacgtcgaaatgaagaacggggtatgccgaaaggagtctagcgtaaagaccgtgaggtcaacttctaaagtgaggaaaaaagcgaagaaggcgaagaaagctctcgctgagccctgcgcggtcctacccaccgtgtgcgccccctatattccaccccagcgcctgaatagaatcgctaatcaggtggcaatacaacggaagaagcagttcgtggaaagagcacacagctactggctcctgaagaggctatctcgaaatggggcgcctttgctcaggcggttacagtcgagtctgcaaagtcagagaagtagccagcagcgcgaaaatgatgaagagatgaaagcggctaaagagaaactcaagtattggcagcggctgagacatgacctggagcgggcccgactgctgatcgagttgctgcggaaaagagaaaaactaaagcgagaacaggttaaggttgaacaagttgctatggaactgcggctgactcccctcaccgtcttgctgagaagcgtattagaccaactccaagataaagatcccgctcgcatcttcgcccagccagtaagcctcaaagaagtgccagattaccttgatcacattaaacacccaatggattttgctactatgaggaagcgcttggaagcgcaaggctataagaacctgcacgagtttgaggaggactttgacttgatcattgataattgtatgaagtataacgcacgcgacactgtcttctatagggccgctgttcgcctacgagaccagggaggcgtagtgctgcgacaggccaggagggaggtggacagcatcggactggaggaagctagtggtatgcacctccccgaacgccccgcagccgcccctcgtaggcctttcagttgggaggacgttgacagactcctagatcccgctaaccgggctcacctgggcttggaggaacagctaagggaactcttggatatgttagacctgacatgcgcgatgaaaagttccggatccaggtcaaaacgcgccaagctgctcaaaaaagagatcgcgctgctgcgcaacaagctgagccagcagcacagtcagccacttccaactggacccggtctggagggcttcgaggaggatggcgcagcactaggtccagaagccggcgaagaagtcctgccgcggctagagacgttgctgcagcccaggaagagaagtcggagcacctgtggggactcggaagtagaggaagagtccccagggaaacgcttggatgcgggcctgactaacggcttcgggggggcccggtccgaacaggagccgggaggcggcttgggccgaaaggccacgccaaggcgccggtgcgctagcgagagcagtattagctccagtaactccccgctgtgtgactcctcattcaatgcgcccaagtgtggaaggggtaagcctgctctcgtgagacggcataccctggaggacaggtctgaattgatttcttgcatcgagaacggtaattatgctaaggccgcccgtatcgcagctgaggtggggcagtcatccatgtggatcagcactgatgctgcggcaagcgttctcgaaccactcaaggtggtttgggctaagtgctcaggataccctagctatcccgctctgatcatcgatcctaagatgccgagggtgcctggccatcacaacggagtcactatccccgctcccccgctagatgtcttgaagatcggggaacatatgcagactaaaagcgacgagaagctgtttctcgtgttgttttttgacaacaaaagatcttggcaatggctaccaaagagtaagatggttccactcggcattgatgagaccatagacaagcttaaaatgatggagggcaggaactcctctattaggaaagccgtgcggatagccttcgacagagccatgaaccacctctcccgggtacacggagagcccacctccgatctgagcgacattgactag

SEQ ID NO: 116477 - DNA, 3177 bp, Artificial Sequence
  derived and/or modified sequence
atgaggcgaaagggccgttgtcatcgcggatcagctgctaggcaccccagctccccttgctcggtaaagcactcgccaacgagagaaactctgacttatgcccaagcacagcggatggtcgagatcgaaatcgagggtaggttgcatagaattagcatttttgacccactggaaataattttagaggatgatctgacagcacaagagatgagtgagtgtaacagtaacaaggagaatagcgaacgaccccctgtttgtctccgcaccaagcgtcataaaaacaaccgagtcaagaagaaaaacgaagctctgccatccgcgcacggcacccccgcttccgcttctgccctgccagaacctaaagtccgaatcgtcgagtattcccctccttcggctccaaggcggcctcccgtttactataagttcatcgaaaagagcgcagaggaacttgataacgaagtggagtatgacatggatgaagaggactacgcttggctcgaaattgtgaacgagaagagaaaaggtgactgcgtgcccgctgtgtcacagtctatgttcgaatttctgatggatcgattcgagaaggagtcccactgtgaaaaccagaaacagggcgagcagcaatcattaatcgacgaagatgctgtgtgttgtatctgcatggacggcgagtgtcaaaactccaacgttattcttttttgtgatatgtgtaatctcgccgttcaccaggagtgctacggggtgccctatatccccgaggggcagtggctgtgtaggcactgtctccagtctagagcacggcctgccgactgcgtcctttgtcctaataaaggaggggcattcaagaaaacggatgacgaccggtggggacacgttgtgtgtgccctgtggatccctgaggtgggatttgctaacaccgtgtttattgagccaattgatggggttaggaacatccctccagctaggtggaaactgacctgctacctctgtaaacagaaaggcgtgggggcatgtattcagtgtcataaagccaactgttacaccgcatttcacgtgacttgcgcacagaaagctggcttatatatgaaaatggaacctgtcaaagaactgactgggggaggcaccaccttttccgtcaggaaaaccgcttattgtgatgtccacacccctcctgggtgcactcgccgaccccttaatatttatggcgatgtggaaatgaaaaatggcgtgtgtcgcaaagaatcttcagtcaaaacagtccggagcacttcaaaggtgaggaagaaggctaagaaagccaagaaagctctggccgaaccttgcgcggtcctcccaacggtgtgtgcaccttacattcccccacaacggcttaatagaatagccaatcaagtagccatacaacgcaaaaagcaattcgttgaacgggctcatagctattggttgttgaagcgcctaagcaggaatggagcccctctcctcagaagactccagtcctcgcttcagtctcagcgatcctctcagcaaagggagaacgatgaagagatgaaggccgctaaggagaaacttaagtattggcagcggttgaggcatgatctggaaagagcacggctcctgatcgagctcctgcgtaaaagagaaaaactcaagcgggagcaagtgaaagttgaacaggtcgcaatggagcttcgattaacaccgctgacggtgttgctgcgctctgtgctggaccaacttcaagataaagaccctgcgagaattttcgcccagcccgtctccttaaaggaagtgccagattacttagatcatattaaacaccctatggacttcgcgaccatgcggaaacgtctcgaagctcaggggtataagaatctgcacgaattcgaggaggatttcgatctgatcatagacaactgcatgaagtacaatgctcgagacacagtgttttaccgagccgctgttagactccgggatcaagggggagtggtactgcggcaggccaggcgcgaagtggactccatcggcctcgaagaagcgtccggtatgcatcttccggaacgacccgctgcagccccacggcgacccttctcctgggaggatgtcgatagactgctcgatcccgcaaatcgagcccacctcggtcttgaagagcagcttcgcgaactgctggatatgctggatctaacgtgtgccatgaagagttccggtagtcggagcaaaagagctaagttactgaagaaggagattgctctgctgcgcaataagctgtcacaacagcacagtcagcctctccccaccggaccaggtttggaggggttcgaggaggacggcgcagcactgggcccagaggctggagaggaagttctgcctaggctggagactttgcttcagccacgcaaacgttcgcgttccacttgcggagactccgaggtagaagaagagagccctggcaaacgcctggacgccggactgacaaacgggtttggaggggctaggtccgagcaggaaccagggggaggactaggtcgaaaagctactccacgcaggcgttgtgcttctgagtccagtatttcatcgagcaacagccccctgtgtgacagctctttcaatgccccaaagtgtggccgtgggaagcctgctctggtgagacggcatactctcgaggaccgctcagagctaattagctgcatcgagaacgggaattacgcgaaagccgctagaatcgccgcagaagtcggacaaagctcaatgtggatctcgacagacgctgccgcttcggtccttgaaccactcaaggtggtctgggccaagtgcagcggatacccctcataccccgcactgattatcgatccgaaaatgccaagggtgccgggacatcataatggggtgaccattcctgccccaccgctggacgtgctgaagatcggtgagcacatgcagaccaaatctgatgagaaactgtttctggtgctcttctttgataacaagagaagttggcagtggctgcccaagtctaaaatggtcccactgggcattgatgagacaatcgataagttgaaaatgatggaaggccgtaacagttcaatcagaaaggccgtacggatcgcatttgaccgggctatgaatcatttgagtcgtgtccacggcgagccaacctctgacctgtccgacatcgattag

SEQ ID NO: 116478 - protein, 125 aa, Artificial Sequence
  derived and/or modified sequence
MERHTSHPNRKVPAKEEANAVPLCRAKPSPSYINLQASSPPATFLNIQTTKLPSVDHKPKECLGLLECMYANLQLQTQLAQQQMAVLEHLQASVTQLAPGRGSNNSSLPALSPNPLLNHLPQFSK

SEQ ID NO: 116479 - DNA, 438 bp, Artificial Sequence
  derived and/or modified sequence
tgaggctgtgagcagtaccggagggcaccacacctgttggtgttcagatggagcggcacactagtcatcctaacagaaaagttccagccaaagaggaagctaatgctgtgcctctctgtagagcaaaaccctcccccagctatattaatcttcaagcaagttccccaccagccacttttctgaacatccagacaacaaagctgccctcggttgatcacaagcccaaggaatgcctaggactcctggaatgtatgtatgcaaacctccagcttcagacccagctcgcccaacaacagatggctgttttggaacatttacaggcatctgtgacacaactggctcctgggaggggaagcaataactcttctctcccagccttatctcctaatccattgttaaatcacctgccccaattcagtaaatgaattgtggaacaaa

SEQ ID NO: 116480 - DNA, 491 bp, Artificial Sequence
  derived and/or modified sequence
agccttagcaacaggtggactagagaggcgggactccagccagcacatgggggaaagacctgccggcttggcgcagggcaccacacctgttggtgttcagatggagcggcacactagtcatcctaacagaaaagttccagccaaagaggaagctaatgctgtgcctctctgtagagcaaaaccctcccccagctatattaatcttcaagcaagttccccaccagccacttttctgaacatccagacaacaaagctgccctcggttgatcacaagcccaaggaatgcctaggactcctggaatgtatgtatgcaaacctccagcttcagacccagctcgcccaacaacagatggctgttttggaacatttacaggcatctgtgacacaactggctcctgggaggggaagcaataactcttctctcccagccttatctcctaatccattgttaaatcacctgccccaattcagtaaatgaattgtggaacaaa

SEQ ID NO: 116481 - DNA, 448 bp, Artificial Sequence
  derived and/or modified sequence
gtgctggggttgcggctttcggttaacaccgcaggcaccacacctgttggtgttcagatggagcggcacactagtcatcctaacagaaaagttccagccaaagaggaagctaatgctgtgcctctctgtagagcaaaaccctcccccagctatattaatcttcaagcaagttccccaccagccacttttctgaacatccagacaacaaagctgccctcggttgatcacaagcccaaggaatgcctaggactcctggaatgtatgtatgcaaacctccagcttcagacccagctcgcccaacaacagatggctgttttggaacatttacaggcatctgtgacacaactggctcctgggaggggaagcaataactcttctctcccagccttatctcctaatccattgttaaatcacctgccccaattcagtaaatgaattgtggaacaaa

SEQ ID NO: 116482 - DNA, 598 bp, Artificial Sequence
  derived and/or modified sequence
ggcagttggccagcacaccactacgcatgtgtgtcaactctagggttgggtgctggggttgcggctttcggttaacaccgcagattggaacaggctgagatctgctggagacaacttaggaaattatcatagtgaaaatactaacatggattgttgatcatctgatgctatgattctttcccaggcaccacacctgttggtgttcagatggagcggcacactagtcatcctaacagaaaagttccagccaaagaggaagctaatgctgtgcctctctgtagagcaaaaccctcccccagctatattaatcttcaagcaagttccccaccagccacttttctgaacatccagacaacaaagctgccctcggttgatcacaagcccaaggaatgcctaggactcctggaatgtatgtatgcaaacctccagcttcagacccagctcgcccaacaacagatggctgttttggaacatttacaggcatctgtgacacaactggctcctgggaggggaagcaataactcttctctcccagccttatctcctaatccattgttaaatcacctgccccaattcagtaaatgaattgtggaacaaa

SEQ ID NO: 116483 - DNA, 751 bp, Artificial Sequence
  derived and/or modified sequence
aggaggatcgcttgaacctgggaggcagaggttgcagtgaacagagatcgcgccactgcaacccagcctgggtgacagagcgagactttgtctcaaaatataaaaagaaaaaaaataagggatcttccaaaaggaaaaggtgaccagtcgagaaatctgggaaaacccaactggttagtgggaaagagtacaacgccggggacacggagggaacgattacatctaagatcagtgagattggaacaggctgagatctgctggagacaacttaggaaattatcatagtgaaaatactaacatggattgttgatcatctgatgctatgattctttcccaggcaccacacctgttggtgttcagatggagcggcacactagtcatcctaacagaaaagttccagccaaagaggaagctaatgctgtgcctctctgtagagcaaaaccctcccccagctatattaatcttcaagcaagttccccaccagccacttttctgaacatccagacaacaaagctgccctcggttgatcacaagcccaaggaatgcctaggactcctggaatgtatgtatgcaaacctccagcttcagacccagctcgcccaacaacagatggctgttttggaacatttacaggcatctgtgacacaactggctcctgggaggggaagcaataactcttctctcccagccttatctcctaatccattgttaaatcacctgccccaattcagtaaatgaattgtggaacaaa

SEQ ID NO: 116484 - protein, 1424 aa, Artificial Sequence
  derived and/or modified sequence
MGMGRMEMELDYAEDATERRRVLEVEKEDTEELRQKYKDYVDKEKAIAKALEDLRANFYCELCDKQYQKHQEFDNHINSYDHAHKQRLKDLKQREFARNVSSRSRKDEKKQEKALRRLHELAEQRKQAECAPGSGPMFKPTTVAVDEEGGEDDKDESATNSGTGATASCGLGSEFSTDKGGPFTAVQITNTTGLAQAPGLASQGISFGIKNNLGTPLQKLGVSFSFAKKAPVKLESIASVFKDHAEEGTSEDGTKPDEKSSDQGLQKVGDSDGSSNLDGKKEDEDPQDGGSLASTLSKLKRMKREEGAGATEPEYYHYIPPAHCKVKPNFPFLLFMRASEQMDGDNTTHPKNAPESKKGSSPKPKSCIKAAASQGAEKTVSEVSEQPKETSMTEPSEPGSKAEAKKALGGDVSDQSLESHSQKVSETQMCESNSSKETSLATPAGKESQEGPKHPTGPFFPVLSKDESTALQWPSELLIFTKAEPSISYSCNPLYFDFKLSRNKDARTKGTEKPKDIGSSSKDHLQGLDPGEPNKSKEVGGEKIVRSSGGRMDAPASGSACSGLNKQEPGGSHGSETEDTGRSLPSKKERSGKSHRHKKKKKHKKSSKHKRKHKADTEEKSSKAESGEKSKKRKKRKRKKNKSSAPADSERGPKPEPPGSGSPAPPRRRRRAQDDSQRRSLPAEEGSSGKKDEGGGGSSSQDHGGRKHKGELPPSSCQRRAGTKRSSRSSHRSQPSSGDEDSDDASSHRLHQKSPSQYSEEEEEEDSGSEHSRSRSRSGRRHSSHRSSRRSYSSSSDASSDQSCYSRQRSYSDDSYSDYSDRSRRHSKRSHDSDDSDYASSKHRSKRHKYSSSDDDYSLSCSQSRSRSRSHTRERSRSRGRSRSSSCSRSRSKRRSRSTTAHSWQRSRSYSRDRSRSTRSPSQRSGSRKRSWGHESPEERHSGRRDFIRSKIYRSQSPHYFRSGRGEGPGKKDDGRGDDSKATGPPSQNSNIGTGRGSEGDCSPEDKNSVTAKLLLEKIQSRKVERKPSVSEEVQATPNKAGPKLKDPPQGYFGPKLPPSLGNKPVLPLIGKLPATRKPNKKCEESGLERGEEQEQSETEEGPPGSSDALFGHQFPSEETTGPLLDPPPEESKSGEATADHPVAPLGTPAHSDCYPGDPTISHNYLPDPSDGDTLESLDSSSQPGPVESSLLPIAPDLEHFPSYAPPSGDPSIESTDGAEDASLAPLESQPITFTPEEMEKYSKLQQAAQQHIQQQLLAKQVKAFPASAALAPATPALQPIHIQQPATASATSITTVQHAILQHHAAAAAAAIGIHPHPHPQPLAQVHHIPQPHLTPISLSHLTHSIIPGHPATFLASHPIHIIPASAIHPGPFTFHPVPHAALYPTLLAPRPAAAAATALHLHPLLHPIFSGQDLQHPPSHGT

SEQ ID NO: 116485 - DNA, 171 bp, Artificial Sequence
  derived and/or modified sequence
atgatttattacagcaactactacggcggatacgggtacggtggactgggctgcgggtacggttgcggttatcgcggatatggatgcggctacggcggatatgggggttacggcaacggctactactgcccatcttgctatggtaggtactggagttacggattctactag

SEQ ID NO: 116486 - DNA, 4275 bp, Artificial Sequence
  derived and/or modified sequence
atgggaatgggccggatggagatggaactcgattacgcagaagatgcgaccgagcgtagacgcgtcctggaggttgaaaaggaagatactgaggaactgcgacaaaaatacaaagattatgtggataaggaaaaggcaattgcgaaagctttagaggatctgcgtgctaatttttactgcgaactttgtgacaagcagtaccagaagcatcaagagtttgataaccatataaactcttatgatcacgctcacaagcaacgcttaaaggatttgaagcagcgagagttcgcgcgcaacgtatcaagccgaagtcgtaaggatgagaaaaaacaggagaaggccctgagacgcttgcacgagcttgccgaacaaaggaagcaagccgaatgcgcccctgggtcagggccgatgttcaagccgaccaccgtggctgtcgatgaagaaggcggcgaagatgacaaggacgagtccgctaccaacagcggcaccggcgcgaccgctagctgcggcctcggttccgagttttcgacagacaaaggcggcccttttacagcagtgcagataacgaatacaactggactcgcccaggcgcccgggttggcctcccaggggatctccttcgggattaagaataatttaggaaccccgctccaaaaactcggagtatccttttcttttgcgaagaaagctcctgtcaagctggagagcatcgcctctgtcttcaaagatcatgctgaagagggaacgagcgaagacggtacgaaaccagatgaaaaatccagcgaccagggattgcagaaggttggagactccgacgggtcatctaacctggatggcaagaaagaggatgaggatccccaagacgggggctcactggccagcacgcttagtaagctcaagcgaatgaagagggaggagggggctggggcgacagagccggaatactaccattatattcctcccgcccactgcaaagtcaagccaaacttcccattcctactgtttatgagggcgtctgagcagatggatggcgataatacaacccatcccaaaaatgcccccgaatcaaaaaagggcagctcacctaagccaaaatcctgcatcaaggcagcagctagtcagggcgcagagaaaacagtttccgaagtgagcgaacagcccaaagaaacatccatgacagagccgtctgagccagggtccaaggcggaggctaagaaggcactggggggtgacgtctcagatcaatccctggaaagtcactcacaaaaagtgtcagagacacagatgtgcgagagcaactccagcaaggagacttccctggccaccccagccggcaaggagagccaggagggccccaaacacccgacgggcccattctttcccgtgctgagtaaggacgagtcaaccgctcttcaatggccctctgagctgcttatcttcaccaaagctgagcccagcatttcatactcatgtaatcccctctattttgatttcaaactcagtagaaacaaagacgctcggacgaagggcaccgagaagcctaaagacatcggatcatcatccaaagaccacctgcaggggctcgacccaggagagcccaacaagagcaaggaggtgggtggagagaagattgtcagatcgtctggaggccgaatggacgccccggcttcaggcagcgcatgttctgggttgaacaagcaagagccaggcgggagccacgggtccgaaacggaggacaccggtcgtagcctgcctagcaagaaggagaggtcaggtaaatctcacaggcataaaaagaagaagaagcataagaaaagcagtaaacataaaagaaagcacaaggccgataccgaggagaaatccagcaaagcggaaagcggagagaagtccaagaaaagaaagaagaggaaacggaagaagaacaagagttctgctccggccgatagcgaacgcggccctaagcccgagccgcccggatccgggtccccagccccacccaggagaaggaggagagcccaagatgattcacagaggcgttccctgccggcggaagaggggtcatctggcaagaaagatgagggcgggggcggtagcagcagccaagaccacgggggccgaaaacataagggcgaactcccaccctccagctgccagcgcagagctgggaccaaacgttcctccaggtcaagtcaccgctctcaaccaagctctggcgatgaagacagcgatgatgccagctcccatcgcttgcatcagaagtctccctcccagtattccgaggaagaagaagaagaggactctggcagtgagcacagcagaagtcggagcagatccggccgccggcactcatcccatagaagctcacgtaggtcctattcttcgagctccgacgcgtcgtcggaccagagttgttatagtcgccagagaagttactcagacgacagttactcagattacagcgaccggagccgtcgacattccaaacgctctcacgattcagacgatagtgattacgcctcctccaaacaccgcagcaagagacacaaatattcgtcatctgatgatgattattccttaagttgcagccagagtaggtctaggagcagatcacataccagagagcggagtcgtagtcgtggacggtcgagaagcagttcatgttccaggtcgaggtctaagcgccggtctagatctactactgcgcactcctggcaaagaagcaggagctattctcgtgaccggtcgagatccacacgttcaccctctcagaggtccgggtctaggaaacgttcatggggacacgagtcaccggaggagcggcactcaggccggagggatttcatccgctctaagatttaccgaagccagtcaccacactactttcggtcaggacggggcgagggaccaggcaagaaggacgacgggcggggagatgacagcaaggcaaccggacccccatctcagaacagtaacattggcactgggaggggttccgaaggggactgctcgccagaggacaaaaattccgtcaccgcgaagctgctgttggaaaagatccagtcccgaaaggtggaaaggaagccatctgtgagcgaggaagtgcaggccacgccaaataaagccggccccaaactgaaagatcccccacagggttactttgggcccaagctgcccccctcgctcggtaacaagccagtcctccctctgataggaaagttgcccgctactcgcaagccaaataaaaagtgtgaggagtccggcctagagcgcggggaggagcaggagcaatccgagactgaggaggggcctccgggttcctccgacgcattgtttggacatcagttcccctcggaggagaccacgggccccctgttggatcccccccctgaggaaagcaagagcggagaggccactgctgatcatcccgtggcccctctgggtacgccggctcattccgattgttaccccggtgaccctacaattagccataactatttaccagatccaagtgatggagacacactggaatctttagactcatcctctcagcctggcccggtggagtcctcactgttgccaattgcccccgacctggagcacttccccagttacgctccaccatccggggacccctcaattgaatccaccgatggggccgaggacgccagccttgccccacttgagagccagcccattacgtttactcccgaggaaatggaaaaatatagtaaattacagcaggctgctcagcaacatattcagcagcagcttctggccaagcaagtcaaagcattcccagctagtgcggcactggccccggccactcccgccctgcagcccattcacatccagcaacccgcaacagcctcagccacctccatcactacggtgcagcatgcgatacttcagcatcatgcggccgccgccgccgctgctattggtatccacccccacccccatccccagcccctggcgcaggtgcaccatattcctcaacctcacttgaccccaatttccttgtctcatttgactcactcaataatccccggccacccagccactttccttgccagtcacccgatccatatcatcccggcctctgcgattcaccccgggccatttacattccaccctgtcccccacgctgctttatatccaactcttttggccccccgacctgccgcggccgccgctacggccctgcacttacatccccttctgcatcccatcttctccggtcaggacctacaacacccccccagccatggcacatag

SEQ ID NO: 116487 - DNA, 4275 bp, Artificial Sequence
  derived and/or modified sequence
atgggcatgggccgcatggagatggagctggactatgcagaagatgccacagaaagaagaagagtgctggaggtggagaaggaggacacagaggagctgcggcagaagtacaaggactatgtggacaaggagaaggccatcgccaaggccctggaggacctgcgggccaacttctactgtgagctgtgtgacaagcagtaccagaagcaccaggagtttgacaaccacatcaacagctatgaccacgcccacaagcagaggctgaaggacctgaagcagcgggagtttgccagaaatgtgagcagccgcagcaggaaggatgagaagaagcaggagaaggccctgcggcggctgcacgagctggccgagcagaggaagcaggctgaatgtgcccctggcagcggccccatgttcaagcccaccaccgtggccgtggatgaggagggcggagaagatgacaaggatgaaagtgccaccaacagcggcactggagccacagccagctgtggcctgggcagcgagttcagcacagacaagggcggccccttcaccgctgtgcagatcaccaacaccaccggcctggcccaggcccctggcctggccagccagggcatcagctttggcatcaagaacaacctgggcacccccctgcagaagctgggcgtgtccttctcctttgccaagaaggcccctgtgaagctggagagcatcgcctctgtgttcaaggaccatgctgaggagggcaccagtgaagatggcaccaagccagatgagaagagcagtgaccagggcctgcagaaggtgggggacagtgatggcagcagcaacctggatggcaagaaggaggatgaggacccccaggacggcggcagcctggccagcaccctgagcaagctgaagaggatgaagcgggaggagggcgctggggccacagagcctgagtactaccactacatccccccagcccactgcaaggtgaagcccaacttccccttcctgctcttcatgagggccagcgagcagatggatggagacaacaccacccaccccaagaatgcccctgagagcaagaagggcagcagccccaagcccaagagctgcatcaaggctgctgccagccagggcgctgagaagacagtgtctgaggtgtctgagcagcccaaggagacctccatgacagagcccagcgagcccggcagcaaggccgaggccaagaaggccctgggcggagatgtgtctgaccagagcctggagagccacagccagaaggtgtctgagacccagatgtgtgagagcaacagcagcaaggagaccagcctggccaccccagctgggaaggagagccaggagggccccaagcaccccaccggccccttcttccctgtgctgagcaaggatgagagcacagccctgcagtggcccagcgagctgctgatcttcaccaaggccgagcccagcatctcctacagctgcaaccccctgtactttgacttcaagctgagcaggaacaaggatgcccggaccaagggcacagagaagcccaaggacatcggcagcagcagcaaggaccacctgcagggcctggaccccggggagcccaacaagagcaaggaggtgggcggggagaagatcgtgcgcagcagcggcggccgcatggatgccccagccagcggcagcgcctgcagcggcctgaacaagcaggagcccggcggcagccacggcagcgagacagaggacaccggccgcagcctgcccagcaagaaggagaggtctgggaagagccaccgccacaagaagaagaagaagcacaagaagagcagcaagcacaagaggaagcacaaggctgacacagaggagaagagcagcaaggccgagagcggggagaagagcaagaagaggaagaagaggaagaggaagaagaacaagagcagcgccccagctgacagcgagcggggccccaagccagagcccccaggcagcggcagccctgcccccccaagaagaagaagaagagcccaggatgacagccagaggaggagcctgcctgctgaggagggcagcagcggcaagaaggatgagggcggcggcggcagcagcagccaggaccatggaggcaggaagcacaagggggagctgccccccagcagctgccagaggagagctggcaccaagaggagcagccgcagcagccacaggagccagcccagcagtggagatgaggacagtgatgatgccagcagccaccggctgcaccagaagagccccagccagtacagcgaggaggaggaggaggaggacagcggcagcgagcacagccgcagccgcagccgcagcggccgccgccacagcagccacaggagcagcagaagaagctacagcagcagcagtgatgccagcagtgaccagagctgctacagccggcagaggagctacagtgatgacagctacagcgactacagcgacaggagccgccgccacagcaagaggagccatgacagtgatgacagcgactatgccagcagcaagcacaggagcaagaggcacaagtacagcagcagtgatgatgactacagcctgagctgcagccagagccgcagccgcagccgcagccacacccgggagaggagccgcagccggggccgcagccgcagcagcagctgcagccgcagccgcagcaagaggaggagccgcagcaccacagcccacagctggcagaggagccgcagctacagccgggacaggagccgcagcaccaggagccccagccagaggagcggcagcaggaagaggtcctggggccacgagagccctgaggagcggcacagcggccggcgggacttcatccgcagcaagatctaccgcagccagagcccccactacttccgcagcggccgcggggagggccctgggaagaaggatgatggaagaggagatgacagcaaggccactggaccacccagccagaacagcaacatcggcaccggccggggcagcgagggggactgcagccctgaggacaagaacagcgtgacagccaagctgctgctggagaagatccagagcaggaaggtggagaggaagcccagcgtgtctgaggaggtgcaggccacccccaacaaggccggccccaagctgaaggaccccccccagggctacttcggccccaagctgccccccagcctgggcaacaagcctgtgctgcccctcatcggcaagctgcctgccaccaggaagcccaacaagaagtgtgaggagagcggcctggagcggggggaggagcaggagcagagcgagacagaggagggccccccaggcagcagtgatgccctgtttggccaccagttccccagcgaggagaccaccggccccctgctggaccccccacctgaggagagcaagagcggggaggccacagctgaccaccctgtggcccccctgggcaccccagcccacagcgactgctacccaggggaccccaccatcagccacaactacctgcctgaccccagtgatggagacaccctggagagcctggacagcagcagccagcccggccctgtggagagcagcctgctgcccatcgccccagacctggagcacttccccagctatgccccacccagcggggaccccagcattgagagcacagatggagcagaagatgccagcctggcccccctggagagccagcccatcaccttcaccccagaggagatggagaagtacagcaagctgcagcaggccgcccagcagcacatccagcagcagctgctggccaagcaggtgaaggccttccctgccagcgctgccctggccccagccaccccagccctgcagcccatccacatccagcagcctgccacagccagcgccaccagcatcaccaccgtgcagcacgccatcctgcagcaccacgccgctgctgctgctgctgccatcggcatccacccccacccccacccccagcccctggcccaggtgcaccacatcccccagccccacctgacccccatcagcctgagccacctgacccacagcatcatccctggccacccagccaccttcctggccagccaccccatccacatcatcccagccagcgccatccaccctggccccttcaccttccaccctgtgccccacgccgccctgtaccccaccctgctggcccccaggcctgctgctgctgctgccacagccctgcacctgcaccccctgctgcaccccatcttcagcggccaggacctgcagcacccccccagccacggcacctag

SEQ ID NO: 116488 - DNA, 4275 bp, Artificial Sequence
  derived and/or modified sequence
atgggcatgggccggatggagatggagctggactacgccgaggacgccacggagcggcgtagagtgttggaggtcgagaaggaggacacagaagagctgaggcagaagtataaggattatgttgacaaggagaaagctatcgccaaggcacttgaggatctccgggccaacttttattgcgagctatgcgacaagcagtaccagaagcaccaggagttcgacaatcacatcaatagttacgaccatgcacacaagcagcggctcaaagacctgaaacaaagggagttcgcgcgaaacgtctcgtctcggagtcgcaaagatgaaaaaaaacaggagaaggccctcaggcggctgcacgagctagcagagcagcggaaacaggccgaatgtgccccaggcagcggtcccatgtttaagcctacaactgtggcagtggacgaggagggtggcgaagacgataaggacgagtctgctacaaactctggcacaggggcaacagcctcctgtggtcttgggagcgagttcagcactgacaagggcggacccttcaccgctgttcagattactaacaccacagggttagctcaggcccccggactggcaagtcaaggaatctccttcggcatcaagaacaatcttggaacgccgctgcaaaagcttggagtctcctttagcttcgccaagaaggctccagtgaagctagaaagcatcgcctcggtatttaaggaccacgccgaagaggggacgagcgaggatgggacaaaacccgatgaaaagtcctccgatcagggtctgcagaaggtaggagattctgacggatctagcaacctggacgggaagaaggaggacgaagacccacaagacggtggatcgctggcaagcactctgtctaagctgaaacggatgaaaagggaagagggtgccggagcaacagaacccgagtactaccattacattccaccggcccattgtaaggtcaaacctaacttcccatttttgttgtttatgagagcctctgagcagatggacggcgataatacgacgcacccaaaaaacgcaccggagtctaaaaaaggtagctccccgaagcctaagagttgtatcaaggccgctgctagtcaaggggctgaaaaaaccgtgagtgaagtctcagagcagcctaaagaaacgagtatgactgaaccctccgagccaggttccaaggctgaggccaaaaaagccctcggcggtgacgtcagcgaccagtccctcgagtctcactcacagaaagtatcggaaacgcagatgtgtgaatctaatagttctaaagaaacttctcttgccacaccagccgggaaggagtctcaggaaggtcccaagcatccaaccggaccattctttcctgtgctctccaaggatgaatctaccgccttacaatggccgagcgaattgctgatttttacaaaggcagagccgtccatttcctatagctgtaacccgctgtacttcgacttcaagttgtcccggaacaaggacgcacgcaccaagggcacagagaaacctaaggacattggctcatcgtcaaaggaccatctgcagggccttgatcccggggaaccgaacaagagcaaggaagttggcggggaaaaaattgtaaggagttccggcggtagaatggacgcaccggcatccggcagcgcctgctccggactcaataaacaagagcctggtggttcccacgggagtgagactgaagataccggaagaagtctgccttccaagaaagagcgctccggaaagtcgcatagacacaaaaagaagaagaagcacaaaaagtcgagcaaacacaaacgcaaacacaaagccgacacggaggagaaatcaagcaaagctgagtcaggcgagaaaagcaagaaacggaaaaagaggaagaggaagaagaataagagtagcgcacccgcggattcggagcgcggacccaagcctgagcctccaggctccggcagccctgccccccctagaaggcgaaggcgcgcccaagatgacagtcagcgacggtccttaccagcagaagaggggagtagcgggaaaaaggacgaagggggcggcggttcaagttctcaggatcatggaggacggaagcataagggagagcttcctccttcaagctgccaacgaagggcaggcaccaagcgcagcagtcggagcagccaccgaagccagccttcatcaggcgacgaggactcagatgacgcctcaagtcataggctccaccagaagtcccctagccagtattccgaggaagaggaggaggaagattctggctccgaacatagcagaagccgctctcggtctgggaggagacatagtagtcaccgtagcagtcgcaggtcctatagttcatctagcgatgccagcagtgatcagagctgctattctcggcagagatcctacagcgatgactcctactcagactacagcgaccggtcgaggcggcactccaagaggagtcatgattcggatgactccgattatgcatcctctaaacaccgaagtaaaagacacaagtattccagtagcgacgatgattactccctgagctgctcacagagccggagtcgctcgagaagccatacccgggaacgtagtagatcccggggcaggtcccggtcatcttcttgcagcagaagccgcagcaaacgacggagcaggtccaccactgcgcactcttggcagcgaagcaggagttatagtagggacagaagccgctccacacggtctccatcccagaggtcgggttcccggaagcgttcttgggggcacgagtcccctgaggagagacattccggtcggcgcgactttatcagaagcaaaatctaccggagtcagtcaccacactactttaggtccggccgcggggaaggaccaggaaaaaaggacgatgggcggggcgacgattcgaaagctacaggacccccctcacaaaatagtaacattgggacaggtcgtggatcagaaggagactgtagccccgaagataagaactcggtgaccgcgaagctccttctagagaagatccagagcaggaaagttgagagaaaaccatccgtgtctgaggaagtgcaggcaaccccaaataaagccggtcccaagctaaaagacccccctcaggggtacttcgggcccaagctcccaccgagccttggcaacaagcctgtacttcctctaataggaaagctcccagctaccaggaagccaaacaagaaatgcgaggaatctgggctcgagagaggagaggaacaggaacagtccgaaactgaggaagggccccccggttcatccgatgccctcttcgggcaccaattccctagtgaggagacgacaggccccctactggatccccctcctgaggagtccaaatctggagaggctactgccgaccaccccgtcgccccgctgggaacccctgcgcattcagattgctatcctggcgaccccacaatctcccataattatctgccagacccatcagacggcgacacgttagaatccctcgattcatcctctcaacctggcccagtggaatccagcctgctcccgatagcacccgacctggagcactttccttcctacgccccaccctctggagaccctagcattgaatcaacagacggggcagaggacgctagcctggcaccgctcgaatctcagcctattacattcacaccagaagaaatggagaagtactccaagctgcagcaggcagcacagcaacacatccagcagcagctactggccaaacaggtgaaggcctttccggcctctgccgcactcgcaccagcaaccccagcactgcagcccatccacatccagcagcccgccactgcgtccgcaacaagcatcaccacggtgcagcatgctatccttcagcatcatgcggcagctgcagctgctgccatcgggatccacccacacccccacccccagccactggcacaagtgcaccatataccacagcctcatttaacgccaatcagcttgagccatctgactcatagcataattccaggacacccagccaccttcctcgccagccatccaatccatatcatcccggcttcagcaatccatcctggtccatttacttttcatccagtgccccatgctgccctatacccaaccctgttagctccaagacccgctgctgctgctgctactgcgctccacctccacccactgcttcaccctattttctctggccaggacctccagcacccaccttcacatggtacctag

SEQ ID NO: 116489 - DNA, 4275 bp, Artificial Sequence
  derived and/or modified sequence
atggggatgggacgaatggagatggagctggattacgctgaggatgcaactgagcgtaggagggttctggaagtggagaaggaagatactgaggagttgcggcaaaagtataaagactacgtggacaaagagaaagcaattgctaaagcacttgaagacttgcgcgcaaacttttactgtgagctatgcgacaaacagtaccaaaaacatcaagagtttgataaccacatcaattcctatgatcacgctcacaagcagcggcttaaagatctcaaacagcgagagtttgctagaaacgtgagcagcaggagtagaaaagatgaaaaaaagcaggaaaaagctttaaggaggctgcatgagctggccgaacagagaaagcaggcagaatgcgcccctggttctggtcccatgttcaaacctacaaccgtcgcggtagacgaggaaggtggcgaggacgacaaagatgagtcggccacaaattctggcactggtgcgaccgcctcatgtggcttgggcagtgaattttcgactgacaagggaggtcccttcactgcagtgcagatcaccaacaccacgggtctggcacaagcgcctgggctcgccagtcagggtataagttttggcattaaaaacaatctggggacaccgctccagaagttgggcgtgagttttagctttgccaagaaggcccctgttaagcttgagtccatcgcttcagtgttcaaagaccacgccgaggagggcacaagtgaagatggcacgaaaccggacgagaaatccagcgatcagggcctgcagaaagttggtgactccgatggctcttcaaacttggacggtaagaaagaggacgaggatccccaggacggagggtcccttgcgtctaccctatctaagctgaagagaatgaagcgagaggagggagcgggtgccaccgagccagaatactaccattatatccctccagcgcattgcaaagttaagccgaatttcccctttttactgttcatgagagcgtctgaacagatggacggggataatactacacaccctaaaaacgcccctgagtctaaaaagggcagcagtcctaaaccgaagagctgtatcaaggccgctgcatctcagggcgcagagaagaccgtatcagaggtgagcgagcagccgaaggaaacctccatgactgaacctagtgagcctggaagtaaggcagaagccaagaaagcactgggtggagacgtgtctgatcaaagcttggagtcacattcacagaaagtgagtgagacccagatgtgcgagtcaaacagctccaaggaaacttctctagcaactccagccggtaaggaaagccaggagggcccaaaacatcccacgggcccattcttccctgtgctgtcaaaagacgagtcgaccgcgttgcagtggccctctgaactcttgatctttaccaaagccgagccaagcatttcttattcatgtaatcctttgtatttcgactttaagctgagccgcaacaaggatgcccgtacaaaggggaccgagaagcctaaagatatcgggagcagttcgaaagaccatcttcaagggcttgaccccggtgaaccaaacaagagcaaggaagtgggcggagaaaaaatcgtgcgcagtagcggtggcagaatggacgccccagcttctggcagcgcatgctctggcctcaataagcaggagcctggcggaagccatggcagcgagaccgaggacacaggaaggtccctcccatccaagaaagaaaggtccggcaaatcgcacagacataagaagaagaaaaagcacaagaagagctccaaacacaagagaaaacataaagctgataccgaggaaaagagctctaaagcggagtctggagaaaaatctaagaaaaggaagaaaagaaaacggaagaaaaataagagctcagccccagccgatagcgagcgcggacctaaaccggaacctcccggttccgggagcccagctccacctaggagaagaagaagggcgcaggatgacagccagcggagaagcttgccggctgaagagggaagcagtggaaagaaggacgagggcggtggtggctcttccagccaggatcacggaggcaggaaacataaaggagagcttcccccatcttcatgccagagacgggctggaactaaaagatcaagccgctcatcccaccgctctcaaccaagtagcggcgacgaagacagcgacgatgcgtcctcccacagactgcaccagaagagtccaagccaatacagcgaggaagaagaggaagaggattctgggtccgagcactccaggagcagatcccgctctggccgacggcactcttcccatagaagtagccgcagatcttactcatcaagttcggacgcctcttctgatcaatcctgctattctagacaacgcagttatagcgacgacagctattccgattacagcgatagatcccgcagacattcgaagcgcagccacgacagtgacgattctgactacgcatcttccaaacatagatctaagcgtcataagtactccagttcagatgatgactactccctcagttgttctcagagtcgtagcaggagccgctcgcatacaagggagcggagccgttctcgcggacggagccggtcctcttcatgctccagatctcgctcgaaacggaggtctagatccaccactgctcactcctggcagcgcagccgctcttacagtagagacaggtcacgctcgacccgttctccaagccaaaggagcggctctagaaagcgcagctggggacatgagagccccgaagaaaggcatagcggtcgaagggacttcatcagatccaagatttacaggtcccaaagcccccactattttaggagtgggaggggggaggggcctggcaaaaaagacgatgggaggggagatgatagcaaggcaacaggccctcccagccagaactctaacattggaaccgggaggggatccgaaggagactgttcaccagaggacaagaactcagtcactgcaaagttgttgctcgagaagatccagagtcgaaaagtggaaaggaagcccagcgtgtctgaggaagtccaggcaaccccaaacaaagcagggccaaagctcaaggatccaccccagggatactttgggccaaagctcccgccatcccttgggaacaagcctgttctgccactcattggcaaactccccgctactagaaagcccaacaagaagtgcgaagagtctgggctcgaacgcggagaagagcaagagcagagcgagactgaagaaggcccacctggctcaagcgatgccctgttcggacatcaattcccgtccgaggagactaccggccctcttctcgaccccccacccgaagagtccaagtctggagaagccacagccgaccatcccgtcgctcctctgggcacgcccgcacacagtgattgctacccgggagaccctaccatctctcacaactacctaccagacccgagcgatggtgacacacttgagtcactggacagctcatcacagccaggcccagttgagagctcacttcttccaatcgcacccgatttggagcacttccctagttacgccccacctagtggggacccaagcatagaaagtacggacggcgcagaagatgcctcacttgcgccacttgagtctcagcccattaccttcacccctgaagagatggagaagtactcaaagctgcagcaggccgctcagcagcacattcagcagcagctcctggccaaacaggtgaaggcattccctgcctcagctgcactggccccagctacacccgctctgcagccaatccacatccagcagcccgcaacagctagcgctacaagcatcactacagtgcagcacgctatcctccagcatcacgcggcagccgcagccgctgcaattggaatccaccctcacccacatccacagccccttgcccaggtgcaccatatcccccagccacatctgactccaatttccctgtcacatctgacccacagcatcatccccggtcaccctgctaccttccttgcctcccacccgatccatattatcccagcctcggcaatccatcccggacccttcacattccatcccgtccctcacgccgcactttaccccacccttctggcaccgaggccagctgccgctgctgctactgctcttcacttacacccgctgctgcatcccattttctcaggtcaggatctgcaacatcccccttctcacggtacgtag

SEQ ID NO: 116490 - DNA, 4275 bp, Artificial Sequence
  derived and/or modified sequence
atgggcatgggcagaatggagatggagctggactacgccgaggacgccaccgagagaagaagagtgctggaggtggagaaggaggacaccgaggagctgagacagaagtacaaggactacgtggacaaggagaaggccatcgccaaggccctggaggacctgagagccaacttctactgcgagctgtgcgacaagcagtaccagaagcaccaggagttcgacaaccacatcaacagctacgaccacgcccacaagcagagactgaaggacctgaagcagagagagttcgccagaaacgtgagcagcagaagcagaaaggacgagaagaagcaggagaaggccctgagaagactgcacgagctggccgagcagagaaagcaggccgagtgcgcccccggcagcggccccatgttcaagcccaccaccgtggccgtggacgaggagggcggcgaggacgacaaggacgagagcgccaccaacagcggcaccggcgccaccgccagctgcggcctgggcagcgagttcagcaccgacaagggcggccccttcaccgccgtgcagatcaccaacaccaccggcctggcccaggcccccggcctggccagccagggcatcagcttcggcatcaagaacaacctgggcacccccctgcagaagctgggcgtgagcttcagcttcgccaagaaggcccccgtgaagctggagagcatcgccagcgtgttcaaggaccacgccgaggagggcaccagcgaggacggcaccaagcccgacgagaagagcagcgaccagggcctgcagaaggtgggcgacagcgacggcagcagcaacctggacggcaagaaggaggacgaggacccccaggacggcggcagcctggccagcaccctgagcaagctgaagagaatgaagagagaggagggcgccggcgccaccgagcccgagtactaccactacatcccccccgcccactgcaaggtgaagcccaacttccccttcctgctgttcatgagagccagcgagcagatggacggcgacaacaccacccaccccaagaacgcccccgagagcaagaagggcagcagccccaagcccaagagctgcatcaaggccgccgccagccagggcgccgagaagaccgtgagcgaggtgagcgagcagcccaaggagaccagcatgaccgagcccagcgagcccggcagcaaggccgaggccaagaaggccctgggcggcgacgtgagcgaccagagcctggagagccacagccagaaggtgagcgagacccagatgtgcgagagcaacagcagcaaggagaccagcctggccacccccgccggcaaggagagccaggagggccccaagcaccccaccggccccttcttccccgtgctgagcaaggacgagagcaccgccctgcagtggcccagcgagctgctgatcttcaccaaggccgagcccagcatcagctacagctgcaaccccctgtacttcgacttcaagctgagcagaaacaaggacgccagaaccaagggcaccgagaagcccaaggacatcggcagcagcagcaaggaccacctgcagggcctggaccccggcgagcccaacaagagcaaggaggtgggcggcgagaagatcgtgagaagcagcggcggcagaatggacgcccccgccagcggcagcgcctgcagcggcctgaacaagcaggagcccggcggcagccacggcagcgagaccgaggacaccggcagaagcctgcccagcaagaaggagagaagcggcaagagccacagacacaagaagaagaagaagcacaagaagagcagcaagcacaagagaaagcacaaggccgacaccgaggagaagagcagcaaggccgagagcggcgagaagagcaagaagagaaagaagagaaagagaaagaagaacaagagcagcgcccccgccgacagcgagagaggccccaagcccgagccccccggcagcggcagccccgccccccccagaagaagaagaagagcccaggacgacagccagagaagaagcctgcccgccgaggagggcagcagcggcaagaaggacgagggcggcggcggcagcagcagccaggaccacggcggcagaaagcacaagggcgagctgccccccagcagctgccagagaagagccggcaccaagagaagcagcagaagcagccacagaagccagcccagcagcggcgacgaggacagcgacgacgccagcagccacagactgcaccagaagagccccagccagtacagcgaggaggaggaggaggaggacagcggcagcgagcacagcagaagcagaagcagaagcggcagaagacacagcagccacagaagcagcagaagaagctacagcagcagcagcgacgccagcagcgaccagagctgctacagcagacagagaagctacagcgacgacagctacagcgactacagcgacagaagcagaagacacagcaagagaagccacgacagcgacgacagcgactacgccagcagcaagcacagaagcaagagacacaagtacagcagcagcgacgacgactacagcctgagctgcagccagagcagaagcagaagcagaagccacaccagagagagaagcagaagcagaggcagaagcagaagcagcagctgcagcagaagcagaagcaagagaagaagcagaagcaccaccgcccacagctggcagagaagcagaagctacagcagagacagaagcagaagcaccagaagccccagccagagaagcggcagcagaaagagaagctggggccacgagagccccgaggagagacacagcggcagaagagacttcatcagaagcaagatctacagaagccagagcccccactacttcagaagcggcagaggcgagggccccggcaagaaggacgacggcagaggcgacgacagcaaggccaccggcccccccagccagaacagcaacatcggcaccggcagaggcagcgagggcgactgcagccccgaggacaagaacagcgtgaccgccaagctgctgctggagaagatccagagcagaaaggtggagagaaagcccagcgtgagcgaggaggtgcaggccacccccaacaaggccggccccaagctgaaggaccccccccagggctacttcggccccaagctgccccccagcctgggcaacaagcccgtgctgcccctgatcggcaagctgcccgccaccagaaagcccaacaagaagtgcgaggagagcggcctggagagaggcgaggagcaggagcagagcgagaccgaggagggcccccccggcagcagcgacgccctgttcggccaccagttccccagcgaggagaccaccggccccctgctggaccccccccccgaggagagcaagagcggcgaggccaccgccgaccaccccgtggcccccctgggcacccccgcccacagcgactgctaccccggcgaccccaccatcagccacaactacctgcccgaccccagcgacggcgacaccctggagagcctggacagcagcagccagcccggccccgtggagagcagcctgctgcccatcgcccccgacctggagcacttccccagctacgccccccccagcggcgaccccagcatcgagagcaccgacggcgccgaggacgccagcctggcccccctggagagccagcccatcaccttcacccccgaggagatggagaagtacagcaagctgcagcaggccgcccagcagcacatccagcagcagctgctggccaagcaggtgaaggccttccccgccagcgccgccctggcccccgccacccccgccctgcagcccatccacatccagcagcccgccaccgccagcgccaccagcatcaccaccgtgcagcacgccatcctgcagcaccacgccgccgccgccgccgccgccatcggcatccacccccacccccacccccagcccctggcccaggtgcaccacatcccccagccccacctgacccccatcagcctgagccacctgacccacagcatcatccccggccaccccgccaccttcctggccagccaccccatccacatcatccccgccagcgccatccaccccggccccttcaccttccaccccgtgccccacgccgccctgtaccccaccctgctggcccccagacccgccgccgccgccgccaccgccctgcacctgcaccccctgctgcaccccatcttcagcggccaggacctgcagcacccccccagccacggcacctag

SEQ ID NO: 116491 - protein, 164 aa, Artificial Sequence
  derived and/or modified sequence
MKCKPNQTRTYDPEGFKKRAACLCFRSEREDEVLLVSSSRYPDRWIVPGGGMEPEEEPGGAAVREVYEEAGVKGKLGRLLGVFEQNQDPKHRTYVYVLTVTELLEDWEDSVSIGRKREWFKVEDAIKVLQCHKPVHAEYLEKLKLGGSPTNGNSMAPSSPDSDP

SEQ ID NO: 116492 - DNA, 495 bp, Artificial Sequence
  derived and/or modified sequence
atgaagtgcaagcccaaccagaccagaacctacgaccccgagggcttcaagaagagagccgcctgcctgtgcttcagaagcgagagagaggacgaggtgctgctggtgagcagcagcagataccccgacagatggatcgtgcccggcggcggcatggagcccgaggaggagcccggcggcgccgccgtgagagaggtgtacgaggaggccggcgtgaagggcaagctgggcagactgctgggcgtgttcgagcagaaccaggaccccaagcacagaacctacgtgtacgtgctgaccgtgaccgagctgctggaggactgggaggacagcgtgagcatcggcagaaagagagagtggttcaaggtggaggacgccatcaaggtgctgcagtgccacaagcccgtgcacgccgagtacctggagaagctgaagctgggcggcagccccaccaacggcaacagcatggcccccagcagccccgacagcgacccctag

SEQ ID NO: 116493 - DNA, 495 bp, Artificial Sequence
  derived and/or modified sequence
atgaaatgcaaacccaatcaaacaaggacttatgatcccgaaggctttaaaaaacgagcagcctgtctgtgcttccgatcagagcgtgaagatgaggtccttctcgtgtctagctcacgctatccagataggtggatcgttcccggcggtggcatggaaccggaggaagagcccggcggagcagcagtccgggaagtctacgaggaggcgggcgttaaggggaaactgggacgcctgctgggagttttcgagcagaaccaggatcctaagcatcgaacctatgtatatgtgctgaccgtgaccgagctgcttgaggattgggaagactcagttagcataggaagaaagcgcgaatggtttaaggtggaagatgcaatcaaagtcctgcaatgccacaagccagtgcatgccgaatatctggaaaaactgaagctcggagggtcgccaactaatgggaatagcatggccccctcctcccctgacagcgacccttag

SEQ ID NO: 116494 - DNA, 495 bp, Artificial Sequence
  derived and/or modified sequence
atgaagtgcaagcccaaccagaccaggacctatgaccctgagggcttcaagaagagagctgcctgcctgtgcttccgctctgagcgggaggatgaggtgctgctggtgagcagcagccgctacccagaccgctggatcgtgcctgggggcggcatggagcctgaggaggagcccggcggcgctgctgtgcgggaggtgtatgaggaggccggcgtgaagggcaagctgggccgcctgctgggcgtgtttgagcagaaccaggaccccaagcacaggacctacgtgtatgtgctgactgtgacagagctgctggaggactgggaggacagcgtgtccattggaaggaagcgggagtggttcaaggtggaggatgccatcaaggtgctgcagtgccacaagcctgtgcatgctgagtacctggagaagctgaagctgggcggcagccccaccaatggaaacagcatggcccccagcagcccagacagcgacccctag

SEQ ID NO: 116495 - DNA, 495 bp, Artificial Sequence
  derived and/or modified sequence
atgaagtgcaagcccaaccagacccggacctacgaccccgagggcttcaagaagagagcagcttgtctttgttttagatctgaaagggaagatgaggtcctcctggtttcctctagtcgctatcccgaccgctggattgtccccggcggcggcatggagcccgaggaagagcccgggggagccgcagtacgagaagtatatgaggaggcgggtgtgaaaggcaagttgggccgtctgctgggcgtgtttgagcagaatcaggatcccaagcatcggacctacgtgtatgtgttaacagtcacagagctcttagaggactgggaggacagcgtgagcatcggaagaaagcgcgagtggtttaaagtggaagacgcaatcaaggtgcttcagtgtcacaaaccagtgcatgctgagtacttagagaaactcaagctcggaggatcaccaacaaacggaaacagcatggccccctcatctcccgactctgacccgtag

SEQ ID NO: 116496 - DNA, 2001 bp, Artificial Sequence
  derived and/or modified sequence
tgagtaagccagaatggttgatagtgggggaggatgatgacgacgctgcctttgcccctgtcttgtgtgaaacaactgcctgtgggtttcctgcagcgcagtggggagtgagaggagaaacgtcctgccgtgccacacacctcggctgctgcccggcagcggcagcagctgcgtcggcggcccacacagcagcgagaggcgagaggaggctgcctcgaggatgaagtgcaaacccaaccagacacggacctacgaccccgaggggttcaagaagcgggcggcgtgcctgtgcttccggagcgagcgcgaggacgaggtcctgttagtgagtagcagccggtacccggaccgctggatcgtgccgggcgggggcatggagcccgaggaggagccgggcggtgcggcggtccgagaggtgtacgaagaggcgggagtcaaggggaagttaggccggctcctgggcgtcttcgaacagaaccaggaccccaagcacagaacgtacgtgtatgtactgactgtcacggagctgctggaggattgggaagattcggttagcattgggaggaagcgagagtggttcaaagtcgaagatgccatcaaggttctccagtgccacaagcccgtgcacgccgaatatctggagaaactaaagctgggcggttccccaaccaatggaaactccatggccccatcctcgccagatagcgatccctagtgaatggcatagatgttgttcagatttactttgaaagaatcaagtatgtgaatggatggatgaatggaattgtgaagcacagatgagctctttcacactccaaggacacagctcatcctatgcttttggacacttcttccctgtttattacaatgactattctccaggttgttgcactaccgctgtatctgtacataattctaacttggcacctgtggccttttttgtgctcttatgtgtctgtatttcccggcagagtatacgcccttgaatgccaggaacttgtttccttagtcttttttatatatctagcatataagatattgcttagaatatggtagacatcactgaagatttgtttcagtagttcatattttgtaatgatactgaatggttaaacaatccctttctaatctgtctagcatatatgtgacttttgtttatcaagtgtcacacaactgcttcaaggcagctgtgagatactagaaagcaaaaattcttactcctatgtctgtgtcatcccagatgtgtgcctccagatggcagtatactacactatctgtaaaatatatttgcaaagccaggcacagtgttacgcgtctgcctcaggaggctgaggcagaagaatagcttgagcccaggagctttagtctagcctgagcaatataatgagactccgtctcttaaaatatttgcccaaacattgaacctaaatttgaccatgcccctagaaataattcctaatctttagaaaatagggcagagaaacattattttacaccatggagatgagatcagcagaatccagactataagaaactacaggacacatgacctagtttcttctgtaaataacttgcaaggatgaaagatggaggatgaacctatagatttaaagagacttaagagacatattaaccaattgttaattggatcttatttgaattgtgatttgaccgaactgtaaaacgaatacatttatgagacaatcggggtaatttgaacattggtggggtatttggtattagaataatggttttatcattatgttagaaagaagggtcctcatctacattctcaaacatctgtggctgatatgatatgattcttggaatttgcttcaaaataataagtctggatgttaagtgcattggaaatattgatgaaacgaaattggccttgataattgttgaagctgggtgatggctaaaatgatggttcattatatatgttcatctctatttttgtatgtttggcattttccgtaataaagtttataaaaataa

SEQ ID NO: 116497 - DNA, 495 bp, Artificial Sequence
  derived and/or modified sequence
atgaagtgcaagccaaaccagacaaggacttatgaccctgaaggcttcaaaaaacgtgctgcttgtctctgctttagaagtgaacgcgaagacgaggtgcttttggtgtccagctcacgataccccgatcgctggattgtgcctggagggggtatggagccagaagaggaacccggaggggcagctgtcagagaggtttacgaggaagcgggagtgaagggtaaactgggtcgtctgctcggagttttcgaacaaaatcaggaccccaaacatagaacctacgtatacgtgctgacagtgacggaacttctcgaggattgggaagacagtgtgagcataggcaggaaacgggaatggtttaaagtggaagatgcgatcaaagtactccagtgtcataaaccagtccacgcagaatacctcgagaaactgaagctgggcggtagcccaaccaacggaaacagcatggccccttcaagccccgattccgatccctag

SEQ ID NO: 116498 - DNA, 495 bp, Artificial Sequence
  derived and/or modified sequence
atgaagtgcaaaccaaaccagacaagaacctatgaccccgagggctttaagaagagggccgcttgcctctgctttagaagtgagcgtgaagatgaagttctgctcgtttcttcaagcaggtatccggaccgctggatagtgccaggaggaggcatggagcccgaagaagaacccggtggggccgcagtccgggaggtctatgaagaggcaggcgtcaaaggtaaactgggacgcctgcttggcgtttttgaacaaaaccaagatcctaaacaccggacgtacgtttatgtcctgacggttacggaactcctcgaagactgggaagactctgtgagcattggcagaaaacgggaatggtttaaggtcgaggacgcaatcaaagttctgcagtgccataaacccgtccacgccgagtacctggagaagctgaagctgggaggatctcctaccaatgggaattccatggccccatctagccccgattccgatccctag

SEQ ID NO: 116499 - DNA, 495 bp, Artificial Sequence
  derived and/or modified sequence
atgaagtgcaagcctaaccaaacgcgcacctatgaccctgagggctttaagaagagagcagcgtgcttgtgctttcgctcagagcgggaggacgaagtgctgctggtttcaagctctcgctacccagaccggtggatcgtgcccggcgggggtatggaacctgaagaggaacccggcggtgccgctgtgcgtgaggtgtatgaggaagccggagtgaaagggaagctaggacggctcctgggcgtgttcgaacagaatcaggaccctaagcatagaacctacgtgtacgttctgacggtaacagaattactggaagattgggaggattctgtttcgataggacgtaagagagaatggtttaaggtggaagacgctatcaaagtcctgcaatgccacaaacctgtccatgcagaatatctggagaaactgaaacttggagggtcaccaaccaatggaaacagtatggctccgtctagcccagactcggatccttag

SEQ ID NO: 116500 - DNA, 495 bp, Artificial Sequence
  derived and/or modified sequence
atgaagtgcaagcccaaccagacccggacctacgaccccgagggcttcaagaagcgcgccgcatgtctctgcttccgctccgagagggaggatgaagtgctgttggtcagttcaagtcggtaccctgatagatggatagtgcccggaggtggcatggaacccgaagaagagccaggcggggctgccgtgcgagaggtctacgaagaagccggcgtgaaaggcaaactgggtcgccttctcggcgtgtttgaacaaaaccaggacccgaaacaccggacctacgtctacgtgctaactgtaaccgagttgctggaagactgggaggacagcgtaagcattggccgcaagagagagtggtttaaagtcgaagacgctataaaggtgttgcagtgccacaaaccagtccacgccgagtatctggaaaagctaaaactcggcggttcccccactaatggcaactcaatggctcctagcagcccagactccgacccctag

SEQ ID NO: 116501 - DNA, 495 bp, Artificial Sequence
  derived and/or modified sequence
atgaagtgcaagcccaaccagacccggacctacgaccccgagggctttaaaaagcgtgccgcttgtttgtgctttaggtccgagagggaagacgaggttctgcttgtgagttcctcaaggtacccggatagatggatcgtgccggggggcggaatggaacctgaagaagaaccgggaggcgccgccgtgagggaggtgtatgaggaagctggggtcaaaggaaagctcggtaggcttctaggcgtcttcgaacagaaccaagatccaaaacatcgtacctatgtgtacgtgctaacggttacagaactgttggaagactgggaagacagtgtgtcaatcggccgcaagcgagagtggtttaaggtcgaagatgctataaaggtgctgcaatgccacaagcccgtccatgccgagtacctagaaaagctgaagctaggaggcagtccaacaaatggaaacagcatggctccttctagcccagatagcgatccctag

SEQ ID NO: 116502 - DNA, 1917 bp, Artificial Sequence
  derived and/or modified sequence
gacggaggcgcctctctctccccgcccctctcctcggccctttctcttcccagcacctcggctgctgcccggcagcggcagcagctgcgtcggcggcccacacagcagcgagaggcgagaggaggctgcctcgaggatgaagtgcaaacccaaccagacacggacctacgaccccgaggggttcaagaagcgggcggcgtgcctgtgcttccggagcgagcgcgaggacgaggtcctgttagtgagtagcagccggtacccggaccgctggatcgtgccgggcgggggcatggagcccgaggaggagccgggcggtgcggcggtccgagaggtgtacgaagaggcgggagtcaaggggaagttaggccggctcctgggcgtcttcgaacagaaccaggaccccaagcacagaacgtacgtgtatgtactgactgtcacggagctgctggaggattgggaagattcggttagcattgggaggaagcgagagtggttcaaagtcgaagatgccatcaaggttctccagtgccacaagcccgtgcacgccgaatatctggagaaactaaagctgggcggttccccaaccaatggaaactccatggccccatcctcgccagatagcgatccctagtgaatggcatagatgttgttcagatttactttgaaagaatcaagtatgtgaatggatggatgaatggaattgtgaagcacagatgagctctttcacactccaaggacacagctcatcctatgcttttggacacttcttccctgtttattacaatgactattctccaggttgttgcactaccgctgtatctgtacataattctaacttggcacctgtggccttttttgtgctcttatgtgtctgtatttcccggcagagtatacgcccttgaatgccaggaacttgtttccttagtcttttttatatatctagcatataagatattgcttagaatatggtagacatcactgaagatttgtttcagtagttcatattttgtaatgatactgaatggttaaacaatccctttctaatctgtctagcatatatgtgacttttgtttatcaagtgtcacacaactgcttcaaggcagctgtgagatactagaaagcaaaaattcttactcctatgtctgtgtcatcccagatgtgtgcctccagatggcagtatactacactatctgtaaaatatatttgcaaagccaggcacagtgttacgcgtctgcctcaggaggctgaggcagaagaatagcttgagcccaggagctttagtctagcctgagcaatataatgagactccgtctcttaaaatatttgcccaaacattgaacctaaatttgaccatgcccctagaaataattcctaatctttagaaaatagggcagagaaacattattttacaccatggagatgagatcagcagaatccagactataagaaactacaggacacatgacctagtttcttctgtaaataacttgcaaggatgaaagatggaggatgaacctatagatttaaagagacttaagagacatattaaccaattgttaattggatcttatttgaattgtgatttgaccgaactgtaaaacgaatacatttatgagacaatcggggtaatttgaacattggtggggtatttggtattagaataatggttttatcattatgttagaaagaagggtcctcatctacattctcaaacatctgtggctgatatgatatgattcttggaatttgcttcaaaataataagtctggatgttaagtgcattggaaatattgatgaaacgaaattggccttgataattgttgaagctgggtgatggctaaaatgatggttcattatatatgttcatctctatttttgtatgtttggcattttccgtaataaagtttataaaaataa

SEQ ID NO: 116503 - DNA, 495 bp, Artificial Sequence
  derived and/or modified sequence
atgaagtgtaaacccaaccagacaaggacctacgatcctgaaggattcaaaaagagggccgcatgcctgtgcttcaggagcgagagagaagacgaagtcctcctggtatcctcaagcaggtaccccgacaggtggatcgtacctggtggcggaatggagcccgaagaagaacctgggggagctgccgtgagagaagtgtacgaggaagctggagtaaaagggaagctcgggcgtttgttaggagtctttgaacagaatcaggacccaaagcaccggacctacgtatacgtgcttacagtaaccgaacttttagaagattgggaagatagtgtgtccataggaaggaagcgggagtggtttaaggtagaggatgcaatcaaagtactccagtgccacaagccggtccatgctgaatacctggagaagctgaaacttggtggatctccaacgaatggtaattcgatggccccttcaagcccggactccgatccctag

SEQ ID NO: 116504 - DNA, 495 bp, Artificial Sequence
  derived and/or modified sequence
atgaaatgcaaacctaatcaaactcggacctacgatccggaaggattcaaaaaaagagcagcctgcctgtgtttcagaagcgagcgagaagatgaagtgttactggtcagctcaagccggtatcccgatcgttggatcgtcccaggcggtggtatggaacctgaggaggagcctggcggagcagctgtgcgggaggtctacgaggaagccggtgtgaaaggcaagcttggccgtctcctgggagtgtttgagcaaaaccaggacccaaagcatagaacctatgtatacgtcctaactgttaccgagttattggaggattgggaggacagcgtcagcatagggaggaaacgggagtggtttaaggtggaggacgctatcaaggtgttacagtgccataaacccgtgcatgctgagtacctcgagaagctaaagttgggcggttcgccaacaaacggtaactctatggccccaagctctcctgacagtgacccatag

SEQ ID NO: 116505 - DNA, 1845 bp, Artificial Sequence
  derived and/or modified sequence
atgaactcatattccgacagtggctaccaggaggccggctcttttcacaatagccaaaatgtgagtaaagctgacaacaggcagcagcacagctttatagggtctaccaataaccacgtggtgcggaatagccgggccgagggacagaccctggtgcaaccatctgtcgccaatcgcgctatgcgcagagtgtcatcagtccccagcagagcacagtcaccttcttacgtgatctccacaggagtatctccatctagaggatctctaagaactagtctgggatctggattcggcagcccatcggtgacagaccccaggccactgaatccctctgcctattcttccaccacactcccagccgcccgagcagcctcgccttactcacagagacctgcatcccccaccgccatccgacggatcggttcagtgacttctaggcagacatctaatcccaatggtcccactcctcagtatcagacaacggcccgggtcggaagcccacttactcttaccgacgcacaaactcgcgtggctagcccatcacagggacaggttggcagcagctctccaaagcgctcaggcatgactgctgttccgcagcacctggggccaagccttcaacgcacggtgcacgacatggagcagttcggccaacaacagtacgacatctacgaaaggatggtgccccccagaccagattcgctcactgcctacggggtgcccatgttggtgtcaattgtgtctctgggaaagacatttgtgctaccatgcccggatcttcacataacgcccatctacgagggcaggacatactatagccctgtttaccggtcccccaatcacggaacagtcgagctccagggctcacagaccgctctgtataggacaggttcagtgggcattggaaatctgcagcgcaccagttcccagagaagcacgctcacttaccagagaaataattacgcacttaacacgacggctacgtacgcagagccttataggcctatccaatatcgcgttcaagaatgtaactacaaccggctgcagcatgccgtccctgccgatgatggaaccacacggtcaccttccatcgactctatccagaaggatcctcgggagtttgcttggcgagatccagagctgcctgaagtgattcacatgctacaacaccagtttcccagcgttcaggcgaatgcagccgcgtacctccagcatctgtgttttggcgacaacaaggtgaagatggaagtttgcaggctaggggggattaaacacctcgttgatcttctggaccacagagtactggaagtgcagaagaacgcatgtggagctcttcggaaccttgtatttggtaagtccacagacgagaataaaattgccatgaaaaatgtgggtggtattccagctttgctcagattgttgagaaagagtatcgacgcagaggtccgagagctcgtcaccggagtactctggaaccttagcagctgcgacgccgtcaagatgaccataatcagagatgccctgtccaccctgactaacacagtcatcgtcccgcattctggatggaataactcttccttcgacgacgaccataaaattaagttccaaacatcacttgtgctccgtaataccaccggctgcctgcgcaacctcagctccgctggagaagaggcgcgcaagcagatgaggtcttgcgaggggttggtggattccctgctttacgtaattcatacatgtgtgaatacaagcgattatgactccaagaccgtggaaaattgtgtatgcaccctgcgcaaccttataggttggtcgtggcgctgtcctcgcccaggttactgggactag

SEQ ID NO: 116506 - DNA, 1845 bp, Artificial Sequence
  derived and/or modified sequence
atgaacagctacagcgacagcggctaccaggaggccggcagcttccacaacagccagaatgtgtccaaggctgacaaccggcagcagcacagcttcatcggcagcaccaacaaccacgtggtgaggaacagcagagctgagggccagaccctggtgcagcccagcgtggccaacagagccatgagaagagtgtcctctgtgcccagccgggcccagagccccagctatgtgatcagcactggagtgagccccagccggggcagcctgcggaccagcctgggcagcggcttcggcagccccagcgtgacagacccccggcccctgaaccccagcgcctacagcagcaccaccctgcctgctgcccgggccgccagcccctacagccagaggcctgccagccccacagccatccgccgcatcggctctgtgaccagccggcagaccagcaaccccaacggccccaccccccagtaccagaccacagcccgggtgggcagccccctgaccctgacagatgcccagaccagggtggccagccccagccagggccaggtgggcagcagcagccccaagaggagcggcatgacagctgtgccccagcacctgggccccagcctgcagaggacagtgcatgacatggagcagtttggccagcagcagtatgacatctatgaaagaatggtgccccccaggccagacagcctgacagcctacggcgtgcccatgctggtgtccatcgtgtccctgggcaagacctttgtgctgccctgcccagacctgcacatcacccccatctatgagggccgcacctactacagccctgtgtaccgcagccccaaccacggcaccgtggagctgcagggcagccagacagccctgtacagaacaggctctgtgggcatcggcaacctgcagaggaccagcagccagaggagcaccctgacctaccagaggaacaactatgccctgaacaccacagccacctacgccgagccctaccggcccatccagtacagagtgcaggagtgcaactacaaccggctgcagcacgctgtgcctgcagatgatggcaccaccaggagccccagcattgacagcatccagaaggacccccgggagtttgcctggagggaccctgagctgcctgaggtgatccacatgctgcagcaccagttccccagcgtgcaggccaatgctgctgcctacctgcagcacctgtgcttcggggacaacaaggtgaagatggaggtgtgccgcctgggcggcatcaagcacctggtggacctgctggaccaccgggtgctggaggtgcagaagaatgcctgtggggccctgaggaacctggtgtttgggaagagcacagatgagaacaagatcgccatgaagaatgtgggcggcatcccagccctgctgcggctgctgaggaagagcattgatgctgaggtgcgggagctggtgactggagtgctgtggaacctgagcagctgtgatgctgtgaagatgaccatcatcagagatgccctgagcaccctgaccaacacagtcatcgtgccccacagcggctggaacaacagcagctttgatgatgaccacaagatcaagttccagaccagcctggtgctgaggaacaccaccggctgcctgaggaacctgagcagcgctggggaggaggccaggaagcagatgaggagctgtgagggcctggtggacagcctgctgtatgtgatccacacctgtgtgaacaccagtgactatgacagcaagacagtggagaactgtgtgtgcaccctgaggaacctgattggctggagctggcgctgcccccggcccggctactgggactag

SEQ ID NO: 116507 - DNA, 1845 bp, Artificial Sequence
  derived and/or modified sequence
atgaacagctacagcgacagcggctaccaggaggccggcagcttccacaacagccaaaatgtgtccaaggctgacaaccggcaacagcatagttttatagggagtacaaacaaccacgttgtcaggaactctcgggccgagggccagacattggtgcaaccttccgtggcgaaccgcgccatgcgaagagtcagtagcgtgccatcccgagcacagtcaccgtcctacgtaatttcgaccggcgtctccccttctcgcgggagcttgagaacaagtctcggcagtggttttggaagcccttcagtaacagatcctaggccacttaatccttctgcctattccagtacaacactcccggctgctcgcgcagcttcgccctattctcagaggccggcttccccgacggctatccggcgcatagggtctgtgacatctaggcagacatccaacccaaatggtccaacgccacagtaccagaccactgcaagggtgggttctcccctgactctgaccgacgcacagacaagggtggcctctccctctcagggacaggtggggtctagcagccccaaaagatcaggcatgacagctgtcccccagcacctcgggccctccctgcagcgtacagtgcacgatatggaacagttcgggcagcagcagtatgacatctatgagaggatggtgccgccaagaccggattcactgactgcctatggggtccctatgctcgtgtctatcgtgtctcttgggaagacctttgtgctgccctgtccagacctccacatcaccccaatctacgaggggcggacctactacagcccggtttacagaagcccaaatcacgggaccgtggagctgcagggcagccaaacagccctgtaccgcacaggatctgttggcataggcaatcttcagcgcacatcttctcaacggtcaacactgacctaccaaagaaacaattacgccctgaatactaccgccacctacgcggagccttatcgccctattcaataccgggtgcaggagtgtaattacaacagactccagcatgctgttcctgccgacgacggtacgactagaagtccatctatcgattcaatccagaaggacccccgtgaattcgcttggagagaccccgaactcccagaggttatacacatgctgcagcaccagtttccaagtgtgcaggccaatgccgctgcctatctgcagcacctgtgtttcggggataacaaagtcaagatggaggtgtgtagacttggtggtattaagcatctagttgacctgctagaccatcgagttctcgaggttcagaagaacgcatgtggggctcttaggaacctcgtattcggcaaatctactgacgagaacaagatcgccatgaaaaacgtggggggcatccctgccctgttgcggctcctgagaaagtcgatcgacgccgaggtgcgcgagctcgtgaccggcgttctgtggaacctctccagctgcgacgccgtgaaaatgacgatcattagggatgccctgtccacgctcactaacactgtaattgtacctcattcaggctggaataacagtagcttcgatgatgaccacaaaatcaagtttcagacctcactcgtcctccgtaacaccaccggatgtctgcggaatctctcctccgcaggcgaagaagctcggaagcaaatgagaagctgtgagggtctggtggattctctgttgtacgtcatccacacatgcgtcaacacatcagactacgattccaagaccgtcgaaaactgcgtctgcacactgcgcaacctgattggttggtcttggagatgtccacgccctggatactgggattag

SEQ ID NO: 116508 - DNA, 4581 bp, Artificial Sequence
  derived and/or modified sequence
tccggggctgagtccgcgtcgacgccggccgcggaggcggcaccatgggcaaggggtagaggggcaagttggccaccgccgccgccgggggtggtgggagagccgctccgggggcgggggccggtgggggagggaggggcgggcagccgcgccgccgcggcacttttttaattttttcgggtgccgcagcggcgacccctcggcgccgatgtccctgatccctggagcgacgacggccgctgcctaagctggaaagaggaatgccagctcctgagcaggcctcattggtggaggaggggcaaccacagacccgccaggaagctgcctccactggcccaggcatggaacccgagaccacagccaccactattctagcatccgtgaaggagcaggagcttcagtttcagcgactcacccgagaactggaagtggaaaggcagattgttgccagtcagctagaaagatgtaggcttggagcagaatcaccaagcatcgccagcaccagctcaactgagaagtcatttccttggagatcaacagacgtgccaaatactggtgtaagcaaacctagagtttctgacgctgtccagcccaacaactatctcatcaggacagagccagaacaaggaaccctctattcaccagaacagacatctctccatgaaagtgagggatcattgggtaactcaagaagttcaacacaaatgaattcttattccgacagtggataccaggaagcagggagtttccacaacagccagaacgtgagcaaggcagacaacagacagcagcattcattcataggatcaactaacaaccatgtggtgaggaattcaagagctgaaggacaaacactggttcagccatcagtagccaatcgggccatgagaagagttagttcagttccatctagagcacagtctccttcttatgttatcagcacaggcgtgtctccttcaagggggtctctgagaacttctctgggtagtggatttggctctccgtcagtgaccgacccccgacctctgaaccccagtgcatattcctccaccacattacctgctgcacgggcagcctctccgtactcacagagacccgcctccccaacagctatacggcggattgggtcagtcacctcccggcagacctccaatcccaacggaccaacccctcaataccaaaccaccgccagagtggggtccccactgaccctgacggatgcacagactcgagtagcttccccatcccaaggccaggtggggtcgtcgtcccccaaacgctcagggatgaccgccgtaccacagcatctgggaccttcactgcaaaggactgttcatgacatggagcaattcggacagcagcagtatgacatttatgagaggatggttccacccaggccagacagcctgacagcttacggagttcctatgctagtcagcatagtcagcttgggcaagaccttcgttctgccgtgtcccgacttgcacattactcctatatatgaggggaggacctattacagcccagtgtaccgcagcccaaaccatggaactgtggagctccaaggatcgcagacggcgttgtatcgcacaggttcagtaggtattggaaatctacaaaggacatccagccaacgaagtacccttacataccaaagaaataattatgctctgaacacaacagctacctacgcggagccctacaggcctatacaataccgagtgcaagagtgcaattataacaggcttcagcatgcagtgccggctgatgatggcaccacaagatccccatcaatagacagcattcagaaggaccccagggagtttgcctggcgtgatcctgagttgcctgaggtcattcacatgcttcagcaccagttcccatctgttcaggcaaatgcagcggcctacctgcagcacctgtgctttggtgacaacaaagtgaagatggaggtgtgtaggttagggggaatcaagcatctggttgaccttctggaccacagagttttggaagttcagaagaatgcttgtggtgcccttcgaaacctcgtttttggcaagtctacagatgaaaataaaatagcaatgaagaatgttggtgggatacctgccttgttgcgactgttgagaaaatctattgatgcagaagtaagggagcttgttacaggagttctttggaatttatcctcatgtgatgctgtaaaaatgacaatcattcgagatgctctctcaaccttaacaaacactgtgattgttccacattctggatggaataactcttcttttgatgatgatcataaaattaaatttcagacttcactagttctgcgtaacacgacaggttgcctaaggaacctcagctccgcgggggaagaagctcggaagcaaatgcggtcctgcgaggggctggtagactcactgttgtatgtgatccacacgtgtgtgaacacatccgattacgacagcaagacggtggagaactgcgtgtgcaccctgaggaacctgatcggctggagctggaggtgccccaggcccggttactgggactgaacgaattggatgacttactaggaaaagagtctcccagcaaagactctgagccaagttgctgggggaagaagaagaaaaagaaaaagaggactccgcaagaagatcaatgggatggagttggtcctatcccaggactgtcgaagtcccccaaaggggttgagatgctgtggcacccatcggtggtaaaaccatatctgactcttctagcagaaagttccaacccagccaccttggaaggctctgcagggtctctccagaacctctctgctggcaactggaagtttgcagcatatatccgggcggccgtccgaaaagaaaaggggctccccatccttgtggagcttctgagaatggataacgatagagttgtttcttccgtggcaacagccttgaggaatatggcactagatgttcgcaacaaggagctcataggcaaatacgccatgcgagacctggtcaaccggctccccggcggcaatggccccagtgtcttgtctgatgagaccatggcagccatctgctgtgctctgcacgaggtcaccagcaaaaacatggagaacgcaaaagccctggccgactcaggaggcatagagaagctggtgaacataaccaaaggcaggggcgacagatcatctctgaaagtggtgaaggcagcagcccaggtcttgaatacattatggcaatatcgggacctccggagcatttataaaaaggatgggtggaatcagaaccattttattacacctgtgtcgacattggagcgagaccgattcaaatcacatccttccttgtctaccaccaaccaacagatgtcacccatcattcagtcagtcggcagcacctcttcctcaccagcactgttaggaatcagagaccctcgctctgaatacgataggacccagccacctatgcagtattacaatagccaaggggatgccacacataaaggcctgtaccctggctccagcaaaccttcaccaatttacatcagttcctattcctcaccagcaagagaacaaaatagacggctacagcatcaacagctgtattatagtcaagatgactccaacagaaagaactttgatgcatacagattgtatttgcagtctcctcatagctatgaagatccttattttgatgaccgagttcactttccagcttctactgattactcaacacagtatggactgaaatcgaccacaaattatgtagacttttattccactaaacgaccttcttatagagcagaacagtacccagggtccccagactcatgggtgtagcatcaagatgcccaacagaggaactctttctttctaaccttgttcagattgaggtgaaaagtccatcttgctgatttgatgattgaaatgtgaaagtgaagtggaaggaatgaatgaagtgtgttttttttttcttttttgaggaattatcagggaagtgaggaaatgtttgggagaggactttctaagctctatttaggtgttagatctaattacttatagattctgtagtctggtgaaggtgtgggtgacgtgatgagaggtttgagaaatgggtgaaatgaaatgggggatatgtaggtcaaatcaaattaaagatgatttttttaatgtgaataaagttatgttctgatagtttgtacagaaaaaataaaatggatgcccatgttttattgctattactaaatgtcaagattgtatgctattatgtcttgtaaatttcttttgttggtgtaaatatggaaatgccacattggttaagtgccatcatttgtaatgcaatgtgtcacttgaaaagagatttgaagaaactgacaacttcaaaaacaaatgagaagcccaaggaactgtgagcaattaaaagcaaaccgcgacaccctttgtctccaccacacatagtgtactttggaagcacaacgtccaggctggtaccgcagcgccatgcccattcctcgcctcattcataggacacttcactgccattttctattcacataaaagaaaaataaatgtggaaatttcatccttgg

SEQ ID NO: 116509 - DNA, 1845 bp, Artificial Sequence
  derived and/or modified sequence
atgaattcatattccgattctggctaccaggaggcgggttccttccacaattcgcaaaacgtgagcaaagcagataatcgacagcagcactcgtttattggcagtacaaataaccacgtagtgagaaactcccgggctgaaggtcaaacactggtgcagccctcagtggccaatagggcaatgcgacgggtgtccagcgtgccttctagggcccagagcccgtcctatgtcatatccaccggggtgtctccaagcagggggagtctgcgaactagtttggggtccggctttggctcaccttccgtgacggatccccgaccactaaacccttcagcatacagttcgaccacgttaccagctgccagagctgcttcgccttattctcagcgacccgcaagtcccactgccattcgcaggattggaagtgtcacgtctaggcagactagcaaccccaatgggccaacgcctcagtatcagacaacggcgagggttggatcacccctcacgttgaccgacgcccagactcgtgtggccagtccctcacaggggcaggtcgggtcaagctcccccaagagaagtgggatgaccgcagtcccgcagcaccttgggccttcacttcagagaacggtgcacgacatggagcaattcggacagcagcagtacgacatatacgagagaatggttcccccaaggcctgattccttgacggcctacggggtcccaatgctcgtttcaatagtgagtctcggaaaaaccttcgtgctcccttgccccgatctccatatcactccaatttatgagggcagaacttattatagccccgtatataggagccccaaccatggtacggtcgagctccagggctcccagacagcactgtaccgcacagggtctgtgggaatagggaacctgcagagaaccagttctcagaggagcactctgacttatcaacgaaataactacgctctaaacaccaccgcgacatacgcagagccctaccgcccaatacagtacagggtgcaggaatgtaattacaacaggctccagcacgctgttccggcagatgatggtaccacgcgcagcccctctattgactccattcagaaggaccctcgcgagttcgcatggcgcgacccagaattgcccgaggtgattcatatgctccagcaccagttcccgagcgtccaggctaatgcggctgcctatttacagcacttatgttttggcgataacaaagtcaagatggaagtgtgtagattgggcggaatcaagcacttagttgatttgctagaccatcgcgtgctagaggtgcagaagaatgcctgcggggcactgaggaaccttgtattcggcaaaagcaccgatgagaataaaatcgcaatgaagaatgtggggggtataccagccttgttgaggcttttacgaaaaagcatagacgccgaggtccgggagctggtgactggtgtgttatggaatctaagttcttgcgatgcagtgaaaatgacaatcatccgtgacgcgttgagcaccctcactaacactgtaatcgtgccacacagcggctggaacaatagtagctttgacgatgaccacaagataaagttccagacctcactcgtactgcgcaacactactgggtgtttacgcaacctgtctagtgcaggggaagaagctcggaagcaaatgcgatcttgcgaaggtctagtggacagcctcctgtacgtgattcacacatgtgtgaacacgtccgactacgatagtaaaacagttgagaattgcgtgtgtaccctccggaatttaatcggctggagttggagatgtccaaggcccggatactgggactag

SEQ ID NO: 116510 - DNA, 1845 bp, Artificial Sequence
  derived and/or modified sequence
atgaacagctacagcgacagcggctaccaggaggccggcagcttccacaacagccagaacgtgagcaaggccgacaacagacagcagcacagcttcatcggcagcaccaacaaccacgtggtgagaaacagcagagccgagggccagaccctggtgcagcccagcgtggccaacagagccatgagaagagtgagcagcgtgcccagcagagcccagagccccagctacgtgatcagcaccggcgtgagccccagcagaggcagcctgagaaccagcctgggcagcggcttcggcagccccagcgtgaccgaccccagacccctgaaccccagcgcctacagcagcaccaccctgcccgccgccagagccgccagcccctacagccagagacccgccagccccaccgccatcagaagaatcggcagcgtgaccagcagacagaccagcaaccccaacggccccaccccccagtaccagaccaccgccagagtgggcagccccctgaccctgaccgacgcccagaccagagtggccagccccagccagggccaggtgggcagcagcagccccaagagaagcggcatgaccgccgtgccccagcacctgggccccagcctgcagagaaccgtgcacgacatggagcagttcggccagcagcagtacgacatctacgagagaatggtgccccccagacccgacagcctgaccgcctacggcgtgcccatgctggtgagcatcgtgagcctgggcaagaccttcgtgctgccctgccccgacctgcacatcacccccatctacgagggcagaacctactacagccccgtgtacagaagccccaaccacggcaccgtggagctgcagggcagccagaccgccctgtacagaaccggcagcgtgggcatcggcaacctgcagagaaccagcagccagagaagcaccctgacctaccagagaaacaactacgccctgaacaccaccgccacctacgccgagccctacagacccatccagtacagagtgcaggagtgcaactacaacagactgcagcacgccgtgcccgccgacgacggcaccaccagaagccccagcatcgacagcatccagaaggaccccagagagttcgcctggagagaccccgagctgcccgaggtgatccacatgctgcagcaccagttccccagcgtgcaggccaacgccgccgcctacctgcagcacctgtgcttcggcgacaacaaggtgaagatggaggtgtgcagactgggcggcatcaagcacctggtggacctgctggaccacagagtgctggaggtgcagaagaacgcctgcggcgccctgagaaacctggtgttcggcaagagcaccgacgagaacaagatcgccatgaagaacgtgggcggcatccccgccctgctgagactgctgagaaagagcatcgacgccgaggtgagagagctggtgaccggcgtgctgtggaacctgagcagctgcgacgccgtgaagatgaccatcatcagagacgccctgagcaccctgaccaacaccgtgatcgtgccccacagcggctggaacaacagcagcttcgacgacgaccacaagatcaagttccagaccagcctggtgctgagaaacaccaccggctgcctgagaaacctgagcagcgccggcgaggaggccagaaagcagatgagaagctgcgagggcctggtggacagcctgctgtacgtgatccacacctgcgtgaacaccagcgactacgacagcaagaccgtggagaactgcgtgtgcaccctgagaaacctgatcggctggagctggagatgccccagacccggctactgggactag

SEQ ID NO: 116511 - protein, 464 aa, Artificial Sequence
  derived and/or modified sequence
MDVLLTYLPKNYAKSELGAVIFWGQNQTLDPNNMTILNRTFQDEPLIMDFNGDLIPDIFGITNESNQPQILLGGNLSWHPALTTTSKMRIPHSHAFIDLTEDFTADLFLTTLNATTSTFQFEIWENLDGNFSVSTILEKPQNMMVVGQSAFADFDGDGHMDHLLPGCEDKNCQKSTIYLVRSGMKQWVPVLQDFSNKGTLWGFVPFVDEQQPTEIPIPITLHIGDYNMDGYPDALVILKNTSGSNQQAFLLENVPCNNASCEEARRMFKVYWELTDLNQIKDAMVATFFDIYEDGILDIVVLSKGYTKNDFAIHTLKNNFEADAYFVKVIVLSGLCSNDCPRKITPFGVNQPGPYIMYTTVDANGYLKNGSAGQLSQSAHLALQLPYNVLGLGRSANFLDHLYVGIPRPSGEKSIRKQEWTAIIPNSQLIVIPYPHNVPRSSHRCLCFHLGNNWHFTLAGKESR

SEQ ID NO: 116512 - DNA, 1395 bp, Artificial Sequence
  derived and/or modified sequence
atggatgtattgctcacttatctgcccaaaaattatgctaagtctgagctgggggcggtgattttctgggggcaaaatcagaccctggatcccaataacatgactatactaaatcgcaccttccaagacgaaccactgattatggatttcaatggagatctcatacctgacattttcggcatcaccaatgagagtaaccagccacaaatattgttgggaggtaatcttagctggcaccccgctctcactactacctctaagatgcgaatcccacactcacacgccttcatcgatctcacagaggactttacagctgacctgtttctcaccacacttaacgcaacaactagtactttccagtttgagatctgggaaaatttggacgggaatttcagcgtctcaaccatcctggaaaaaccacagaacatgatggtagtcggtcagagcgcttttgccgactttgacggggatgggcatatggatcaccttctgcctggctgcgaggataagaactgccagaagagcactatttacctggtccgctccggcatgaaacagtgggtccctgtgctgcaagacttcagtaacaaaggcaccctgtggggattcgtcccatttgtggacgaacagcagccgaccgagatcccaattccaataacactacatatcggggactataacatggacggctaccctgacgccctcgtcatccttaaaaacacatccgggtctaatcagcaggcctttctgctcgagaacgtgccatgcaacaacgcaagctgcgaggaggcaagacggatgtttaaagtgtattgggagctcacagatctaaatcaaattaaagatgcgatggtagcaacgttctttgacatttatgaggacggtattctcgatatagttgtactgagcaaagggtatacaaagaacgattttgcgatccataccttaaagaataatttcgaggccgatgcgtacttcgtcaaagtgatcgtcctgagcgggctgtgtagcaatgactgccctagaaagataacaccgttcggagtgaatcagcctgggccttatataatgtacacaactgtagacgctaacggatatctgaagaacgggtccgcaggacagctgtctcaatcagcccacctcgctctccagctcccatataatgtgctaggtcttggacgatccgccaatttcctggaccacctctacgttggaattcctcgcccttctggtgagaagagtatccgtaaacaggagtggacagcaatcatccctaattctcagctcatcgtgatcccctatccgcacaatgtacctcggtccagccatagatgtttgtgctttcatctgggtaacaactggcattttactttagccggaaaggaatcccgctag

SEQ ID NO: 116513 - DNA, 1395 bp, Artificial Sequence
  derived and/or modified sequence
atggatgtgctgctgacctacctgcccaagaactatgccaagtctgagctgggcgctgtgatcttctggggccagaaccagaccctggaccccaacaacatgaccatcctgaacagaaccttccaggatgagcccctcatcatggacttcaatggagacctgatcccagacatcttcggcatcaccaatgaaagcaaccagccccagatcctgctgggcggcaacctgtcctggcacccagccctgaccaccaccagcaagatgaggatcccccacagccacgccttcatcgacctgacagaggacttcaccgctgacctcttcctgaccaccctgaatgccaccaccagcaccttccagtttgagatctgggagaacctggatggcaacttctctgtgtccaccatcctggagaagccccagaacatgatggtggtgggccagagcgcctttgctgactttgatggagatggccacatggaccacctgctgcccggctgtgaggacaagaactgccagaagagcaccatctacctggtgcgcagcggcatgaagcagtgggtgcctgtgctgcaggacttcagcaacaagggcaccctgtggggctttgtgccctttgtggatgagcagcagcccacagagatccccatccccatcaccctgcacatcggggactacaacatggatggctacccagatgccctggtgatcctgaagaacaccagcggcagcaaccagcaggccttcctgctggagaatgtgccctgcaacaatgccagctgtgaggaggcccggaggatgttcaaggtgtactgggagctgacagacctgaaccagatcaaggatgccatggtggccaccttctttgacatctatgaagatggcatcctggacatcgtggtgctgagcaagggctacaccaagaatgactttgccatccacaccctgaagaacaactttgaagcagatgcctactttgtgaaggtgattgtgctgagcggcctgtgcagcaatgactgccccaggaagatcaccccatttggagtgaaccagcccggcccctacatcatgtacaccaccgtggatgccaacggctacctgaagaatggatctgctggccagctgagccagagcgcccacctggccctgcagctgccctacaacgtgctgggcctgggccgcagcgccaacttcctggaccacctgtatgtgggcatcccccggcccagcggggagaagagcatcaggaagcaggagtggacagccatcatccccaacagccagctgattgtcatcccctacccccacaacgtgcccaggagcagccaccgctgcctgtgcttccacctgggcaacaactggcacttcaccctggccggcaaggagagcaggtag

SEQ ID NO: 116514 - DNA, 1395 bp, Artificial Sequence
  derived and/or modified sequence
atggacgtgctgctgacctacctgcccaagaactacgccaagagcgagttaggcgccgtgatattctggggccaaaatcagacactggaccctaataatatgaccatcctcaacagaaccttccaggatgagcctctcatcatggatttcaatggcgacctgatccccgatatcttcgggataacaaacgagtccaatcaaccccagattcttctgggaggcaacctctcctggcatccggccctaactacgaccagcaaaatgcggattccccacagtcacgcctttatcgacctcacagaagattttaccgccgaccttttcctaaccacgttaaatgcgactacgtcaacatttcagttcgaaatttgggagaacctggatggaaacttctccgtatccactattttagagaaacctcagaacatgatggtagtaggccagagcgcctttgctgactttgacggagatggtcatatggatcacctgctgcccggctgtgaagacaagaactgccaaaaatccaccatttatttagtacgatccgggatgaagcagtgggtgcccgtactgcaggacttcagtaacaagggaaccctttggggtttcgtccctttcgtggacgaacagcagccaactgagattccaataccaatcactctccatataggcgactacaacatggacggatacccagatgccttagtgatcctgaagaatacatcagggagtaatcagcaggcttttctgctggagaatgtcccttgcaataacgcttcatgtgaggaggctcggcgaatgttcaaagtctactgggaactgacagacctaaatcagataaaagacgctatggtagcaacgttcttcgacatctacgaggacggaattctagacattgtggtgttgtcgaagggttacacaaaaaatgactttgccatccacacactgaagaacaattttgaggctgacgcttacttcgtaaaggtcattgtcctctccggactttgcagcaacgattgcccaagaaaaataacacccttcggagtgaaccagcctgggccctatattatgtatacaaccgtggatgcgaacggctacctgaaaaacggatccgccggccaactgtcccagagtgcccatctagccctgcagttaccatacaacgtgctcggattaggccgcagcgctaacttcctcgatcatctttacgtaggaatcccacgcccgtcaggggagaagtcgatacggaaacaggaatggacagccatcatccctaacagccagctcatcgtaatcccatacccacacaatgtgcctcgcagctcccatcgctgtttatgcttccacctgggcaacaattggcactttacactggctggcaaagagtcaaggtag

SEQ ID NO: 116515 - DNA, 1395 bp, Artificial Sequence
  derived and/or modified sequence
atggacgtcctcttaacttacctccctaaaaactacgccaaaagcgagctgggagctgttatattctgggggcaaaaccagaccctcgatccgaacaacatgacgatattgaaccggaccttccaggacgaaccactgatcatggacttcaatggtgatctgattccagatattttcgggataactaatgagagcaatcaacctcagatcctcctcggcggaaacttaagttggcaccccgctttgaccactaccagcaagatgcgaattccacatagtcacgcattcatagatctgacagaggacttcaccgccgacctgtttctcacaaccctcaacgccactactagtactttccaattcgagatttgggagaacctggatggcaacttcagcgtgtcaacaatcttggagaagcctcagaacatgatggtcgtggggcaaagcgccttcgccgattttgacggcgatgggcacatggaccacctgctgcccggatgtgaggataagaactgccaaaagtctacaatctacctggtgcggagcggaatgaagcagtgggtccccgtgctccaggacttctctaacaagggtaccctgtggggctttgtgccatttgtagatgagcagcagcctacagaaattcccataccaatcacattgcacataggcgactacaacatggatggttaccctgatgctttggtgattctgaaaaatacatctggttccaaccagcaggcctttctgctggaaaatgttccatgcaacaacgcatcatgtgaggaagcacgcagaatgttcaaggtgtactgggagctcacagacttgaatcagatcaaagacgccatggtcgcaacttttttcgacatctacgaagacggcattctggatattgtggtgctgagtaaggggtacacaaagaacgacttcgccattcatacactaaagaataacttcgaagctgatgcgtactttgtcaaggtaatcgtgctgtcgggcctatgttccaacgactgccccaggaaaattactcccttcggcgtgaaccagccgggaccttacataatgtatacaaccgtagatgccaacgggtacctaaagaatggatctgccggacaactttctcaatcagcccacttagccttacagctgccgtacaacgtactagggctgggacgcagtgctaattttctcgaccacctgtatgttggaatcccaagaccctccggagaaaaatccattcgaaagcaggagtggacagccatcatcccgaacagccagcttattgtcattccttaccctcataacgtgcctaggagttcccaccggtgcctgtgtttccatctagggaataactggcactttacgttggccggaaaagaaagccgatag

SEQ ID NO: 116516 - DNA, 1395 bp, Artificial Sequence
  derived and/or modified sequence
atggacgtgctgctgacctacctgcccaagaactacgccaagagcgagctgggcgccgtgatcttctggggccagaaccagaccctggaccccaacaacatgaccatcctgaacagaaccttccaggacgagcccctgatcatggacttcaacggcgacctgatccccgacatcttcggcatcaccaacgagagcaaccagccccagatcctgctgggcggcaacctgagctggcaccccgccctgaccaccaccagcaagatgagaatcccccacagccacgccttcatcgacctgaccgaggacttcaccgccgacctgttcctgaccaccctgaacgccaccaccagcaccttccagttcgagatctgggagaacctggacggcaacttcagcgtgagcaccatcctggagaagccccagaacatgatggtggtgggccagagcgccttcgccgacttcgacggcgacggccacatggaccacctgctgcccggctgcgaggacaagaactgccagaagagcaccatctacctggtgagaagcggcatgaagcagtgggtgcccgtgctgcaggacttcagcaacaagggcaccctgtggggcttcgtgcccttcgtggacgagcagcagcccaccgagatccccatccccatcaccctgcacatcggcgactacaacatggacggctaccccgacgccctggtgatcctgaagaacaccagcggcagcaaccagcaggccttcctgctggagaacgtgccctgcaacaacgccagctgcgaggaggccagaagaatgttcaaggtgtactgggagctgaccgacctgaaccagatcaaggacgccatggtggccaccttcttcgacatctacgaggacggcatcctggacatcgtggtgctgagcaagggctacaccaagaacgacttcgccatccacaccctgaagaacaacttcgaggccgacgcctacttcgtgaaggtgatcgtgctgagcggcctgtgcagcaacgactgccccagaaagatcacccccttcggcgtgaaccagcccggcccctacatcatgtacaccaccgtggacgccaacggctacctgaagaacggcagcgccggccagctgagccagagcgcccacctggccctgcagctgccctacaacgtgctgggcctgggcagaagcgccaacttcctggaccacctgtacgtgggcatccccagacccagcggcgagaagagcatcagaaagcaggagtggaccgccatcatccccaacagccagctgatcgtgatcccctacccccacaacgtgcccagaagcagccacagatgcctgtgcttccacctgggcaacaactggcacttcaccctggccggcaaggagagcagatag

SEQ ID NO: 116517 - protein, 580 aa, Artificial Sequence
  derived and/or modified sequence
MAFHVEGLIAIIVFYLLILLVGIWAAWRTKNSGSAEERSEAIIVGGRDIGLLVGGFTMTATWVGGGYINGTAEAVYVPGYGLAWAQAPIGYSLSLILGGLFFAKPMRSKGYVTMLDPFQQIYGKRMGGLLFIPALMGEMFWAAAIFSALGATISVIIDVDMHISVIISALIATLYTLVGGLYSVAYTDVVQLFCIFVGLWISVPFALSHPAVADIGFTAVHAKYQKPWLGTVDSSEVYSWLDSFLLLMLGGIPWQAYFQRVLSSSSATYAQVLSFLAAFGCLVMAIPAILIGAIGASTDWNQTAYGLPDPKTTEEADMILPIVLQYLCPVYISFFGLGAVSAAVMSSADSSILSASSMFARNIYQLSFRQNASDKEIVWVMRITVFVFGASATAMALLTKTVYGLWYLSSDLVYIVIFPQLLCVLFVKGTNTYGAVAGYVSGLFLRITGGEPYLYLQPLIFYPGYYPDDNGIYNQKFPFKTLAMVTSFLTNICISYLAKYLFESGTLPPKLDVFDAVVARHSEENMDKTILVKNENIKLDELALVKPRQSMTLSSTFTNKEAFLDVDSSPEGSGTEDNLQ

SEQ ID NO: 116518 - DNA, 1743 bp, Artificial Sequence
  derived and/or modified sequence
atggccttccacgtggagggcctgatcgccatcatcgtgttctacctgctgatcctgctggtgggcatctgggccgcctggagaaccaagaacagcggcagcgccgaggagagaagcgaggccatcatcgtgggcggcagagacatcggcctgctggtgggcggcttcaccatgaccgccacctgggtgggcggcggctacatcaacggcaccgccgaggccgtgtacgtgcccggctacggcctggcctgggcccaggcccccatcggctacagcctgagcctgatcctgggcggcctgttcttcgccaagcccatgagaagcaagggctacgtgaccatgctggaccccttccagcagatctacggcaagagaatgggcggcctgctgttcatccccgccctgatgggcgagatgttctgggccgccgccatcttcagcgccctgggcgccaccatcagcgtgatcatcgacgtggacatgcacatcagcgtgatcatcagcgccctgatcgccaccctgtacaccctggtgggcggcctgtacagcgtggcctacaccgacgtggtgcagctgttctgcatcttcgtgggcctgtggatcagcgtgcccttcgccctgagccaccccgccgtggccgacatcggcttcaccgccgtgcacgccaagtaccagaagccctggctgggcaccgtggacagcagcgaggtgtacagctggctggacagcttcctgctgctgatgctgggcggcatcccctggcaggcctacttccagagagtgctgagcagcagcagcgccacctacgcccaggtgctgagcttcctggccgccttcggctgcctggtgatggccatccccgccatcctgatcggcgccatcggcgccagcaccgactggaaccagaccgcctacggcctgcccgaccccaagaccaccgaggaggccgacatgatcctgcccatcgtgctgcagtacctgtgccccgtgtacatcagcttcttcggcctgggcgccgtgagcgccgccgtgatgagcagcgccgacagcagcatcctgagcgccagcagcatgttcgccagaaacatctaccagctgagcttcagacagaacgccagcgacaaggagatcgtgtgggtgatgagaatcaccgtgttcgtgttcggcgccagcgccaccgccatggccctgctgaccaagaccgtgtacggcctgtggtacctgagcagcgacctggtgtacatcgtgatcttcccccagctgctgtgcgtgctgttcgtgaagggcaccaacacctacggcgccgtggccggctacgtgagcggcctgttcctgagaatcaccggcggcgagccctacctgtacctgcagcccctgatcttctaccccggctactaccccgacgacaacggcatctacaaccagaagttccccttcaagaccctggccatggtgaccagcttcctgaccaacatctgcatcagctacctggccaagtacctgttcgagagcggcaccctgccccccaagctggacgtgttcgacgccgtggtggccagacacagcgaggagaacatggacaagaccatcctggtgaagaacgagaacatcaagctggacgagctggccctggtgaagcccagacagagcatgaccctgagcagcaccttcaccaacaaggaggccttcctggacgtggacagcagccccgagggcagcggcaccgaggacaacctgcagtag

SEQ ID NO: 116519 - DNA, 1743 bp, Artificial Sequence
  derived and/or modified sequence
atggcattccacgtcgagggacttatcgccattatcgtcttctacctgctgatcctgctcgtcgggatctgggcagcgtggcgtactaaaaatagcggatctgccgaggagcggtctgaggccattatcgttgggggcagggacataggtttgttagtgggcggttttaccatgactgccacatgggttgggggcgggtacattaatggcacggcagaggctgtttacgtccctggctacggccttgcttgggcccaggcccctatcggttatagcctcagcttgattctcggcggcttgttttttgcaaaaccaatgcggagcaaaggctacgttacgatgctggacccgttccagcagatctatggcaagcgtatgggaggcctgctgtttatccccgcgctgatgggggagatgttttgggctgctgccattttttcagcacttggagcaacgattagcgtcatcattgatgtggacatgcatattagtgtgattatcagtgctctgatcgccaccctctacacgctggtcggtggactctatagcgtcgcctacacagatgtggtgcagctgttctgtatcttcgtgggactctggatcagcgtgccatttgctctgtctcaccctgctgttgccgacattggctttacagcagtgcacgccaagtaccaaaagccatggttgggtacagttgattcctcagaggtgtacagctggttagactcctttcttttactgatgctcggaggtatcccttggcaagcttattttcagcgggtgctgtcgtccagcagcgctacctacgcgcaggttctctcatttctggccgccttcggatgcctggttatggctatcccagccatcctgattggggcaatcggggcaagcacggattggaatcagacggcctatgggcttccagaccccaaaacaaccgaagaagccgatatgatcttaccaattgtgcttcagtatttatgccctgtttatatttctttctttggcttgggggcggtgtcagctgcggtcatgagttccgcagacagctcaatcttatccgcgtccagcatgtttgcgcgtaatatatatcagctgagtttccggcagaatgcctctgataaggaaatagtgtgggtcatgaggattactgtgttcgtttttggggcttccgctaccgccatggcccttctgactaagactgtgtatggcctgtggtacctcagcagtgacctcgtttacattgtaatttttccacagctgctctgtgttttgtttgtgaaaggcactaacacgtatggcgccgttgctggttatgtgtcagggctgttcctgcggatcaccggaggcgaaccatatctgtatctgcagccactaatattctaccctggctattacccagacgacaacggtatctataaccaaaagttccccttcaagactctcgcgatggtaacctccttccttactaatatttgcatttcctacctggccaagtatctgttcgaaagcggcaccctgccccctaagctcgatgttttcgatgccgtggttgctcgacactcagaagaaaacatggacaagacaatcctggtgaagaatgagaatatcaagctggacgagcttgccctcgtcaagccccggcagtctatgaccctgagctctacattcacgaacaaagaggcctttctcgacgtggactctagtcccgaagggagtggtaccgaagacaatttgcagtag

SEQ ID NO: 116520 - DNA, 1743 bp, Artificial Sequence
  derived and/or modified sequence
atggcatttcacgtcgagggcttgattgcaattatcgtgttttatttgctgattctcctcgtcgggatttgggccgcatggcgaacaaaaaactccggatctgccgaagaacggtccgaggcaatcattgtaggaggccgggatatcgggctgcttgtgggtggcttcaccatgaccgctacatgggtgggtggaggatatattaatgggactgccgaggcagtttacgtccccggatatggcctggcctgggctcaggccccaataggctactcactgagtctaatcctcgggggtctattctttgctaaacccatgcgttccaaaggctacgtgacaatgctggacccatttcagcagatatatggaaagagaatgggcggcctgctgttcatacccgcactgatgggggaaatgttctgggcagccgccatcttttccgcgctgggagccacaatatcagtcattatcgacgtcgatatgcatatttccgtcatcatttctgctttaattgccaccctttacactctggtcggaggcctctattcagtagcctatactgatgttgtacaattgttttgcatcttcgtgggcctgtggatttctgtaccttttgcactgagccaccccgcagtggctgacatcggtttcaccgctgtgcacgctaagtatcagaagccatggttagggaccgtggattccagcgaggtgtacagttggttggactcctttcttctgctgatgctagggggcatcccttggcaagcctactttcagagggtgctctcaagctcctctgcgacatacgcccaggtcctcagttttctggccgcatttgggtgccttgtgatggcaattccggccatactcatcggtgccatcggcgcatcaacagattggaatcaaactgcttacggcctacctgatcctaaaactactgaggaggccgatatgatcttgcctatcgtactgcaatacctgtgtcctgtttacatttccttcttcggtctgggcgccgtgtccgccgctgtgatgtcgagcgctgatagttctattctgtcagcatcttcgatgtttgctagaaatatttatcagctgtcatttaggcagaacgcttccgacaaggagattgtctgggtgatgagaattacagtattcgtgttcggcgcttcggctacggcaatggccctgctgactaagacggtgtacggtctctggtacctgtcttccgatcttgtctatattgttattttccctcagctcctgtgcgtactgtttgtgaagggcacaaacacttatggagccgtggctgggtatgtgagcgggctgttcttgaggattacggggggggaaccatatctgtacctgcagccactcattttttatccaggctattatccagatgataatggaatttataatcagaaattcccatttaaaaccctggcaatggtcacatctttcctgactaatatctgcatcagttacttagccaaatacctcttcgaaagcggaaccttgccccccaagctggatgtgtttgatgccgttgtggcacggcattccgaggagaacatggacaaaacgatcctggtgaagaatgagaacatcaaactggatgagctcgctctcgtgaaaccccggcaaagtatgaccctaagctctactttcactaacaaagaagctttcttagatgtcgattcctctccagaaggctctggcaccgaggacaatcttcagtag

SEQ ID NO: 116521 - DNA, 1743 bp, Artificial Sequence
  derived and/or modified sequence
atggccttccacgtggagggcctgattgccatcatcgtgttctacctgctgatcctgctggtgggcatctgggccgcctggaggaccaagaacagcggcagcgctgaggagaggtctgaggccatcatcgtgggcggccgggacatcggcctgctggtgggcggcttcaccatgacagccacctgggtgggcggcggctacatcaatggaacagctgaggccgtgtatgtgcccggctacggcctggcctgggcccaggcccccatcggctacagcctgagcctcatcctgggcggcctcttctttgccaagcccatgaggagcaagggctacgtgaccatgctggaccccttccagcagatctacggcaagaggatgggcggcctgctcttcatcccagccctgatgggagagatgttctgggccgccgccatcttcagcgccctgggcgccaccatcagcgtcatcattgatgtggacatgcacatcagcgtcatcatcagcgccctgattgccaccctgtacaccctggtgggcggcctgtacagcgtggcctacacagatgtggtgcagctgttctgcatctttgtgggcctgtggatctctgtgccctttgccctgagccaccctgctgtggccgacatcggcttcaccgctgtgcacgccaagtaccagaagccctggctgggcaccgtggacagcagcgaggtgtacagctggctggacagcttcctgctgctgatgctgggcggcatcccctggcaggcctacttccagagggtgctgagcagcagcagcgccacctacgcccaggtgctgtccttcctggccgccttcggctgcctggtgatggccatcccagccatcctgattggagccatcggggccagcacagactggaaccagacagcctacggcctgcctgaccccaagaccacagaggaggccgacatgatcctgcccatcgtgctgcagtacctgtgccctgtgtacatctccttcttcggcctgggcgctgtgtctgctgctgtgatgagcagcgctgacagcagcatcctgagcgccagctccatgtttgccaggaacatctaccagctgtccttccggcagaatgccagtgacaaggagatcgtgtgggtgatgaggatcaccgtgtttgtgtttggagccagcgccacagccatggccctgctgaccaagacagtgtatggcctgtggtacctgagcagtgacctggtgtacatcgtcatcttcccccagctgctgtgtgtgctgtttgtgaagggcaccaacacctatggagctgtggccggctacgtgtctggcctcttcctgcgcatcaccggcggggagccctacctgtacctgcagcccctcatcttctacccaggctactacccagatgacaatggcatctacaaccagaagttccccttcaagaccctggccatggtgaccagcttcctgaccaacatctgcatctcctacctggccaagtacctgtttgagagcggcaccctgccccccaagctggatgtgtttgatgctgtggtggcccggcacagcgaggagaacatggacaagaccatcctggtgaagaatgaaaacatcaagctggatgagctggccctggtgaagccccggcagagcatgaccctgagcagcaccttcaccaacaaggaggccttcctggatgtggacagcagccctgagggcagcggcacagaggacaacctgcagtag

SEQ ID NO: 116522 - DNA, 1743 bp, Artificial Sequence
  derived and/or modified sequence
atggccttccacgtggagggcctgatcgccatcatcgtgttctacctattgatactcctcgttggcatttgggcggcatggcgtaccaagaattcaggcagtgccgaagagcgtagcgaagccataattgtgggggggagagatatcggcttgttagttggcggttttaccatgactgcaacgtgggtgggcggaggatacatcaatggcaccgccgaggctgtgtacgtgcctggatacggactggcctgggctcaggcacccataggatactcactttctctgatcctggggggactgttctttgctaaacctatgcggtccaaggggtacgtgaccatgctggacccattccagcaaatttatggtaagcgaatgggaggtctgctttttatacctgcattaatgggtgaaatgttctgggctgctgcaatattctccgctttgggggctacaatttccgtgatcatagatgtggatatgcacatcagtgtgatcatctccgccctgatagccactctatatactctcgtgggaggactttacagtgtcgcatataccgacgtggtccagctcttttgcattttcgtgggtctgtggatctcggtccctttcgccttatctcatcccgctgtggcggacattggctttaccgccgtgcatgctaagtaccagaaaccctggcttgggaccgtagacagcagtgaggtttactcatggttggacagcttcttgctgctgatgctgggaggtattccttggcaagcttatttccagagagtgcttagctcgagtagtgctacttatgcgcaggtcctgagctttctcgcggcgtttggatgtctggtgatggccatccccgcgattctcattggcgcaatcggcgcctccaccgattggaatcaaacagcctacggactgccggatccaaaaaccacagaggaagctgacatgatactgccaatcgtccttcagtatctgtgtcccgtgtatatttctttttttggtctcggtgctgtctcggccgccgttatgagctccgcggactcttctatactaagtgcatcttccatgtttgcccgaaatatctaccagctgtccttcagacaaaacgcgtcagataaagaaatcgtctgggtgatgcgaattacggtttttgtgtttggcgctagcgcgacagctatggctcttctgaccaagacagtctatggcctgtggtatctgagttctgatctcgtttatatcgtgatctttccccaactgctgtgcgttctgttcgtgaaaggaacaaatacgtacggcgcagttgctggttacgtgtcagggctgttcttgcgcataactggcggagagccttatctctacctccaacccttgatcttttatcccggatattaccccgacgacaacgggatatacaatcagaaattcccttttaagaccctagccatggtgacctccttcttgaccaacatctgtatctcatacctagctaagtacctttttgaatcaggtaccctcccgcccaagttagatgttttcgacgcagtcgtggcccggcattctgaggagaacatggacaagacaatcctggtcaagaatgagaacattaaattggatgagttagccctggttaagccacgtcagagcatgaccctctcatccacttttacgaacaaagaggcattcctcgacgtagactcttctcctgagggctccggaaccgaggataacctccagtag

SEQ ID NO: 116523 - DNA, 1743 bp, Artificial Sequence
  derived and/or modified sequence
atggccttccacgtggagggcctgatcgccatcatcgtgttctaccttttgattctgttggtgggcatctgggcagcttggcggactaagaattccgggtccgccgaggagagaagcgaagccattatagtgggaggacgtgacatagggctcctagtagggggctttactatgacagccacgtgggttggaggagggtacatcaacggcaccgcggaggccgtttacgtacccggctacggactggcctgggcccaggcacctattggttatagtctttctttaatcttgggggggctcttttttgctaagcccatgagatccaagggatacgtgacaatgttggaccccttccagcagatttacggtaaacgtatgggtggcctattgttcatccctgctctgatgggtgaaatgttttgggctgcagccattttctctgcactgggagctacaattagcgtgattattgatgttgacatgcatattagcgtgatcatcagcgctctgatcgccactttgtacacgttagtgggtggtctatattcagtggcctacactgatgtcgtgcagcttttctgtatcttcgtaggtctgtggatcagcgtgccattcgcactctcccaccccgctgttgccgacattgggtttacagcagtgcatgccaaataccagaagccttggttagggaccgttgacagctctgaggtgtattcttggctcgattcttttttactgttgatgctgggaggcatcccttggcaggcatatttccagagggtgttgagtagcagtagcgcaacctatgcacaggtcctgtcgtttctggctgccttcgggtgcctggtcatggccatcccagccattctcatcggagccattggcgccagtactgactggaaccagaccgcgtacggcctgcccgacccaaagacgactgaggaggccgacatgatcttgcctattgtactacagtacctctgtccggtgtatattagtttctttggactgggcgcagtttccgccgccgtgatgtcatcggctgacagtagtatcctgtcagctagctccatgtttgcaaggaatatctaccaactgagtttcaggcagaacgccagcgacaaggagattgtgtgggtcatgcgtatcacagtgttcgttttcggcgcttccgccacagcaatggctctgctgactaagactgtgtatgggctttggtacctgtcttccgacctggtgtatatcgtcattttcccgcagttgctgtgcgtcctgttcgtaaaaggcacaaacacatatggagcagtggcgggatacgtgagcggacttttcctgagaattactggaggcgaaccttatctgtatctgcaacctcttattttttacccaggttattacccagatgacaatggcatctataatcagaaatttcccttcaagaccctcgctatggttacaagcttcctgaccaacatctgtatatcctatctggccaagtacctcttcgagtcaggcacactgccacctaagctagatgttttcgacgccgtggttgctcgccactccgaggagaacatggacaaaacgatcctggtaaaaaacgagaacataaaattggacgaactggccctggtgaaaccccggcagtcaatgactctcagtagcacatttactaataaagaagccttcttggacgttgacagtagtccagagggctccggaactgaagataatctgcagtag

SEQ ID NO: 116524 - DNA, 1743 bp, Artificial Sequence
  derived and/or modified sequence
atggcctttcatgtggaggggttaatcgctataattgttttctacttactgattctcctggtcggaatctgggcggcttggaggaccaaaaattccggatctgccgaagaacggagcgaggcgattattgttggaggacgggatatcggcttgctggtcggcggattcaccatgacggcaacttgggtggggggtggctacatcaatggcaccgctgaagccgtgtatgtgcccggatacggtcttgcctgggcgcaagctcccatcggatactccttgtccctgattctaggaggcctgttcttcgcgaagccaatgcgctcaaaagggtacgtgaccatgctggatccttttcagcagatttacggaaaaaggatggggggtctgctgttcattcctgcgctgatgggtgaaatgttctgggccgctgccatcttctccgcactcggagccacaatctcggtcatcatcgatgtggatatgcacatctcagtgataatatcagctctaatcgccaccctatacactctggtaggcggtctgtactcagtagcatacacagacgttgtgcagctgttttgcatattcgtgggcctttggattagcgtgccctttgctctaagtcatcccgctgtggccgatattggatttactgctgtccacgcaaagtaccagaagccatggttagggaccgtggactccagcgaggtgtactcctggctcgacagcttcctcctgcttatgctcgggggtataccgtggcaagcttacttccagagagtcctgagctcctcaagcgcaacgtatgcacaggttctttccttccttgctgcattcggttgtcttgttatggccatcccggctatcttgatcggggctatcggtgcttcaacagactggaaccaaaccgcttatgggctgcctgaccctaagactacagaagaagccgacatgatattgcccattgtgttgcagtacctgtgccctgtgtacatttcattctttggcttgggtgccgtttccgcagccgtgatgtcctccgctgactcttctattctgtcagccagttccatgttcgcacggaatatctaccagctgtctttccggcagaacgcgagcgacaaggaaatcgtgtgggtaatgcgcattactgtcttcgtgttcggtgcctccgccactgccatggccctgctgaccaaaaccgtttacggtctctggtatctgagttctgatctcgtttatatcgtgatcttccctcagctcctctgcgtgctgttcgtaaaaggcaccaatacatatggcgcagtggccggttatgtgtctggcctgttcctacggatcaccggaggggaaccatacttgtatctgcagccacttatcttctatccaggctattatccggatgataacggcatttacaatcagaagttcccattcaagaccctcgcaatggtcacgtcttttctgactaacatttgtatctcctacttagcaaagtacctttttgaaagcgggacactgcctcccaagctggacgtctttgatgctgtggtggcacggcatagcgaggagaatatggacaagacaatcctggttaagaatgagaatatcaagttagacgagcttgctctggtaaaaccgcgacagtctatgacactttcatctaccttcaccaacaaggaggccttcctcgacgtcgacagcagtccagagggctccggtaccgaagacaacctgcagtag

SEQ ID NO: 116525 - DNA, 1743 bp, Artificial Sequence
  derived and/or modified sequence
atggcctttcacgtcgaggggctcattgctattatcgtgttctatctgttgatactgcttgtcggcatttgggctgcgtggaggacgaaaaacagcggctccgccgaggaaaggtccgaggctatcatcgtaggagggagagacatcggtttgctggtgggcggattcacaatgactgcaacgtgggttggaggcggatacattaatggcactgccgaagctgtgtatgttcccggatatggactggcttgggctcaggctccaatcggatactcactatctctgattcttggtggtctctttttcgccaagcctatgagatcaaagggctacgtcacgatgttagatcctttccagcaaatatacggtaaaagaatggggggtttgctgtttattcctgctcttatgggcgagatgttctgggccgctgccatcttcagcgccctaggcgctacaattagcgtgataattgacgtggacatgcacatctcggtaatcatatccgcactgatcgcgacgctgtacactctcgtgggtggactttactctgtggcatataccgacgttgtacagctgttctgcatcttcgtgggcctgtggatcagtgtcccctttgcactgagtcatccagcagtggcggacattgggttcaccgccgtacatgctaaataccagaaaccctggttgggcaccgtcgactcttccgaagtctattcttggttggacagctttcttctgttaatgctgggaggcataccatggcaggcctattttcagcgtgtgctctcctctagttcagcaacatatgcacaggtcctgtcattcctggcagcattcggatgccttgtgatggccattcctgctattttaataggcgcaatcggcgcttctaccgattggaaccaaacagcctatggcctgccagacccgaaaacaaccgaggaggccgacatgatcctaccgatcgtgctgcagtatctgtgtcctgtgtacatttctttttttggcttgggggctgtgagcgccgcagtaatgagcagcgcggatagttccatcctttcagctagctccatgtttgccagaaatatttaccaactcagcttccgccaaaacgctagcgacaaggaaattgtctgggtgatgcgcattactgtatttgtcttcggagcaagcgctacagcgatggccctgcttacaaagactgtgtatggcctctggtaccttagctcggatctggtatatatcgtgatctttccgcagctgctctgtgttctgtttgtgaagggcactaacacgtacggcgcagtggcgggttatgtgtctggattatttctgcgcattactggaggggagccctatctttatctgcagccactcatattttatcctggatattacccggatgacaacggcatctataatcagaagttccctttcaaaaccctggctatggttacttcttttctcaccaacatctgcatctcttatctggccaagtatctgtttgaatctgggaccctccctcctaagcttgacgtattcgacgccgtggtggctagacactctgaagagaatatggataagactatattagtgaaaaacgagaatataaaactggatgagctggcacttgttaaaccgagacagtccatgaccctgtcaagcacctttacaaacaaagaggcctttctggacgtagactcctctcccgaaggcagtggcactgaagataacctgcaatag

SEQ ID NO: 116526 - DNA, 5152 bp, Artificial Sequence
  derived and/or modified sequence
ctgcgccgcgcgccctccgccggcgccaacacctgtcaactctgcgcgctcccaggttcttggagacgccgagtgaggagccgccctgaccgcccggccccgctccgcactgcaccccgacccaccccgcaccctccctttctgcaccctcgcacccacacccctcgcggttccagggggcggcggccccgggcggagcgctttcgcgtgcagccaccactccagaagacttaatgaagtagccagctgcagaagaatctggatcattagataaaaatggctttccatgtggaaggactgatagctatcatcgtgttctaccttctaattttgctggttggaatatgggctgcctggagaaccaaaaacagtggcagcgcagaagagcgcagcgaagccatcatagttggtggccgagatattggtttattggttggtggatttaccatgacagctacctgggtcggaggagggtatatcaatggcacagctgaagcagtttatgtaccaggttatggcctagcttgggctcaggcaccaattggatattctcttagtctgattttaggtggcctgttctttgcaaaacctatgcgttcaaaggggtatgtgaccatgttagacccgtttcagcaaatctatggaaaacgcatgggcggactcctgtttattcctgcactgatgggagaaatgttctgggctgcagcaattttctctgctttgggagccaccatcagcgtgatcatcgatgtggatatgcacatttctgtcatcatctctgcactcattgccactctgtacacactggtgggagggctctattctgtggcctacactgatgtcgttcagctcttttgcatttttgtagggctgtggatcagcgtcccctttgcattgtcacatcctgcagtcgcagacatcgggttcactgctgtgcatgccaaataccaaaagccgtggctgggaactgttgactcatctgaagtctactcttggcttgatagttttctgttgttgatgctgggtggaatcccatggcaagcatactttcagagggttctctcttcttcctcagccacctatgctcaagtgctgtccttcctggcagctttcgggtgcctggtgatggccatcccagccatactcattggggccattggagcatcaacagactggaaccagactgcatatgggcttccagatcccaagactacagaagaggcagacatgattttaccaattgttctgcagtatctctgccctgtgtatatttctttctttggtcttggtgcagtttctgctgctgttatgtcatcagcagattcttccatcttgtcagcaagttccatgtttgcacggaacatctaccagctttccttcagacaaaatgcttcggacaaagaaatcgtttgggttatgcgaatcacagtgtttgtgtttggagcatctgcaacagccatggccttgctgacgaaaactgtgtatgggctctggtacctcagttctgaccttgtttacatcgttatcttcccccagctgctttgtgtactctttgttaagggaaccaacacctatggggccgtggcaggttatgtttctggcctcttcctgagaataactggaggggagccatatctgtatcttcagcccttgatcttctaccctggctattaccctgatgataatggtatatataatcagaaatttccatttaaaacacttgccatggttacatcattcttaaccaacatttgcatctcctatctagccaagtatctatttgaaagtggaaccttgccacctaaattagatgtatttgatgctgttgttgcaagacacagtgaagaaaacatggataagacaattcttgtcaaaaatgaaaatattaaattagatgaacttgcacttgtgaagccacgacagagcatgaccctcagctcaactttcaccaataaagaggccttccttgatgttgattccagtccagaagggtctgggactgaagataatttacagtgaccccatctaaataaaatactgcttttgcaaacagaacactgtaatagggtagttctggagagatggtatgcagcatacaaaaatatattaaaaatataaacaatgttcaggagagtaaaaattcatataaagtgcaattgcacaaatacaagccaagctagaaggaagcacctatgaaagcaacaactttgtttctcatccatagtagtattgattttgatgctagatagttttgctaggtataaaaaataagtaaagttccacttagagaacaaagggccaaatagagtttttatatttgttatgataaaaggaagtagatgtgaaaaagcctaagaaaaaggaaattggacagttttgatacaaactttgtttgctaatgcactgatgagtctagtttcattatagcacgaagctatgagaataacttcagtcactcccttgaatggtgcaatgaattaaccagctgatttttcttagtgtgatgattaaccccttctttcatgttctgagctataacatttgctgaatatgcaatttgttattcttttattaatggcatgtaatattctgagcacgggcaaagaaaacacacaaaagattatgtattggcatttatttatgtgcaaggtgataggaaaactgaatccatctttgtagaagagcactgggctaatttgtatgtttccatagctactatatgcataaacaacagtacctgaaggattattaagcaaccttaaagcaataagttcattaaacagaaggtaataggaagaacagtacatttttgtctttatctcaagtatataaagttttgccccatgataaaataagtaacatataaattaatacataagttaatattggaagtgaaattaggccttatgtaaggagaggtagctacacagcatctgttacggttaatgagaggcacactgctaaatttacgtatatttcattgaatactttatgggaagcctccacaacacctcctgatagtagtaaaattagaaaaaaacaaactctactaatttttagatattcattaataggaaagatttaatgttacagcatctactctttggcactttttcacataagccagccttagagactagacaaataactactgcaaaaagtacatagtgaattttaaaatgtagaagaaagcaaaaaataaaataagtcctaaagtgaagaagccatcaattttaacatttgatgtctagataacattcatgagattggtcattaaatactattttgctccttttctggtgttacacatacacactcatacgtgtgtgtgtgtgtatgtgtgtgtgtgtatgtgtaatgatttgtgtccatttcaagtgttttcacaccagtcacacattatagaaattactggagccatgtctacaaaagcaaagtgaagtgatgagctgaaaagtgatcagggaatctgatcccataaagaaagtgagtctgaattgttgaaactaaagcacttcttttccaaaaatacttctgcaactcatgaacaaaatgaagttaacttagtgtttagcattaaaaataaaagttgtaccttgaccctagaattccttttataagatttaattgtaattgtctcaaagcatcaaataatacatctttatcattaaacatgaatttaatgtctaggataatttttaaaagaggaaattaaataattttacatgtctcatattttcagtgctttctcaaaatttgatggtgaatattacattgcattcaaaatcttcactgaatatcatatgtatctaaatgaaaagagaattacttatattcatctattttctcagaatctattcagtaccctatggagtacatggaagaagtatatttttggaaccagtaagtatgggagtccacgattctcaggtattgattgaaaaaagagaaaggggcaagaaattcattaaagaaaaaccacagatactgaaacatttgacacataaaagtaattaattgctggagactacaattcctggcaaacaccattattccagatgcaccatgctacccagcatgctacctgaatggcggtttttatccatcctgtcaccctgagcatctgtctcaacctgctgaggcacagacttccaccatgtgcatcaggaaacacctcactcatactgtcatataatgcaacagggaggcatagtctctctacaggtctctctctttacgttgtaccattctgttgggcaacaattgtcccaacaaccacacttaaatccagtggggaaaaaaaggttaacagtaaaaatttcttccacgtaattcaatttctcacaatagacagaaacagggggaaaatgtttgccctgttcaaagtactaaaactagataacttaaataatttaagccaataaataatattatattgtatttaacccattattcctcacctaccctcaaagtaggtatacaaaagactagtttgttattaatccacaaatatgctaaatgttagcaagatgatttttaagtacaaaaaagtttaagattgcaaggaaggaaacaatggtcacaaggtctttacttatgcacatttgtgcataaatttccacccaatttccaagacagttgtatcacaaagctgtgaaatgtgcaagagtatactttgtacccatcatgtgctctgttttgacataatgagtaatgcagacatttacatgttcttccagcttcaatcagtagacctgattttcaaaatctgccctcagatgaaaataaaataaacgaaacatttagacaatggctatattaatctgggaaggcaacacctgtggataaaacattagaagaaaacatatattttattttcatacttttgatatgattgtaacatatttcttgagtaatttaaatgctttgttttcccacacatattcaaatcagcaagcttgtagctggactgcaatatcaacaacaagttgtttcaaacagcatcaaaatacaacttcattgctacacttacaagtaatgaattttatgtgactatgaaacgaatataagcttaaaataagtgaatctaataaaatggctattcctctttttacttggaaataataaattaacattatattttaaacataaa

SEQ ID NO: 116527 - DNA, 2032 bp, Artificial Sequence
  derived and/or modified sequence
cgattcccacctcgccctgcgccgcgcgccctccgccggcgccaacacctgtcaactctgcgcgctcccaggttcttggagacgccgagtgaggagccgccctgaccgcccggccccgctccgcactgcaccccgacccaccccgcaccctccctttctgcaccctcgcacccacacccctcgcggttccagggggcggcggccccgggcggagcgctttcgcgtgcagccaccactccagacttaatgaagtagccagctgcagaagaatctggatcattagataaaaatggctttccatgtggaaggactgatagctatcatcgtgttctaccttctaattttgctggttggaatatgggctgcctggagaaccaaaaacagtggcagcgcagaagagcgcagcgaagccatcatagttggtggccgagatattggtttattggttggtggatttaccatgacagctacctgggtcggaggagggtatatcaatggcacagctgaagcagtttatgtaccaggttatggcctagcttgggctcaggcaccaattggatattctcttagtctgattttaggtggcctgttctttgcaaaacctatgcgttcaaaggggtatgtgaccatgttagacccgtttcagcaaatctatggaaaacgcatgggcggactcctgtttattcctgcactgatgggagaaatgttctgggctgcagcaattttctctgctttgggagccaccatcagcgtgatcatcgatgtggatatgcacatttctgtcatcatctctgcactcattgccactctgtacacactggtgggagggctctattctgtggcctacactgatgtcgttcagctcttttgcatttttgtagggctgtggatcagcgtcccctttgcattgtcacatcctgcagtcgcagacatcgggttcactgctgtgcatgccaaataccaaaagccgtggctgggaactgttgactcatctgaagtctactcttggcttgatagttttctgttgttgatgctgggtggaatcccatggcaagcatactttcagagggttctctcttcttcctcagccacctatgctcaagtgctgtccttcctggcagctttcgggtgcctggtgatggccatcccagccatactcattggggccattggagcatcaacagactggaaccagactgcatatgggcttccagatcccaagactacagaagaggcagacatgattttaccaattgttctgcagtatctctgccctgtgtatatttctttctttggtcttggtgcagtttctgctgctgttatgtcatcagcagattcttccatcttgtcagcaagttccatgtttgcacggaacatctaccagctttccttcagacaaaatgcttcggacaaagaaatcgtttgggttatgcgaatcacagtgtttgtgtttggagcatctgcaacagccatggccttgctgacgaaaactgtgtatgggctctggtacctcagttctgaccttgtttacatcgttatcttcccccagctgctttgtgtactctttgttaagggaaccaacacctatggggccgtggcaggttatgtttctggcctcttcctgagaataactggaggggagccatatctgtatcttcagcccttgatcttctaccctggctattaccctgatgataatggtatatataatcagaaatttccatttaaaacacttgccatggttacatcattcttaaccaacatttgcatctcctatctagccaagtatctatttgaaagtggaaccttgccacctaaattagatgtatttgatgctgttgttgcaagacacagtgaagaaaacatggataagacaattcttgtcaaaaatgaaaatattaaattagatgaacttgcacttgtgaagccacgacagagcatgaccctcagctcaactttcaccaataaagaggccttccttgatgttgattccagtccagaagggtctgggactgaagataatttacagtga

SEQ ID NO: 116528 - DNA, 1914 bp, Artificial Sequence
  derived and/or modified sequence
gattcccacctcgccctgcgccgcgcgccctccgccggcgccaacacctgtcaactctgcgcgctcccaggttcttggagacgccgagtgaggagccgccctgaccgcccggccccgctccgcactgcaccccgacccaccccgcaccctccctttctgcaccctcgcacccacacccctcgcggttccagggggcggcggccccgggcggagcgctttcgcgtgcagccaccactccagctacctgggtcggaggagggtatatcaatggcacagctgaagcagtttatgtaccaggttatggcctagcttgggctcaggcaccaattggatattctcttagtctgattttaggtggcctgttctttgcaaaacctatgcgttcaaaggggtatgtgaccatgttagacccgtttcagcaaatctatggaaaacgcatgggcggactcctgtttattcctgcactgatgggagaaatgttctgggctgcagcaattttctctgctttgggagccaccatcagcgtgatcatcgatgtggatatgcacatttctgtcatcatctctgcactcattgccactctgtacacactggtgggagggctctattctgtggcctacactgatgtcgttcagctcttttgcatttttgtagggctgtggatcagcgtcccctttgcattgtcacatcctgcagtcgcagacatcgggttcactgctgtgcatgccaaataccaaaagccgtggctgggaactgttgactcatctgaagtctactcttggcttgatagttttctgttgttgatgctgggtggaatcccatggcaagcatactttcagagggttctctcttcttcctcagccacctatgctcaagtgctgtccttcctggcagctttcgggtgcctggtgatggccatcccagccatactcattggggccattggagcatcaacagactggaaccagactgcatatgggcttccagatcccaagactacagaagaggcagacatgattttaccaattgttctgcagtatctctgccctgtgtatatttctttctttggtcttggtgcagtttctgctgctgttatgtcatcagcagattcttccatcttgtcagcaagttccatgtttgcacggaacatctaccagctttccttcagacaaaatgcttcggacaaagaaatcgtttgggttatgcgaatcacagtgtttgtgtttggagcatctgcaacagccatggccttgctgacgaaaactgtgtatgggctctggtacctcagttctgaccttgtttacatcgttatcttcccccagctgctttgtgtactctttgttaagggaaccaacacctatggggccgtggcaggttatgtttctggcctcttcctgagaataactggaggggagccatatctgtatcttcagcccttgatcttctaccctggctattaccctgatgataatggtatatataatcagaaatttccatttaaaacacttgccatggttacatcattcttaaccaacatttgcatctcctatctagccaagtatctatttgaaagtggaaccttgccacctaaattagatgtatttgatgctgttgttgcaagacacagtgaagaaaacatggataagacaattcttgtcaaaaatgaaaatattaaattagatgaacttgcacttgtgaagccacgacagagcatgaccctcagctcaactttcaccaataaagaggccttccttgatgttgattccagtccagaagggtctgggactgaagataatttacagtgaccccatctaaataaaatactgcttttgcaaacagaacactgtaatagggtagttctggagagatggtatgcagcatacaaaaatatattaaaaatataaacaatgttca

SEQ ID NO: 116529 - protein, 475 aa, Artificial Sequence
  derived and/or modified sequence
MRSKGYVTMLDPFQQIYGKRMGGLLFIPALMGEMFWAAAIFSALGATISVIIDVDMHISVIISALIATLYTLVGGLYSVAYTDVVQLFCIFVGLWISVPFALSHPAVADIGFTAVHAKYQKPWLGTVDSSEVYSWLDSFLLLMLGGIPWQAYFQRVLSSSSATYAQVLSFLAAFGCLVMAIPAILIGAIGASTDWNQTAYGLPDPKTTEEADMILPIVLQYLCPVYISFFGLGAVSAAVMSSADSSILSASSMFARNIYQLSFRQNASDKEIVWVMRITVFVFGASATAMALLTKTVYGLWYLSSDLVYIVIFPQLLCVLFVKGTNTYGAVAGYVSGLFLRITGGEPYLYLQPLIFYPGYYPDDNGIYNQKFPFKTLAMVTSFLTNICISYLAKYLFESGTLPPKLDVFDAVVARHSEENMDKTILVKNENIKLDELALVKPRQSMTLSSTFTNKEAFLDVDSSPEGSGTEDNLQ

SEQ ID NO: 116530 - DNA, 1428 bp, Artificial Sequence
  derived and/or modified sequence
atgagaagcaagggctacgtgaccatgctggaccccttccagcagatctacggcaagagaatgggcggcctgctgttcatccccgccctgatgggcgagatgttctgggccgccgccatcttcagcgccctgggcgccaccatcagcgtgatcatcgacgtggacatgcacatcagcgtgatcatcagcgccctgatcgccaccctgtacaccctggtgggcggcctgtacagcgtggcctacaccgacgtggtgcagctgttctgcatcttcgtgggcctgtggatcagcgtgcccttcgccctgagccaccccgccgtggccgacatcggcttcaccgccgtgcacgccaagtaccagaagccctggctgggcaccgtggacagcagcgaggtgtacagctggctggacagcttcctgctgctgatgctgggcggcatcccctggcaggcctacttccagagagtgctgagcagcagcagcgccacctacgcccaggtgctgagcttcctggccgccttcggctgcctggtgatggccatccccgccatcctgatcggcgccatcggcgccagcaccgactggaaccagaccgcctacggcctgcccgaccccaagaccaccgaggaggccgacatgatcctgcccatcgtgctgcagtacctgtgccccgtgtacatcagcttcttcggcctgggcgccgtgagcgccgccgtgatgagcagcgccgacagcagcatcctgagcgccagcagcatgttcgccagaaacatctaccagctgagcttcagacagaacgccagcgacaaggagatcgtgtgggtgatgagaatcaccgtgttcgtgttcggcgccagcgccaccgccatggccctgctgaccaagaccgtgtacggcctgtggtacctgagcagcgacctggtgtacatcgtgatcttcccccagctgctgtgcgtgctgttcgtgaagggcaccaacacctacggcgccgtggccggctacgtgagcggcctgttcctgagaatcaccggcggcgagccctacctgtacctgcagcccctgatcttctaccccggctactaccccgacgacaacggcatctacaaccagaagttccccttcaagaccctggccatggtgaccagcttcctgaccaacatctgcatcagctacctggccaagtacctgttcgagagcggcaccctgccccccaagctggacgtgttcgacgccgtggtggccagacacagcgaggagaacatggacaagaccatcctggtgaagaacgagaacatcaagctggacgagctggccctggtgaagcccagacagagcatgaccctgagcagcaccttcaccaacaaggaggccttcctggacgtggacagcagccccgagggcagcggcaccgaggacaacctgcagtag

SEQ ID NO: 116531 - DNA, 1428 bp, Artificial Sequence
  derived and/or modified sequence
atgcggtctaaaggatacgttaccatgctggacccattccaacagatctatgggaaacgaatgggaggcctgctgttcattcccgcactgatgggagagatgttctgggccgcagccatattcagtgccctgggagccacaattagtgtcatcattgatgtggacatgcatatttccgtcatcatttcagccttaatcgccactctctacaccttagtgggagggctctactccgtggcttatactgatgtggtgcaacttttctgcatctttgtcggcctgtggatttccgtgccctttgccttaagccacccagcggttgccgacataggtttcactgcagtgcatgccaaatatcaaaaaccttggctgggcaccgtggacagcagcgaagtttactcctggctggacagcttccttttacttatgttgggaggcatcccatggcaggcatattttcagagggtgttatcaagctcatcagcaacctatgcccaagtcctgtcctttctagctgcttttggatgccttgtgatggccatccccgctatattgattggagccatcggagccagtactgattggaaccagaccgcctatgggctccccgatcccaaaacaacagaggaggccgatatgatcttgccaatcgtactccagtacctctgtcccgtgtacatctctttttttggcctgggggccgtttccgctgctgtcatgtcctcagctgacagctctatcctgagtgcttcctctatgttcgccagaaacatctatcagcttagtttcagacagaatgcctcagataaagagattgtgtgggtcatgcgaataaccgtatttgtatttggcgccagcgccacagctatggccctcttgaccaagaccgtgtacgggctctggtacctgagttcagacctggtttacattgttatcttcccccaactgttatgtgtgcttttcgtgaaaggcaccaatacttacggggccgtggccggatatgtttcaggcctctttctgcggatcacgggcggcgaaccctatctctacttgcaacccctcattttctatccagggtattaccccgatgataatggcatctataatcaaaagttccctttcaagacactcgcgatggtgactagcttcctgaccaacatctgcatctcctatttagctaaatatctcttcgaatcgggtaccctcccaccaaagttagacgtttttgacgcagtagtggcgcggcatagcgaagaaaacatggataagactatattggttaagaacgagaatatcaaattggatgaattggcactggtgaagccaagacagagcatgaccctgtcttccaccttcaccaacaaggaggctttcctggatgttgattcatccccggagggatctgggacagaagacaacctgcaatag

SEQ ID NO: 116532 - DNA, 1428 bp, Artificial Sequence
  derived and/or modified sequence
atgaggagcaagggctacgtgaccatgctggaccccttccagcagatctacggcaagaggatgggcggcctgctcttcatcccagccctgatgggagagatgttctgggccgccgccatcttcagcgccctgggcgccaccatcagcgtcatcattgatgtggacatgcacatcagcgtcatcatcagcgccctgattgccaccctgtacaccctggtgggcggcctgtacagcgtggcctacacagatgtggtgcagctgttctgcatctttgtgggcctgtggatctctgtgccctttgccctgagccaccctgctgtggccgacatcggcttcaccgctgtgcacgccaagtaccagaagccctggctgggcaccgtggacagcagcgaggtgtacagctggctggacagcttcctgctgctgatgctgggcggcatcccctggcaggcctacttccagagggtgctgagcagcagcagcgccacctacgcccaggtgctgtccttcctggccgccttcggctgcctggtgatggccatcccagccatcctgattggagccatcggggccagcacagactggaaccagacagcctacggcctgcctgaccccaagaccacagaggaggccgacatgatcctgcccatcgtgctgcagtacctgtgccctgtgtacatctccttcttcggcctgggcgctgtgtctgctgctgtgatgagcagcgctgacagcagcatcctgagcgccagctccatgtttgccaggaacatctaccagctgtccttccggcagaatgccagtgacaaggagatcgtgtgggtgatgaggatcaccgtgtttgtgtttggagccagcgccacagccatggccctgctgaccaagacagtgtatggcctgtggtacctgagcagtgacctggtgtacatcgtcatcttcccccagctgctgtgtgtgctgtttgtgaagggcaccaacacctacggggctgtggccggctacgtgtctggcctcttcctgcgcatcactggaggagagccctacctgtacctgcagcccctcatcttctacccaggctactacccagatgacaatggcatctacaaccagaagttccccttcaagaccctggccatggtgaccagcttcctgaccaacatctgcatctcctacctggccaagtacctgtttgaaagtggcaccctgccccccaagctggatgtgtttgatgctgtggtggcccggcacagcgaggagaacatggacaagaccatcctggtgaagaatgaaaacatcaagctggatgagctggccctggtgaagccccggcagagcatgaccctgagcagcaccttcaccaacaaggaggccttcctggatgtggacagcagccctgagggcagcggcacagaggacaacctgcagtag

SEQ ID NO: 116533 - DNA, 1428 bp, Artificial Sequence
  derived and/or modified sequence
atgcggagcaagggctacgtgaccatgctggaccccttccagcagatttatgggaaacgcatgggtgggctgctttttatcccggcactgatgggcgagatgttttgggccgcagctattttctctgctttgggcgcaactattagcgtgatcatagacgtggacatgcacattagcgttattattagtgcactcattgctacactgtacacgctggttggtggcctttacagcgtagcatatacagacgtggttcaattgttttgcattttcgttgggctctggatttcagtgcctttcgctttgagtcaccccgcggtggccgatataggcttcacggccgtgcatgctaaataccagaagccctggttggggactgtagactcctccgaagtctactcctggctcgacagtttcctgttactcatgcttggtggaattccatggcaggcttattttcaacgcgtgctgtctagttcaagcgcgacttatgcacaagttctgagcttcctggctgcgttcgggtgtctggtcatggccatacctgcgatactcatcggggccataggcgcatctactgactggaaccagacagcgtatggcctccctgacccgaaaacaactgaagaagcagatatgattctgccaatcgtgctccagtatctgtgtcctgtctatatctcatttttcgggctgggggcagtttcggccgctgtgatgagcagcgctgattcaagcatcctgtctgcctcgagcatgttcgcaagaaatatttaccagcttagttttcgccagaatgcctcagataaagagattgtctgggtgatgcgcatcaccgtttttgtctttggcgcatccgctaccgccatggctctgcttacaaagactgtgtacggtctgtggtatctgtcgtccgatctagtgtacatagtaatcttcccccaactcctgtgcgttctctttgtcaagggcactaacacatacggagccgtggcgggttacgtgtctggcttgtttctgcggattactgggggtgaaccttatctgtacctgcagccattgatcttttaccccgggtactatcccgacgataacggcatttacaatcaaaagtttcctttcaaaacacttgctatggtgacatccttcctgacaaatatttgcatttcatacctggcaaaatacctgttcgagtcaggcaccctgcctccaaaattagacgtcttcgatgcagtcgttgcacggcacagcgaagagaatatggacaaaaccatcttggtcaagaacgagaacattaagctggatgaacttgccttagtgaagccaaggcagtctatgaccctgagctccacatttactaataaagaggccttcctggacgtggactcatctccagagggaagcggcaccgaagataatctgcagtag

SEQ ID NO: 116534 - DNA, 1428 bp, Artificial Sequence
  derived and/or modified sequence
atgcggagcaaaggatatgtgactatgcttgaccccttccaacaaatctatggaaagcggatgggcggactactgttcatcccagccctgatgggcgaaatgttctgggccgcagctatattttccgccttaggcgcaactatcagcgttatcatcgacgtggacatgcatatttcggttatcatcagtgcattgattgccacactgtatacattggtcgggggtctgtactctgttgcatacactgacgtggtgcagctgttctgtatcttcgtgggcctatggatctccgtgccatttgccctgtcccacccagccgtggctgatatcgggttcacagccgtccacgctaagtatcagaaaccctggctggggacagtggattcaagcgaggtatactcgtggctagactcctttttgctgctcatgttaggtggaattccttggcaagcatactttcagagagtactatcctctagcagtgcaacgtacgcacaagtccttagcttcctggcagctttcgggtgtttggtgatggccatccccgctatactcataggagccatcggtgcctccaccgattggaatcagacagcgtatggtctacctgatccaaaaaccaccgaggaagcagatatgatccttcctatcgtgttgcaatatctctgtcccgtgtacatctccttctttgggttaggtgccgtatccgctgcagtgatgtcgtctgccgattcttcaatcctgagcgcatctagtatgttcgcgagaaacatttaccagctctccttccggcaaaacgcgtccgataaggagatcgtgtgggtgatgcgtattacagtgtttgtgttcggagcctcggccacagctatggctcttttgacaaaaacggtctacggtttgtggtacctgtcgagtgatttagtgtacattgtcatcttcccccagcttttgtgcgtccttttcgtgaagggaacaaacacctacggggctgttgccggttacgtctccgggttattcctccgcatcacaggaggagagccttacttatatctgcagccactgattttctatccaggatattatcccgatgataacggtatctataaccagaagtttcccttcaagactttggccatggtaacctcttttctcacaaacatatgtatttcgtaccttgccaagtatctgttcgaatccggaacattacctcccaaactcgacgttttcgatgccgttgttgctagacactcggaagaaaacatggataaaactattctggtaaaaaacgaaaacataaagttagatgagctggcgttagtcaaaccgcgacaatctatgaccctctcctctacttttacaaacaaggaggcgtttctcgacgtagatagcagtcccgagggttctggcacagaagacaatttacagtag

SEQ ID NO: 116535 - DNA, 639 bp, Artificial Sequence
  derived and/or modified sequence
ctttttgacgtccaagagtgacagagcctcaagcactcctggggaccgggctgacttttctccactggcttggttgggaactggcttcttcggagctgtgtagtcttaatttgctttgctgctggctggctgacagctgatgggggactcctcaggacggactcccttccagatgcacccatctccatccttctcaactccccaacctttgtcctccccactcttcgctcgcgcggcggtctgagaccaccaggaccagtttcaggggtttccttctccagcgagacttggcagaacaggctttaaaagcaaaggaggcagcggaagactgtgaattcctttggacaattgatgatatttatcattgtgcccagtttctacaaataaaagatgggtggattattttctcgatggaggacaaaaccttcaactgtagaagttctagaaagtatagataaggaaattcaagcattggaagaatttagggaaaaaaatcagagattacaaaaattatgggttggaagattaattctgtattcctcagttctctatctgtttacatgcttaattgtatatttgtggtatcttcctgatgaatttacagcaagacttgccatgacactcccattttttgctttt

SEQ ID NO: 116536 - protein, 83 aa, Artificial Sequence
  derived and/or modified sequence
MGGLFSRWRTKPSTVEVLESIDKEIQALEEFREKNQRLQKLWVGRLILYSSVLYLFTCLIVYLWYLPDEFTARLAMTLPFFAF

SEQ ID NO: 116537 - protein, 459 aa, Artificial Sequence
  derived and/or modified sequence
MGGLFSRWRTKPSTVEVLESIDKEIQALEEFREKNQRLQKLWVGRLILYSSVLYLFTCLIVYLWYLPDEFTARLAMTLPFFAFPLIIWSIRTVIIFFFSKRTERNNEALDDLKSQRKKILEEVMEKETYKTAKLILERFDPDSKKAKECEPPSAGAAVTARPGQEIRQRTAAQRNLSPTPASPNQGPPPQVPVSPGPPKDSSAPGGPPERTVTPALSSNVLPRHLGSPATSVPGMEMGLPHIAQAGLEHLSSSDLSTSTSQSAGITGLHPPGPPLARPILPRERGALDRIVEYLVGDGPQNRYALICQQCFSHNGMALKEEFEYIAFRCAYCFFLNPARKTRPQAPRLPEFSFEKRQVVEGSSSVGPLPSGSVLSSDNQFNEESLEHDVLDDNTEQTDDKIPATEQTNQVIEKASDSEEPEEKQETENEEASVIETNSTVPGADSIPDPELSGESLTAE

SEQ ID NO: 116538 - DNA, 1380 bp, Artificial Sequence
  derived and/or modified sequence
atgggtggactattcagccgatggcgcacaaaaccctccacggtggaggtcctagagtctatagacaaagagatacaggccctggaagagtttcgcgaaaaaaaccagcgattgcaaaaactctgggttgggagactgattttgtacagttctgtgctgtacctcttcacgtgtctaatcgtatacctgtggtacctcccagatgaattcactgcccggcttgcaatgacactccccttctttgcctttccactgatcatatggtctatcagaaccgtgattatcttcttcttcagcaaacgcactgagcgcaataacgaagctctcgacgacctcaaaagccagaggaagaaaatactggaggaagttatggagaaagagacatataaaacagccaaactcattctggaacgcttcgacccggacagcaaaaaagcaaaggagtgcgagcctcctagtgcaggagccgcagtaacggctcggccaggccaggaaattcgacaaaggacagccgctcaaagaaacctgtcccctaccccggcctctcccaatcaaggtcccccgcctcaggtgccagtttcgcccgggccccctaaagactcgtcggcccccggcggacccccagaacgcactgtaaccccggccctgagttccaacgtgttaccgagacacttgggttcccccgccacaagtgttccaggcatggagatggggctgccccacatcgcccaggccggattggagcacttgagtagcagtgatctcagtacatcaaccagccagtctgcaggtatcacagggttacacccgcccggccctccactagcccggccaattttacctagggagagaggggccctagacagaatcgtcgaatatcttgttggtgacggtccccagaaccggtacgccctcatatgccaacaatgcttctcccataatggaatggcgcttaaagaggagtttgagtacatcgccttccgctgtgcgtattgttttttcttaaatccggctagaaagactcggccacaggccccacggctgccagaattcagctttgaaaagcggcaggttgtggaagggtcaagctctgtaggtcccttgccctctggttctgttctgtcatctgacaatcagttcaatgaggagtctctggaacacgacgtcctggacgacaacaccgaacagaccgacgacaagatccctgcaacagaacagacaaaccaggtgatcgagaaggccagcgactcggaagaacctgaagagaaacaggaaaccgagaacgaggaagcttcagttatcgaaacaaactccacggtgcccggagcagactctatcccagaccctgaattaagcggcgaaagcctaactgcagagtag

SEQ ID NO: 116539 - DNA, 1380 bp, Artificial Sequence
  derived and/or modified sequence
atgggcggcctcttcagccgctggaggaccaagcccagcacagtggaggtgctggagagcattgacaaggagatccaggccctggaggagttccgggagaagaaccagaggctgcagaagctgtgggtgggccgcctcatcctgtacagctctgtgctgtacctgttcacctgcctgattgtgtacctgtggtacctgcctgatgagttcaccgcccggctggccatgaccctgcccttctttgccttccccctcatcatctggagcatccgcaccgtcatcatcttcttcttcagcaagaggacagagaggaacaatgaggccctggatgacctgaagagccagaggaagaagatcctggaggaggtgatggagaaggagacctacaagacagccaagctgatcctggagagatttgatcctgacagcaagaaggccaaggaatgtgagcccccatctgctggagctgctgtgacagcccggcccggccaggagatccggcagaggacagctgcccagaggaacctgagccccaccccagccagccccaaccagggccccccaccccaggtgcctgtgtccccaggcccccccaaggacagcagcgcccctgggggccccccagagaggacagtgaccccagccctgagcagcaatgtgctgcccaggcacctgggcagccctgccacctctgtgcccggcatggagatgggcctgccccacatcgcccaggccggcctggagcacctgagcagcagtgacctgagcaccagcaccagccagagcgctggcatcaccggcctgcaccccccaggcccccccctggcccggcccatcctgccccgggagcggggggccctggaccgcatcgtggagtacctggtgggagatggcccccagaacagatatgccctgatctgccagcagtgcttcagccacaacggcatggccctgaaggaggagtttgagtacatcgccttccgctgtgcctactgcttcttcctgaacccagccaggaagacccggccccaggccccccggctgcctgagttctcctttgagaagaggcaggtggtggagggcagcagctctgtgggccccctgcccagcggctctgtgctgagcagtgacaaccagttcaatgaggagagcctggagcatgatgtgctggatgacaacacagagcagacagatgacaagatcccagccacagagcagaccaaccaggtgattgagaaggccagtgacagcgaggagcctgaggagaagcaggagacagaaaatgaggaggccagcgtcatcgagaccaacagcacagtgcctggagctgacagcatcccagaccctgagctgagcggggagagcctgacagctgagtag

SEQ ID NO: 116540 - DNA, 1380 bp, Artificial Sequence
  derived and/or modified sequence
atgggcggcctgttcagccggtggcggaccaagcccagcaccgtggaggtactggaatctatcgacaaggagatccaggctttggaagagtttagagagaaaaaccaaaggctgcagaagctttgggtgggccgactgatcctgtactcaagcgtactgtaccttttcacctgcctgatcgtgtacctatggtacctgcccgatgagttcacagctcgactggcaatgacactgcccttcttcgctttccccctgattatatggtctatccgcacagtcataatattcttttttagcaagcgcactgagaggaacaacgaagcccttgacgatttgaaatctcaacggaagaagattctggaggaagtgatggaaaaagagacctacaaaaccgccaagttaatcctcgaacgttttgatcccgactctaaaaaagccaaggagtgtgaacctccatctgcaggcgccgccgttacggccagacccgggcaagagatccggcagaggacagcagcgcagcggaatctgtcccccacccctgcatccccgaatcaggggccaccacctcaagtgcccgtgtcccctgggccccctaaagactcgtctgcacctggtggcccccccgaaaggacagtcacccctgccttgtcctcgaatgtgttaccacgtcatctgggcagcccagcaacatccgtcccagggatggagatgggccttcctcacatagcgcaagcgggcctcgaacacttgagcagctctgacctgagcacatccacttctcagagtgccggcatcactggcctgcatccccctgggccaccccttgccaggcccatccttccccgcgagagaggggccctggataggattgtggagtacctggtcggagacggcccacagaatagatacgctttgatctgccagcagtgctttagccataatggtatggccctgaaggaagagttcgaatacatcgcttttcgttgcgcctattgcttcttcctgaatccagccaggaaaacaagaccacaggcccccaggctgcctgaattttcattcgagaagaggcaggtcgtggagggctctagctcagtggggccactcccttctgggagtgtgctgagctccgataaccagtttaatgaggagtctctcgaacacgacgtcctcgatgacaacaccgagcagactgatgacaaaattccggctaccgagcagaccaaccaggtcatcgagaaggcctccgactccgaagagccagaggaaaaacaggaaaccgagaacgaggaagccagtgttattgaaacaaattccaccgtccccggcgccgacagcattcccgacccagaattgtctggtgaaagcctcacagctgagtag

SEQ ID NO: 116541 - DNA, 1380 bp, Artificial Sequence
  derived and/or modified sequence
atggggggtctgttttctcgctggagaacgaagccgagcaccgtcgaagtgttagagagcatagataaggagatccaggcactcgaggagtttcgcgagaaaaaccagcgccttcagaaactctgggttgggcgactgattctctactcgtccgttctgtatttgttcacctgtttgattgtgtacttgtggtacctacctgatgaattcaccgcccgtctagccatgaccttgcctttcttcgccttccctcttataatctggtccattagaacagtgattatttttttcttcagcaaacgaactgaacggaacaacgaggcactggatgatttaaaaagccagaggaagaagattcttgaagaggttatggaaaaggaaacctataagaccgctaaattgatcctagagaggtttgatcctgactctaagaaagcaaaagaatgcgaacctcccagtgcaggcgcagccgtgacagctcgacccggtcaggaaatacgccagaggaccgcagcgcagagaaacctaagtcccacccccgctagtccaaaccagggaccccctccccaggtgcccgttagccctggccctcccaaagactcatctgcaccaggaggaccacccgagcgcacggtgacacccgctctcagcagtaatgtgctccccagacatctcgggagccccgcaactagcgtcccaggaatggaaatgggcctgccacacatagcgcaggcaggactggaacatctcagcagttcggacctctcaacatcgaccagtcaatcagcagggatcaccggcctacaccctccaggaccccctttggctcgacccattttgcctcgcgagcgtggagccctcgatcgcatcgtggagtacctcgtaggtgacggcccacaaaaccgctatgcactcatctgccagcagtgtttttcccacaacgggatggcattgaaagaagaattcgagtatatcgccttccgctgtgcgtattgtttcttccttaaccctgctcggaaaacccggccacaggctcccaggctgcccgagttctccttcgagaaacggcaagtagtggagggatccagctctgtgggccctctcccctctggatccgtactgtcgagtgataaccaattcaacgaggagtccttggaacacgatgtgttggacgataatactgaacagactgatgataagattcccgcaacagagcagaccaatcaggttatcgagaaggcctcagattccgaagagcctgaggagaagcaggagacagaaaacgaggaggcttcagtgatagagacaaattccactgttccgggtgccgattccattcctgacccggagctgagtggcgagtccctaacagccgagtag

SEQ ID NO: 116542 - DNA, 1580 bp, Artificial Sequence
  derived and/or modified sequence
cccggcttgtctctctgtcagtggcggctgctgcctgctctggaggcaggctgggcggtggcggccgagactggcgggggtggacgcccgggccgggctgcgcccgcttcttgcagctgtgaattcctttggacaattgatgatatttatcattgtgcccagtttctacaaataaaagatgggtggattattttctcgatggaggacaaaaccttcaactgtagaagttctagaaagtatagataaggaaattcaagcattggaagaatttagggaaaaaaatcagagattacaaaaattatgggttggaagattaattctgtattcctcagttctctatctgtttacatgcttaattgtatatttgtggtatcttcctgatgaatttacagcaagacttgccatgacactcccattttttgcttttccattgatcatctggagcataagaacagtaattattttcttcttttccaagagaacagaaagaaataatgaagcattggatgatttaaaatcccagaggaaaaaaatacttgaagaagtcatggaaaaagaaacttacaagacggctaaattaattcttgaaaggtttgatccggactcaaagaaagcaaaggagtgtgagccgccatctgctggagcagctgtaactgcaagacctggacaagagattcgtcagcgaactgcagctcaaagaaacctttctccaacaccagcaagccctaaccagggccctcctccacaagttccagtatctcctggaccaccaaaggacagttctgcccctggtggacccccagaaaggactgttactccagccctatcatcaaatgtgttaccaagacatcttggatcccctgctacttcagtgcctggaatggagatggggcttcctcatattgcccaggctggtcttgaacacctgagctcaagtgatctgtctacctcgacctctcaaagtgctgggattacaggtcttcatcctccaggtccacctttagcaagacctattctcccccgagaacgaggtgctttggatagaattgttgaatatttggttggtgatggtccacaaaacaggtatgcacttatatgtcagcagtgtttttctcataatggcatggctttgaaggaagaatttgaatacattgcttttcgatgtgcctactgttttttcttgaaccctgcaagaaaaaccagacctcaggctccaagacttcctgagtttagttttgagaagaggcaggtggtggaaggttcaagttcagttggtcccttgccatcaggaagtgtgctttcatcagacaaccagtttaatgaagaatctttagaacacgatgttcttgatgataatacagagcagacagatgacaaaataccagctacagaacagacaaaccaagtgattgaaaaagcatctgactcagaggaaccagaggagaaacaagagactgagaatgaggaagcctcagtgattgaaaccaactccacagttcctggagctgattctattcctgatcctgaactaagtggagaatctttgacggcagagtagtaaatgcttccacgtgccttca

SEQ ID NO: 116543 - DNA, 1380 bp, Artificial Sequence
  derived and/or modified sequence
atgggcggcctgttcagcagatggagaaccaagcccagcaccgtggaggtgctggagagcatcgacaaggagatccaggccctggaggagttcagagagaagaaccagagactgcagaagctgtgggtgggcagactgatcctgtacagcagcgtgctgtacctgttcacctgcctgatcgtgtacctgtggtacctgcccgacgagttcaccgccagactggccatgaccctgcccttcttcgccttccccctgatcatctggagcatcagaaccgtgatcatcttcttcttcagcaagagaaccgagagaaacaacgaggccctggacgacctgaagagccagagaaagaagatcctggaggaggtgatggagaaggagacctacaagaccgccaagctgatcctggagagattcgaccccgacagcaagaaggccaaggagtgcgagccccccagcgccggcgccgccgtgaccgccagacccggccaggagatcagacagagaaccgccgcccagagaaacctgagccccacccccgccagccccaaccagggcccccccccccaggtgcccgtgagccccggcccccccaaggacagcagcgcccccggcggcccccccgagagaaccgtgacccccgccctgagcagcaacgtgctgcccagacacctgggcagccccgccaccagcgtgcccggcatggagatgggcctgccccacatcgcccaggccggcctggagcacctgagcagcagcgacctgagcaccagcaccagccagagcgccggcatcaccggcctgcacccccccggcccccccctggccagacccatcctgcccagagagagaggcgccctggacagaatcgtggagtacctggtgggcgacggcccccagaacagatacgccctgatctgccagcagtgcttcagccacaacggcatggccctgaaggaggagttcgagtacatcgccttcagatgcgcctactgcttcttcctgaaccccgccagaaagaccagaccccaggcccccagactgcccgagttcagcttcgagaagagacaggtggtggagggcagcagcagcgtgggccccctgcccagcggcagcgtgctgagcagcgacaaccagttcaacgaggagagcctggagcacgacgtgctggacgacaacaccgagcagaccgacgacaagatccccgccaccgagcagaccaaccaggtgatcgagaaggccagcgacagcgaggagcccgaggagaagcaggagaccgagaacgaggaggccagcgtgatcgagaccaacagcaccgtgcccggcgccgacagcatccccgaccccgagctgagcggcgagagcctgaccgccgagtag

SEQ ID NO: 116544 - protein, 430 aa, Artificial Sequence
  derived and/or modified sequence
MGRSWPGLSLCQWRLLPALEAGWAVAAETGGGGRPGRAAPASCSCEFLWTIDDIYHCAQFLQIKDGWIIFSMEARLAMTLPFFAFPLIIWSIRTVIIFFFSKRTERNNEALDDLKSQRKKILEEVMEKETYKTAKLILERFDPDSKKAKECEPPSAGAAVTARPGQEIRQRTAAQRNLSPTPASPNQGPPPQVPVSPGPPKDSSAPGGPPERTVTPALSSNVLPRHLGSPATSVPGMGLHPPGPPLARPILPRERGALDRIVEYLVGDGPQNRYALICQQCFSHNGMALKEEFEYIAFRCAYCFFLNPARKTRPQAPRLPEFSFEKRQVVEGSSSVGPLPSGSVLSSDNQFNEESLEHDVLDDNTEQTDDKIPATEQTNQVIEKASDSEEPEEKQETENEEASVIETNSTVPGADSIPDPELSGESLTAE

SEQ ID NO: 116545 - DNA, 1293 bp, Artificial Sequence
  derived and/or modified sequence
atgggtcgcagctggccaggactgagtttgtgccaatggcgacttctgccggccttggaagcaggatgggcagttgcagccgagaccggtggcggaggacgacccggaagagccgcaccagcctcctgttcatgcgaattcctgtggaccatagatgacatctatcactgcgcccagtttctacagatcaaggatgggtggataatatttagcatggaagccagacttgcaatgacactgccttttttcgcattccccctgatcatttggagcattaggacagtcattattttcttctttagtaagcgcactgagagaaataacgaagccctcgacgatctcaaatcccagaggaaaaagattttagaggaggtgatggaaaaggagacctataaaacagccaagctgatcttagagcggttcgaccccgatagtaagaaagcaaaggaatgcgagcccccaagcgccggagctgccgtaaccgccagacctggacaggagattcgtcaacggactgccgcccagagaaacctgtcccctacacccgcatccccaaatcaggggccacccccgcaggttcccgtgagtcctggtccgcccaaggacagcagcgcccctgggggacctccagagcgcactgttacgcccgctctgagcagcaacgtcttacccaggcacctcgggagtcccgcgacctctgtccccggaatgggcctccacccccccggcccacctctggcccgtcccatattgccaagagaaagaggagctttggacagaatcgttgaatacctggtcggcgacggcccacagaaccgctatgccctgatctgtcagcagtgtttctcacacaacgggatggccctgaaggaagagtttgaatacatcgcttttaggtgtgcttactgcttcttcctcaacccagcccgtaaaacgagaccccaagcacccagactcccagagttcagttttgaaaagcgccaggtggtggaaggctcctcctccgtggggccgctcccatccggtagcgtgctgagctcagacaatcagtttaatgaggagagcctggaacacgatgttctggacgacaacactgagcagacggatgacaagattccagcaacagagcagaccaaccaagtgattgagaaggcctcagattccgaagaaccggaggagaagcaagaaacagagaacgaggaggcctccgtgatcgagactaattctaccgtccccggcgcagattctatacctgatcccgaactgagtggtgagagcttgacggcagagtag

SEQ ID NO: 116546 - DNA, 1293 bp, Artificial Sequence
  derived and/or modified sequence
atgggccgctcctggccaggcctgagcctgtgccagtggaggctgctgcctgccctggaggccggctgggccgtggccgctgagactggaggcggcggccggcccggccgggccgccccagccagctgcagctgtgagttcctgtggaccattgatgacatctaccactgtgcccagttcctgcagatcaaggatggctggatcatcttctccatggaggcccggctggccatgaccctgcccttctttgccttccccctcatcatctggagcatccgcaccgtcatcatcttcttcttcagcaagaggacagagaggaacaatgaggccctggatgacctgaagagccagaggaagaagatcctggaggaggtgatggagaaggagacctacaagacagccaagctgatcctggagagatttgatcctgacagcaagaaggccaaggaatgtgagcccccatctgctggagctgctgtgacagcccggcccggccaggagatccggcagaggacagctgcccagaggaacctgagccccaccccagccagccccaaccagggccccccaccccaggtgcctgtgtccccaggcccccccaaggacagcagcgcccctgggggccccccagagaggacagtgaccccagccctgagcagcaatgtgctgcccaggcacctgggcagccctgccacctctgtgcccggcatgggcctgcaccccccaggcccccccctggcccggcccatcctgccccgggagcggggggccctggacagaattgtggagtacctggtgggagatggcccccagaacagatatgccctgatctgccagcagtgcttcagccacaacggcatggccctgaaggaggagtttgagtacatcgccttccgctgtgcctactgcttcttcctgaacccagccaggaagacccggccccaggccccccggctgcctgagttctcctttgagaagaggcaggtggtggagggcagcagctctgtgggccccctgcccagcggctctgtgctgagcagtgacaaccagttcaatgaggagagcctggagcatgatgtgctggatgacaacacagagcagacagatgacaagatcccagccacagagcagaccaaccaggtgattgagaaggccagtgacagcgaggagcctgaggagaagcaggagacagaaaatgaggaggcctctgtgattgagaccaacagcacagtgcctggagctgacagcatcccagaccctgagctgtctggagagagcctgacagctgagtag

SEQ ID NO: 116547 - DNA, 1293 bp, Artificial Sequence
  derived and/or modified sequence
atgggccggagctggcccggcctgagcctgtgccagtggcggctgctgccagctctagaggctggatgggctgtcgccgccgagactggcggaggcggcaggcctggtagagcagccccagcctcttgctcttgtgaatttctgtggacaatcgacgacatctaccactgcgcacagtttcttcagattaaagatggatggatcattttctcaatggaggctcgcctcgccatgactttgcccttctttgcctttccccttatcatctggtctattcgtaccgtcattatctttttcttctccaagcgcaccgagagaaataacgaggccttagatgatttgaagtctcaaagaaaaaaaatcctcgaggaggtcatggaaaaggagacatacaagactgccaaactaatcttagagcgttttgaccccgactcgaaaaaagctaaggagtgcgagcccccgagtgcaggagcagcggtaactgctcggccaggccaggagatcagacagaggacagcagcccagaggaatctgagccccacaccggcgagcccgaatcaggggccacccccgcaagtccccgtgtcccccggaccaccaaaggactcctcagccccagggggtccgccagaaagaacagtaactcctgccttatcttccaatgtcttaccacggcatcttggctccccagcgacatctgtgcccggcatgggactgcacccacctggccctccgttggccaggcccatacttcctagagagcgcggcgctctggacagaattgtggagtacttagtgggcgacggtccccagaaccgttatgcgctgatctgtcaacagtgtttttcacacaacggaatggcattgaaagaggagttcgaatacattgcttttaggtgtgcttactgttttttcttgaaccctgcgaggaagacgagaccccaagccccccgtctgcccgagttttccttcgagaagcgccaggtggtggaaggctcatcctcggttggtcccctgccatcaggctctgtactttcatctgacaatcagttcaatgaggaatcgctggaacatgatgtactcgacgacaatacggaacaaacggatgataaaatacccgcaactgagcagactaatcaggttattgagaaggcatctgacagtgaagagcccgaagagaaacaggagactgagaatgaagaagcatccgtgatcgagaccaacagtaccgtgccgggcgctgattcaattcctgaccccgagttgtcaggggagagtctgactgcagaatag

SEQ ID NO: 116548 - DNA, 1293 bp, Artificial Sequence
  derived and/or modified sequence
atgggtcgcagttggcccggactttccctgtgtcagtggcgattgttgcccgcactggaggccggttgggctgttgctgccgagaccggcggaggtggacggccaggacgagccgctccagcttcttgctcttgtgaattcctttggactattgatgacatctaccattgcgctcaatttctacagattaaagatggttggatcatcttttcaatggaggcccgtctagcaatgactctccccttcttcgcgtttccgcttatcatctggtccatcaggactgtaatcatcttctttttcagcaaacggaccgagcggaacaacgaggccctcgacgacctgaagagccagaggaaaaagatcctggaagaggtcatggaaaaggaaacatacaaaactgctaagctgatcctagagcggttcgacccagacagcaagaaagcgaaggagtgcgaacccccaagcgcgggagcggctgtgaccgccagaccaggacaggaaattagacaacggaccgcagcgcagcggaatctgtccccaacaccagcttcacccaaccaagggccaccgcctcaagtcccagtgtccccaggcccacctaaggactcttcagcgccaggcggaccccctgaacgtaccgtgacaccggctctgtccagcaatgtgttgcccagacaccttggatctccagcaacaagcgttccgggaatgggccttcatccgccaggaccccctctcgcgaggccaatcctgcctcgcgaacgtggcgcactggaccggattgttgagtacctggtgggagatgggcctcagaatcggtatgcactgatttgtcagcagtgcttctcccataatggcatggccctgaaggaagagtttgagtacatcgcatttcgttgcgcatattgcttctttctcaatccagcccgaaagacccggccacaggccccacgtcttccggagtttagtttcgagaagagacaggtcgtcgaaggcagtagctctgtggggcctctcccaagcggctctgtgttatcttccgataatcagttcaatgaagagtccctggagcatgacgtgcttgacgacaatacagaacagacagatgacaagattcctgctacggagcagactaaccaggtgatcgagaaggcgagtgattcggaagagcctgaggaaaagcaggagacagaaaacgaggaagcctcagtgattgagaccaactcaaccgtgcctggagctgatagcatccctgatcctgagttgagcggcgagtctctgaccgctgagtag

SEQ ID NO: 116549 - DNA, 7342 bp, Artificial Sequence
  derived and/or modified sequence
tttcatgggaaggagttggcccggcttgtctctctgtcagtggcggctgctgcctgctctggaggcaggctgggcggtggcggccgagactggcgggggtggacgcccgggccgggctgcgcccgcttcttgcagctgtgaattcctttggacaattgatgatatttatcattgtgcccagtttctacaaataaaagatgggtggattattttctcgatggaggcaagacttgccatgacactcccattttttgcttttccattgatcatctggagcataagaacagtaattattttcttcttttccaagagaacagaaagaaataatgaagcattggatgatttaaaatcccagaggaaaaaaatacttgaagaagtcatggaaaaagaaacttacaagacggctaaattaattcttgaaaggtttgatccggactcaaagaaagcaaaggagtgtgagccgccatctgctggagcagctgtaactgcaagacctggacaagagattcgtcagcgaactgcagctcaaagaaacctttctccaacaccagcaagccctaaccagggccctcctccacaagttccagtatctcctggaccaccaaaggacagttctgcccctggtggacccccagaaaggactgttactccagccctatcatcaaatgtgttaccaagacatcttggatcccctgctacttcagtgcctggaatgggtcttcatcctccaggtccacctttagcaagacctattctcccccgagaacgaggtgctttggatagaattgttgaatatttggttggtgatggtccacaaaacaggtatgcacttatatgtcagcagtgtttttctcataatggcatggctttgaaggaagaatttgaatacattgcttttcgatgtgcctactgttttttcttgaaccctgcaagaaaaaccagacctcaggctccaagacttcctgagtttagttttgagaagaggcaggtggtggaaggttcaagttcagttggtcccttgccatcaggaagtgtgctttcatcagacaaccagtttaatgaagaatctttagaacacgatgttcttgatgataatacagagcagacagatgacaaaataccagctacagaacagacaaaccaagtgattgaaaaagcatctgactcagaggaaccagaggagaaacaagagactgagaatgaggaagcctcagtgattgaaaccaactccacagttcctggagctgattctattcctgatcctgaactaagtggagaatctttgacggcagagtagtaaatgcttccacgtgccttcaactggatatttatagtcttactgatgtcagttattgctttttcggtggcacttactttttttgcccctctaagggtatgcttgtgtatcatttgaattcagattgcctagctatttgaacatctcaaagttatatatactgggtattaaaattaaaagcaagttatatcagtgaagtaagatccttttgaatgtacaaagacccacactattgagacagcttttagatacttttttgtccattctaaaagtaagcaaacatgattgccttcttgttttctgtatgtataacccgtaaatatccattttgacataggaagaactttggttaagagtaagttctctaattgtgtttgttttaaggaatgaaacttggttaagattttgactacttcattattaaaaattgatagaattttagctcctgagatatttacaactgggagaaatgtctatttaggtgtttacattaagcggtatgaaagttgttaccacataggcactggtacgaattctcaataagaatgcagtggaacagttaagtagaactgtaactacgttggcactggtacgaattctcagtgagaatgcaatgaaacagtcaactgcagtgtttctttttgatgtcttttattttacaactgggccaaaggcacattatgtatataattagtttatatttacacactagcatataggaaatatttctgcacttgaccctatttgaattctgagcattatttataagtataaaatgatgatatataagtgaattttgtgctcttgtttgtattttattaaggaaaatgaaaataatctggcatcagtttcattttgctaaatatctagtcttcttcaaacagtatcttggtgggtgacttggctacctgaaaaatcttaggaggaatagctcacaatacaataaatctgtagattctgcttagagcaaattatggtacttttattcagacttgtttcctttctagttaacagaaatagtgacatttagaggttttaatcagaagttaggtttttctgattcaggaacatcgtaggccagccatttgtaatttttaactttgagaaacaaattttgtgagaataggtagtgggttgctggtagttaattggatttaatatttgtattaaggattaactggaaaaaatgtgtctcagtgctaattcttggacctttaatacagtgtgcttatctgttacggcctccttttatctctcttctccaatattaaaaaaaatggaaatcaaattattatgctgaagggaaaaatatacctgtataagaatggtgtgtttggctaatgtttctaagttgcacacagtttattaacaactgaacaaaacatttttatcatttaaaaatctatttttatgatttaatatctcatatgtgacagtttttttttttttttttttttggaactcaatctgttaacagtctgggacatccggtatagtaaccagagtttttgagcctgccgtattgggcttaaatttcaggtctgtagtcttgggcaagtcacctataaactcactgagattattttttcatctgtaaaatgggaagagttatgtttatttttgaagggtattaggataattaaaaataatgtaatgtgcctagcacactacctgaaaacgatggcatttgttcttattaatgtctttaaaatatgcaaggaccataagtttttcctcttgcagatgaggaaagtaaaaaataatacgaacatgtaattcagcttctcagattcaagccaatgttttttgcatcaacttttctatattgtatgtatgtatataaatacatagattaaggaaataggaaactgaaactctgtggaatataaactttttaaaaataatttcatcaggttttttgtatgttactgacccatatggattttagtaacatcttgcttagtcatgttgttataaaacattcaaattctgatatacattgcttgaaaatgagtgagtacctcagagaaatttgatagactcaaacagatagtatgagaaatatctttgaaagaaatatggaggaaggttaaaaggggattagtaaaattaatgcgataggtaacatgtttgtaaccatatagtatccttttagatacaaaagcttattttcattattattataataaacagttaatggttgaaacttagtaaaatgtcctatttctgattattaagactagtataaatgagaaaatccaagctattaagtaccattagctacagtgatcttagcttccttgcttacaattgttcagtgggtcatctaaattcttctatgtcctgagcatgatctacaaacatggtctagcttctgtctctccgtcttcccgccatcattgtgctgtagccatatggaactcctttcagttctctgaccatgccctttcctgcctcagatttcagcttaaattttgcctcctcagagagatgccttcccaaactccccatctgaagctggcctctgccttttactccctatcatgtcactctctgctcaccatccttatcacaatgtgtatttgatttgtttgctagtttactgtcttcacaacataatgtccgtttgtgcaagggtcttatttttcttattcatgtctgtatctcaagggtctagcacaatgcttgatgcatattgtgtgaataaatactttgttgccaaatccagtgaaaactctcagttcttgtttcactgcttggcagtattgacattgaatattctctgagatactttttttcttttggcttttcatatatcacactattattctcttatttctctggcctcttgctctcaacgtcctgtaagtgttggtgttccttaagttctacctagtgtcatcatttcttcattctgcatattctttccctagggtttcttcccaacaccaaaggacttaccatctgtctctctgaatctcagatctccagctttgatctgtttcctttactttagagctatatatttgcctgcctactggcctgtctctcacaatccatatattcaagaatgaacactatactttgcttcaaaccttcagaacattcaaaccgtttatgtttctcatctaatcaaatagagttactctctaagccagaagctgtaaactcatctcttttccctttattcaagctgtcaatttttgtctcctaaacatcttctagttatattctcatttctctgttcacattgcattaataatgatgataaacatttgcattcttattctgtgccaggcaacatgctaactgctgtatatatattattatatttgtactttggcaagaatcctgtgaagatttttatctttggactactagaagagaaagctgagttgtagagagagtatgtatttaagtccgtttgggctgctataacagaataccacagactgggtaacgtgatgaacaaaaatttatttggctcacagttctggaacctgggaaatccaaaggcatgatgctagcatctggtgagggcctttgtgctttgtcatcccatgccagaaggcagaagggtaagagagggcaagagtgagcaagagatggaagttgcaacctcaagctcttttataatgagcattaatccattcatgagggcttcaccctcatgacctaaacatctccattaggctccaccttccaatgcaacagttagcataagttttcaacacatgctttttgtagcattcaaaccatagcaggaagcaactttgcttaaaattgtatacctggtaagtggaaaaagagggatttgaatataggcaaatgacttcagaggatttactcttaatttctgttgtactgccttctaatcttggcctccatcatttcagattaccaaagctgtctcttaactggtttctttgtctccaaccttgtgcacttgctatctattctgtgtgctgcagcctgagtttttaaaaaacagaaaatgaggggccaggtgtggtggtggctcacgcctgtaatcccagcaagttgggaggctgaggcgggcagatcatctggggtcaggagttcgagaccagcctgaccaacgtggagaaacactatctctactaaaaatacaaaattagccaggcgtggtggtgcatgcctgtaatcctagctactcaggagcctgaggcaggagaattgcttgaacacgggaggcagaggttgcagtgagcagagattgcgccattgtactccagcctgggcaacaagagtgaaactccatctcaaaaaaaaaaaagaaagaaagaaaatgaatctgccacgccattgcttagaccctttaatgactcttgagtgttcttgggatgaggtccaaatttactaataaggcctgcaaagccctgtgtaattttgctcctagttatggctggcatctgcaccacaactacagccactgccacctccccctgccacacacacattttaaaagtaacaatagtagtgttttctgtgttttgcatatgcagtcttttctcatctcccagccttcttgagcttttcctctgcctgagatacgctcccactcacatagacattgggggcactaaataaaaatagctgtttaattgaattggaatcgttccacttggaacccaagtttggaaattttgctacttcttgttaagctaggccttttattcttgaagttgctatttctcatacaaactcattttatgcattagacacacagtcactattgttatggagaacatagttgtatcagaagaggtatagctttgggtgtggatgtgcgtgtgtcaggggaaagatattctgattatatgatgattttcataaaatatagtatgctgagtttccgaaaatcctaaatgacttagaaatggtgctatatgtggtttgtttgacccctgcaaatctcatgttgaaatttgatccccattgctggaggtgttttgagcatggagcggatccctcatgaatgtcttggcgttgtccttgcagtaatgagttcttgctctatttttcctcccctggaagctgattgtttaaaagagcctggtatcctccctccctttcttctttgcttcctctctcttgctgtgtgatctctgcacacaccagctcccctttgctttctgccatgagtggtctgaggctctcaccagaagccaagcagaggctggcaccatgcttctagtacagcctgcagaactgtaagccaaataaacttcttctttgttttttttttttgtttgttttgtttttttttcagtaaattacccagcctcaggtattccttaacaacacaaatgggctaagacacagggtcatagggatagcaggcacctgagccaagccagaacttagatctcaactgttaatgcaggatgatttgtattgaaccatgaattttacactgcctctcaatgttggtgtcagcatttaaggttatttaaaaaatacaacctgaaggttacataaagtttcatttaaaaaataagaccttataagtctacttttatttccagtggacagcaactacttaatcgtcttaaaactttcttcttacaatattactttacaatattacctgttggatttattatctgtgtacaaatcagttagttgaagggccaaagaataaaggcattttgtgaattatgaatagctattttgaaatggtcatggagactagctactctagaaaattgggagaatatactgtattaagttactatctggtataacttcaattaattgtgaaaattgtagcagagatctagatatagtttatgaacttctaaagagacattaaagggaattcaagtacttgtgtaaagatgaaccaaggtagagatgattgtgaattggtgatctgctgtatgttacagttatgtaatttgacttgtttcaaaattattaaagttttaagtgtatgcattctactggtcaataagtaaatatattcaggctctgaatgtagacagataaatatataaatatagaaagtacatttgttagaat

SEQ ID NO: 116550 - DNA, 1293 bp, Artificial Sequence
  derived and/or modified sequence
atgggcagaagctggcccggcctgagcctgtgccagtggagactgctgcccgccctggaggccggctgggccgtggccgccgagaccggcggcggcggcagacccggcagagccgcccccgccagctgcagctgcgagttcctgtggaccatcgacgacatctaccactgcgcccagttcctgcagatcaaggacggctggatcatcttcagcatggaggccagactggccatgaccctgcccttcttcgccttccccctgatcatctggagcatcagaaccgtgatcatcttcttcttcagcaagagaaccgagagaaacaacgaggccctggacgacctgaagagccagagaaagaagatcctggaggaggtgatggagaaggagacctacaagaccgccaagctgatcctggagagattcgaccccgacagcaagaaggccaaggagtgcgagccccccagcgccggcgccgccgtgaccgccagacccggccaggagatcagacagagaaccgccgcccagagaaacctgagccccacccccgccagccccaaccagggcccccccccccaggtgcccgtgagccccggcccccccaaggacagcagcgcccccggcggcccccccgagagaaccgtgacccccgccctgagcagcaacgtgctgcccagacacctgggcagccccgccaccagcgtgcccggcatgggcctgcacccccccggcccccccctggccagacccatcctgcccagagagagaggcgccctggacagaatcgtggagtacctggtgggcgacggcccccagaacagatacgccctgatctgccagcagtgcttcagccacaacggcatggccctgaaggaggagttcgagtacatcgccttcagatgcgcctactgcttcttcctgaaccccgccagaaagaccagaccccaggcccccagactgcccgagttcagcttcgagaagagacaggtggtggagggcagcagcagcgtgggccccctgcccagcggcagcgtgctgagcagcgacaaccagttcaacgaggagagcctggagcacgacgtgctggacgacaacaccgagcagaccgacgacaagatccccgccaccgagcagaccaaccaggtgatcgagaaggccagcgacagcgaggagcccgaggagaagcaggagaccgagaacgaggaggccagcgtgatcgagaccaacagcaccgtgcccggcgccgacagcatccccgaccccgagctgagcggcgagagcctgaccgccgagtag

SEQ ID NO: 116551 - DNA, 918 bp, Artificial Sequence
  derived and/or modified sequence
atggagaaggagacatataaaaccgctaaattgattctagagcgattcgaccctgactcgaagaaagccaaagagtgtgagccgcccagcgccggggcagcggtgactgccaggccgggacaggagatacgccagagaacggccgcccagcgaaacctcagtcccactcctgcgtcgccaaatcaggggccaccacctcaggtaccagtcagccccggtccccccaaggactcatctgctccagggggacctcctgagcgaaccgttacccccgctctttcctctaatgtgctgccgcggcatttgggctccccggctacttcagtgcccggaatgggtctccaccctcctggaccacctctggctcgccctatccttcccagggaaagaggcgccctcgatcgcatcgtagagtaccttgtgggtgacgggccgcagaaccggtatgcactgatttgtcaacagtgcttcagccataatggaatggcactgaaggaagaatttgaatacattgccttccgctgcgcctactgcttttttctgaatcccgcaaggaagacccgaccgcaggctcctcgcctgcctgagttctcctttgagaaacgacaggtagtcgagggctcatccagcgtcggaccgctaccatcaggcagcgtgctgtcgtccgacaaccagttcaatgaagaatctttagaacacgacgtgctggacgataataccgaacagaccgacgataagattccagccactgaacagacgaatcaggtgattgagaaggcctcagactcagaagagcccgaggagaaacaggaaacagagaacgaggaggcctctgtcatcgagaccaactccactgtgcctggagctgattccattccggaccccgagctgagcggggagagcctgacagccgaatag

SEQ ID NO: 116552 - DNA, 918 bp, Artificial Sequence
  derived and/or modified sequence
atggagaaggagacctacaagacagccaagctgatcctggagagatttgatcctgacagcaagaaggccaaggaatgtgagccccccagcgctggagctgctgtgacagcccggcccggccaggagatccggcagaggacagctgcccagaggaacctgagccccaccccagccagccccaaccagggccccccaccccaggtgcctgtgtccccaggcccccccaaggacagcagcgcccctgggggccccccagagaggacagtgaccccagccctgagcagcaatgtgctgcccaggcacctgggcagccctgccacctctgtgcccggcatgggcctgcaccccccaggcccccccctggcccggcccatcctgccccgggagcggggggccctggaccgcatcgtggagtacctggtgggagatggcccccagaacagatatgccctgatctgccagcagtgcttcagccacaacggcatggccctgaaggaggagtttgagtacatcgccttccgctgtgcctactgcttcttcctgaacccagccaggaagacccggccccaggccccccggctgcctgagttctcctttgagaagaggcaggtggtggagggcagcagctctgtgggccccctgcccagcggctctgtgctgagcagtgacaaccagttcaatgaggagagcctggagcatgatgtgctggatgacaacacagagcagacagatgacaagatcccagccacagagcagaccaaccaggtgattgagaaggccagtgacagcgaggagcctgaggagaagcaggagacagaaaatgaggaggccagcgtcatcgagaccaacagcacagtgcctggagctgacagcatcccagaccctgagctgagcggggagagcctgacagctgagtag

SEQ ID NO: 116553 - DNA, 918 bp, Artificial Sequence
  derived and/or modified sequence
atggagaaggagacctacaagaccgccaagctgatcctggagcggtttgatcccgattcaaagaaggccaaggagtgtgagcctcccagcgcaggggctgccgttacagcccggcctggacaagagatccgccaacgcaccgcggcacagcgcaatctgtcacctacacccgccagcccaaaccaaggacctccaccacaggttcccgtgtctcccggcccccccaaagattcatcggcacccggaggaccaccggagagaaccgtgaccccagctctgtcgagtaatgtcctgcctcggcacctgggttctcccgcaacctctgttccgggaatgggactgcaccccccaggcccacccttggcccggccaatcctgccacgagagcggggcgcgcttgataggattgtggaatacctcgtgggcgatggcccgcaaaacagatatgccctgatctgtcagcagtgtttcagtcataacggcatggcgctcaaagaggaatttgagtacatagctttccggtgtgcatactgtttcttcctgaacccagcacgcaagaccagaccccaagctcctaggctccccgagttcagcttcgagaagaggcaggtcgtggaaggatcgtcttcggtagggccacttccatctggatcagtcctttccagtgataatcagttcaatgaggaaagtcttgaacacgacgttctggatgacaacaccgagcagaccgacgacaagatccctgctacggagcagactaaccaggtgatcgagaaggcctccgactcagaggaacctgaggagaagcaggaaacggagaatgaggaagctagtgtaatcgagactaatagtactgtccccggagcagattccatcccagatcccgagctgtctggggaaagccttactgctgagtag

SEQ ID NO: 116554 - DNA, 918 bp, Artificial Sequence
  derived and/or modified sequence
atggagaaggaaacatacaagactgccaagctgattttagaaaggtttgaccctgacagcaaaaaagccaaggagtgcgaacccccttctgcaggtgccgctgttacggcgagacccggacaagaaatccgtcaacgtactgccgctcagcgcaacctgtcccctacaccagcaagtccgaaccagggccctccccctcaggtgcctgtttcacctggtcctcccaaggatagtagcgcccctgggggaccacccgagcggactgtaaccccagccctctcctccaatgtactcccaaggcaccttggctcacctgcaaccagcgtaccaggtatggggctccacccgcctgggcctcctcttgccagacccatcctgccgagagagcgcggagcccttgaccgcatagtagaatatcttgtgggggacgggcctcagaatcggtacgctcttatctgccagcagtgtttctctcacaacggaatggctttgaaagaggaattcgagtacatcgcttttcgctgcgcctattgcttttttttgaacccagcccgtaagacgagaccgcaggcgccacgcctccccgagttcagctttgagaaaaggcaagttgtggaagggagctccagcgtggggcctttaccttcaggcagcgtcctgagctccgataaccagtttaacgaggaatccctggaacacgatgttctggacgataacacggaacagactgacgacaaaatccctgcgaccgaacagactaaccaggtcatagagaaagcctccgattccgaggagcctgaggagaaacaagaaacagagaatgaagaggcttcggtcattgagacgaattctacggtgcccggtgcagacagtattcccgatcccgaactctcaggcgagtcccttactgccgagtag

SEQ ID NO: 116555 - DNA, 918 bp, Artificial Sequence
  derived and/or modified sequence
atggagaaggagacctacaagaccgccaagctgatcctggagagattcgaccccgacagcaagaaggccaaggagtgcgagccccccagcgccggcgccgccgtgaccgccagacccggccaggagatcagacagagaaccgccgcccagagaaacctgagccccacccccgccagccccaaccagggcccccccccccaggtgcccgtgagccccggcccccccaaggacagcagcgcccccggcggcccccccgagagaaccgtgacccccgccctgagcagcaacgtgctgcccagacacctgggcagccccgccaccagcgtgcccggcatgggcctgcacccccccggcccccccctggccagacccatcctgcccagagagagaggcgccctggacagaatcgtggagtacctggtgggcgacggcccccagaacagatacgccctgatctgccagcagtgcttcagccacaacggcatggccctgaaggaggagttcgagtacatcgccttcagatgcgcctactgcttcttcctgaaccccgccagaaagaccagaccccaggcccccagactgcccgagttcagcttcgagaagagacaggtggtggagggcagcagcagcgtgggccccctgcccagcggcagcgtgctgagcagcgacaaccagttcaacgaggagagcctggagcacgacgtgctggacgacaacaccgagcagaccgacgacaagatccccgccaccgagcagaccaaccaggtgatcgagaaggccagcgacagcgaggagcccgaggagaagcaggagaccgagaacgaggaggccagcgtgatcgagaccaacagcaccgtgcccggcgccgacagcatccccgaccccgagctgagcggcgagagcctgaccgccgagtag

SEQ ID NO: 116556 - protein, 360 aa, Artificial Sequence
  derived and/or modified sequence
MSQERPTFYRQELNKTIWEVPERYQNLSPVGSGAYGSVCAAFDTKTGLRVAVKKLSRPFQSIIHAKRTYRELRLLKHMKHENVIGLLDVFTPARSLEEFNDVYLVTHLMGADLNNIVKCQKLTDDHVQFLIYQILRGLKYIHSADIIHRDLKPSNLAVNEDCELKILDFGLARHTDDEMTGYVATRWYRAPEIMLNWMHYNQTVDIWSVGCIMAELLTGRTLFPGTDHINQLQQIMRLTGTPPAYLINRMPSHEARNYIQSLTQMPKMNFANVFIGANPLAVDLLEKMLVLDSDKRITAAQALAHAYFAQYHDPDDEPVADPYDQSFESRDLLIDEWKSLTYDEVISFVPPPLDQEEMES

SEQ ID NO: 116557 - DNA, 4319 bp, Artificial Sequence
  derived and/or modified sequence
atattgggtaaaatctcggctctcggagagtcccgggagctgttctcgcgagagtactgcgggaggctcccgtttgctggctcttggaaccgcgaccactggagccttagcgggcgcagcagctggaacgggagtactgcgacgcagcccggagtcggccttgtaggggcgaaggtgcagggagatcgcggcgggcgcagtcttgagcgccggagcgcgtccctgcccttagcggggcttgccccagtcgcaggggcacatccagccgctgcggctgacagcagccgcgcgcgcgggagtctgcggggtcgcggcagccgcacctgcgcgggcgaccagcgcaaggtccccgcccggctgggcgggcagcaagggccggggagagggtgcgggtgcaggcgggggccccacagggccaccttcttgcccggcggctgccgctggaaaatgtctcaggagaggcccacgttctaccggcaggagctgaacaagacaatctgggaggtgcccgagcgttaccagaacctgtctccagtgggctctggcgcctatggctctgtgtgtgctgcttttgacacaaaaacggggttacgtgtggcagtgaagaagctctccagaccatttcagtccatcattcatgcgaaaagaacctacagagaactgcggttacttaaacatatgaaacatgaaaatgtgattggtctgttggacgtttttacacctgcaaggtctctggaggaattcaatgatgtgtatctggtgacccatctcatgggggcagatctgaacaacattgtgaaatgtcagaagcttacagatgaccatgttcagttccttatctaccaaattctccgaggtctaaagtatatacattcagctgacataattcacagggacctaaaacctagtaatctagctgtgaatgaagactgtgagctgaagattctggattttggactggctcggcacacagatgatgaaatgacaggctacgtggccactaggtggtacagggctcctgagatcatgctgaactggatgcattacaaccagacagttgatatttggtcagtgggatgcataatggccgagctgttgactggaagaacattgtttcctggtacagaccatattaaccagcttcagcagattatgcgtctgacaggaacaccccccgcttatctcattaacaggatgccaagccatgaggcaagaaactatattcagtctttgactcagatgccgaagatgaactttgcgaatgtatttattggtgccaatcccctggctgtcgacttgctggagaagatgcttgtattggactcagataagagaattacagcggcccaagcccttgcacatgcctactttgctcagtaccacgatcctgatgatgaaccagtggccgatccttatgatcagtcctttgaaagcagggacctccttatagatgagtggaaaagcctgacctatgatgaagtcatcagctttgtgccaccaccccttgaccaagaagagatggagtcctgagcacctggtttctgttctgttgatcccacttcactgtgaggggaaggccttttcacgggaactctccaaatattattcaagtgcctcttgttgcagagatttcctccatggtggaagggggtgtgcgtgcgtgtgcgtgcgtgttagtgtgtgtgcatgtgtgtgtctgtctttgtgggagggtaagacaatatgaacaaactatgatcacagtgactttacaggaggttgtggatgctccagggcagcctccaccttgctcttctttctgagagttggctcaggcagacaagagctgctgtccttttaggaatatgttcaatgcaaagtaaaaaaatatgaattgtccccaatcccggtcatgcttttgccactttggcttctcctgtgaccccaccttgacggtggggcgtagacttgacaacatcccacagtggcacggagagaaggcccataccttctggttgcttcagacctgacaccgtccctcagtgatacgtacagccaaaaaggaccaactggcttctgtgcactagcctgtgattaacttgcttagtatggttctcagatcttgacagtatatttgaaactgtaaatatgtttgtgccttaaaaggagagaagaaagtgtagatagttaaaagactgcagctgctgaagttctgagccgggcaagtcgagagggctgttggacagctgcttgtgggcccggagtaatcaggcagccttcataggcggtcatgtgtgcatgtgagcacatgcgtatatgtgcgtctctctttctccctcacccccaggtgttgccatttctctgcttacccttcacctttggtgcagaggtttcttgaatatctgccccagtagtcagaagcaggttcttgatgtcatgtacttcctgtgtactctttatttctagcagagtgaggatgtgttttgcacgtcttgctatttgagcatgcacagctgcttgtcctgctctcttcaggaggccctggtgtcaggcaggtttgccagtgaagacttcttgggtagtttagatcccatgtcacctcagctgatattatggcaagtgatatcacctctcttcagcccctagtgctattctgtgttgaacacaattgatacttcaggtgcttttgatgtgaaaatcatgaaaagaggaacaggtggatgtatagcatttttattcatgccatctgttttcaaccaactatttttgaggaattatcatgggaaaagaccagggcttttcccaggaatatcccaaacttcggaaacaagttattctcttcactcccaataactaatgctaagaaatgctgaaaatcaaagtaaaaaattaaagcccataaggccagaaactccttttgctgtctttctctaaatatgattactttaaaataaaaaagtaacaaggtgtcttttccactcctatggaaaagggtcttcttggcagcttaacattgacttcttggtttggggagaaataaattttgtttcagaattttgtatattgtaggaatcctttgagaatgtgattccttttgatggggagaaagggcaaattattttaatattttgtattttcaactttataaagataaaatatcctcaggggtggagaagtgtcgttttcataacttgctgaatttcaggcattttgttctacatgaggactcatatatttaagccttttgtgtaataagaaagtataaagtcacttccagtgttggctgtgtgacagaatcttgtatttgggccaaggtgtttccatttctcaatcagtgcagtgatacatgtactccagagggacagggtggaccccctgagtcaactggagcaagaaggaaggaggcagactgatggcgattccctctcacccgggactctccccctttcaaggaaagtgaacctttaaagtaaaggcctcatctcctttattgcagttcaaatcctcaccatccacagcaagatgaattttatcagccatgtttggttgtaaatgctcgtgtgatttcctacagaaatactgctctgaatattttgtaataaaggtctttgcacatgtgaccacatacgtgttaggaggctgcatgctctggaagcctggactctaagctggagctcttggaagagctcttcggtttctgagcataatgctcccatctcctgatttctctgaacagaaaacaaaagagagaatgagggaaattgctattttatttgtattcatgaacttggctgtaatcagttatgccgtataggatgtcagacaataccactggttaaaataaagcctatttttcaaatttagtgagtttctcaagtttattatatttttctcttgtttttatttaatgcacaatatggcattatatcaatatcctttaaactgtgacctggcatacttgtctgacagatcttaatactactcctaacatttagaaaatgttgataaagcttcttagttgtacattttttggtgaagagtatccaggtctttgctgtggatgggtaaagcaaagagcaaatgaacgaagtattaagcattggggcctgtcttatctacactcgagtgtaagagtggccgaaatgacagggctcagcagactgtggcctgagggccaaatctggcccaccacctgtttggtgtagcctgctaagaatggcttttacatttttaaatggttgggaaagaaaaaaaaagaagtagtagattttgtagcatgtgatgtaagtaatgtaaaacttaaattccagtatccataaataaagttttatgagaacaga

SEQ ID NO: 116558 - DNA, 1083 bp, Artificial Sequence
  derived and/or modified sequence
atgtcacaggagagacctaccttctatcggcaggagttgaataagacaatttgggaggtgcccgagagatatcaaaatctgtcaccagtgggctcaggggcttatggttcagtgtgcgcggccttcgacaccaagaccggactacgcgtcgctgtgaaaaagctgtccaggccctttcagtccatcatacacgctaagaggacctaccgggaacttcgcctcctcaagcatatgaagcatgagaacgtcatcggcttgctggacgtatttacccctgcccggagcctcgaagaattcaatgacgtttatctggtaacccatctcatgggtgcggacttgaacaatatcgtgaagtgccagaaattgactgatgaccatgtgcagttcttaatctaccaaatcctgcgtggcttgaagtatatccattctgccgatattatacatagggatctgaaaccttcaaacttggccgttaatgaggattgtgagttgaagattctcgacttcggccttgcccgacacaccgatgatgagatgactggctacgtggcaacaaggtggtaccgagctcctgaaatcatgctcaattggatgcactacaaccaaacagttgacatttggtccgtgggttgcataatggcggagttattgaccggcaggactctgttcccaggaacagatcacattaatcaactgcaacagataatgaggctaacaggtaccccccccgcttatctgatcaatagaatgccttcccatgaagcgagaaattatatccagagcctgactcagatgccaaagatgaactttgcaaacgttttcattggggcaaacccacttgctgtcgatctactggagaaaatgctggttctggactctgacaagaggatcaccgcagctcaggccctggcccatgcatactttgcccaatatcacgaccctgatgatgaacctgtcgcagatccttacgaccaaagctttgaaagcagagatcttctgatcgacgaatggaagtctttgacttacgacgaggtgatttcatttgtgccaccccctctcgatcaggaagaaatggagagctag

SEQ ID NO: 116559 - DNA, 1083 bp, Artificial Sequence
  derived and/or modified sequence
atgagccaggagcggcccaccttctaccggcaggagctgaacaagaccatctgggaggtgcctgagcgctaccagaacctgagccctgtgggcagcggggcctacggctctgtgtgtgccgcctttgacaccaagacaggcctgcgggtggccgtgaagaagctgagccggcccttccagagcatcatccacgccaagaggacctaccgggagctgcggctgctgaagcacatgaagcatgaaaatgtcatcggcctgctggatgtgttcaccccagcccggagcctggaggagttcaatgatgtgtacctggtgacccacctgatgggcgctgacctgaacaacatcgtgaagtgccagaagctgacagatgaccacgtgcagttcctgatctaccagatcctgcggggcctgaagtacatccacagcgctgacatcatccaccgggacctgaagcccagcaacctggccgtgaatgaagactgtgagctgaagatcctggactttggcctggcccggcacacagatgatgagatgacaggctacgtggccacccgctggtaccgggcccctgagatcatgctgaactggatgcactacaaccagacagtggacatctggagcgtgggctgcatcatggccgagctgctgaccggccgcaccctcttccctggaacagaccacatcaaccagctgcagcagatcatgaggctgaccggcaccccaccagcctacctgatcaacaggatgcccagccatgaggccaggaactacatccagagcctgacccagatgcccaagatgaactttgccaacgtgttcatcggggccaaccccctggccgtggacctgctggagaagatgctggtgctggacagcgacaagaggatcacagctgcccaggccctggcccacgcctactttgcccagtaccatgaccctgatgatgagcctgtggccgacccctatgaccagagctttgagagccgggacctgctgattgatgagtggaagagcctgacctatgatgaagtcatcagctttgtgcccccacccctggaccaggaggagatggagagctag

SEQ ID NO: 116560 - DNA, 1083 bp, Artificial Sequence
  derived and/or modified sequence
atgagccaggagcggcccaccttctaccggcaggagctgaacaagacgatctgggaagttccagagcgttaccagaacctgtctccagttgggtccggggcctatgggtcagtttgcgcggcatttgatacaaaaacaggactgcgtgtggcggtcaagaaactgtctaggccttttcagagcatcattcacgcgaaacgaacctatagggagcttcgccttctgaaacacatgaagcatgagaatgttatcggtttgctggatgtttttacaccagccagatcacttgaagaatttaacgatgtctatttggtgactcacctgatgggcgccgatctcaataacattgtcaaatgccagaagctgacagatgaccacgtccagttcctgatatatcagatccttagaggtctaaagtacatacatagtgccgacatcatccatcgagatttaaagccttcaaacctggcggtgaatgaagactgcgagttaaaaatactcgatttcggactggctaggcatactgacgacgagatgacgggttatgtcgccactagatggtatcgcgcccctgagataatgctgaactggatgcattacaaccagacagtggatatttggtcagttggatgcatcatggccgaactgctgaccgggaggactctgtttccaggcacagaccacatcaatcaactccagcaaattatgcggttgacaggcactcccccggcttacctcataaacagaatgccgagccacgaggcccgaaactatattcagagccttacccagatgcctaagatgaactttgctaatgtgttcatcggcgcaaacccattggccgtggacttgctggagaagatgctcgtcctagattctgataagaggattacggcagctcaagctctggcccatgcgtactttgcccagtaccacgatcccgacgacgagccagtcgccgatccatatgaccagtccttcgagagccgggatctattaatcgacgagtggaagtccttaacatacgatgaggtcatctctttcgtcccacctcccctcgaccaagaggagatggagtcctag

SEQ ID NO: 116561 - DNA, 1083 bp, Artificial Sequence
  derived and/or modified sequence
atgagccaggagagacctacattttaccgacaggagttgaataagaccatttgggaggtacctgagcgctaccagaacctgtcacccgtcgggtccggtgcttatggatccgtgtgcgcagcattcgacacaaagaccggcctgcgagttgccgtcaagaaactaagccggccattccaatcaatcatccatgctaaaagaacataccgggaactcaggttactaaagcacatgaaacacgagaatgtcattggcctgctcgatgtgtttacaccggcacgtagtctggaagagttcaatgatgtttacctggtgacacatctgatgggcgctgatcttaacaacatcgtgaaatgccagaaactgactgacgaccacgtccagttcctgatataccagatactgagaggcctgaaatatattcactctgcggacatcattcatagggacttgaaacctagtaatctggctgtgaacgaagattgtgagctgaagatcttagattttgggctggctcgccacacagatgatgaaatgaccgggtacgtcgccacacggtggtaccgagccccagagattatgctgaactggatgcattacaaccagactgtagatatctggagcgttggctgtatcatggcagagctgctcactggtcgcactctgtttcccggaacagaccatattaatcagctgcagcagataatgcggctaacaggcaccccccctgcttatttgatcaacagaatgccgtcccacgaagcgagaaattatatacaaagcctgactcagatgccgaagatgaacttcgctaatgtgtttattggcgcaaacccgctggctgtcgatctcctcgaaaaaatgctggtactcgactctgataaaaggattacagccgctcaagccctcgcccatgcatattttgctcagtatcacgaccctgatgatgaaccagtggcagatccatacgatcaatcttttgaatccagagatcttttgattgacgagtggaaatcattaacctacgacgaggtgatctcgttcgtaccgcctcccctggatcaagaggagatggaaagctag

SEQ ID NO: 116562 - DNA, 1083 bp, Artificial Sequence
  derived and/or modified sequence
atgagccaggagagacccaccttctacagacaggagctgaacaagaccatctgggaggtgcccgagagataccagaacctgagccccgtgggcagcggcgcctacggcagcgtgtgcgccgccttcgacaccaagaccggcctgagagtggccgtgaagaagctgagcagacccttccagagcatcatccacgccaagagaacctacagagagctgagactgctgaagcacatgaagcacgagaacgtgatcggcctgctggacgtgttcacccccgccagaagcctggaggagttcaacgacgtgtacctggtgacccacctgatgggcgccgacctgaacaacatcgtgaagtgccagaagctgaccgacgaccacgtgcagttcctgatctaccagatcctgagaggcctgaagtacatccacagcgccgacatcatccacagagacctgaagcccagcaacctggccgtgaacgaggactgcgagctgaagatcctggacttcggcctggccagacacaccgacgacgagatgaccggctacgtggccaccagatggtacagagcccccgagatcatgctgaactggatgcactacaaccagaccgtggacatctggagcgtgggctgcatcatggccgagctgctgaccggcagaaccctgttccccggcaccgaccacatcaaccagctgcagcagatcatgagactgaccggcaccccccccgcctacctgatcaacagaatgcccagccacgaggccagaaactacatccagagcctgacccagatgcccaagatgaacttcgccaacgtgttcatcggcgccaaccccctggccgtggacctgctggagaagatgctggtgctggacagcgacaagagaatcaccgccgcccaggccctggcccacgcctacttcgcccagtaccacgaccccgacgacgagcccgtggccgacccctacgaccagagcttcgagagcagagacctgctgatcgacgagtggaagagcctgacctacgacgaggtgatcagcttcgtgcccccccccctggaccaggaggagatggagagctag

SEQ ID NO: 116563 - protein, 971 aa, Artificial Sequence
  derived and/or modified sequence
MELSDANLQTLTEYLKKTLDPDPAIRRPAEKFLESVEGNQNYPLLLLTLLEKSQDNVIKVCASVTFKNYIKRNWRIVEDEPNKICEADRVAIKANIVHLMLSSPEQIQKQLSDAISIIGREDFPQKWPDLLTEMVNRFQSGDFHVINGVLRTAHSLFKRYRHEFKSNELWTEIKLVLDAFALPLTNLFKATIELCSTHANDASALRILFSSLILISKLFYSLNFQDLPEFFEDNMETWMNNFHTLLTLDNKLLQTDDEEEAGLLELLKSQICDNAALYAQKYDEEFQRYLPRFVTAIWNLLVTTGQEVKYDLLVSNAIQFLASVCERPHYKNLFEDQNTLTSICEKVIVPNMEFRAADEEAFEDNSEEYIRRDLEGSDIDTRRRAACDLVRGLCKFFEGPVTGIFSGYVNSMLQEYAKNPSVNWKHKDAAIYLVTSLASKAQTQKHGITQANELVNLTEFFVNHILPDLKSANVNEFPVLKADGIKYIMIFRNQVPKEHLLVSIPLLINHLQAESIVVHTYAAHALERLFTMRGPNNATLFTAAEIAPFVEILLTNLFKALTLPGSSENEYIMKAIMRSFSLLQEAIIPYIPTLITQLTQKLLAVSKNPSKPHFNHYMFEAICLSIRITCKANPAAVVNFEEALFLVFTEILQNDVQEFIPYVFQVMSLLLETHKNDIPSSYMALFPHLLQPVLWERTGNIPALVRLLQAFLERGSNTIASAAADKIPGLLGVFQKLIASKANDHQGFYLLNSIIEHMPPESVDQYRKQIFILLFQRLQNSKTTKFIKSFLVFINLYCIKYGALALQEIFDGIQPKMFGMVLEKIIIPEIQKVSGNVEKKICAVGITKLLTECPPMMDTEYTKLWTPLLQSLIGLFELPEDDTIPDEEHFIDIEDTPGYQTAFSQLAFAGKKEHDPVGQMVNNPKIHLAQSLHKLSTACPGRVPSMVSTSLNAEALQYLQGYLQAASVTLL

SEQ ID NO: 116564 - protein, 754 aa, Artificial Sequence
  derived and/or modified sequence
MLSNLNFQDLPEFFEDNMETWMNNFHTLLTLDNKLLQTDDEEEAGLLELLKSQICDNAALYAQKYDEEFQRYLPRFVTAIWNLLVTTGQEVKYDLLVSNAIQFLASVCERPHYKNLFEDQNTLTSICEKVIVPNMEFRAADEEAFEDNSEEYIRRDLEGSDIDTRRRAACDLVRGLCKFFEGPVTGIFSGYVNSMLQEYAKNPSVNWKHKDAAIYLVTSLASKAQTQKHGITQANELVNLTEFFVNHILPDLKSANVNEFPVLKADGIKYIMIFRNQVPKEHLLVSIPLLINHLQAESIVVHTYAAHALERLFTMRGPNNATLFTAAEIAPFVEILLTNLFKALTLPGSSENEYIMKAIMRSFSLLQEAIIPYIPTLITQLTQKLLAVSKNPSKPHFNHYMFEAICLSIRITCKANPAAVVNFEEALFLVFTEILQNDVQEFIPYVFQVMSLLLETHKNDIPSSYMALFPHLLQPVLWERTGNIPALVRLLQAFLERGSNTIASAAADKIPGLLGVFQKLIASKANDHQGFYLLNSIIEHMPPESVDQYRKQIFILLFQRLQNSKTTKFIKSFLVFINLYCIKYGALALQEIFDGIQPKMFGMVLEKIIIPEIQKVSGNVEKKICAVGITKLLTECPPMMDTEYTKLWTPLLQSLIGLFELPEDDTIPDEEHFIDIEDTPGYQTAFSQLAFAGKKEHDPVGQMVNNPKIHLAQSLHKLSTACPGRVPSMVSTSLNAEALQYLQGYLQAASVTLL

SEQ ID NO: 116565 - DNA, 2916 bp, Artificial Sequence
  derived and/or modified sequence
atggagctgtccgatgctaacctccaaaccctgaccgaatacctaaaaaagacgctggatcctgacccggcaattcggcgccctgctgaaaaatttctggagagtgttgagggaaaccagaactatccacttttgcttctcacactactggagaaaagccaggacaatgttattaaggtttgcgccagcgtgaccttcaagaactatatcaaacggaattggcgcatcgtcgaggacgaacccaacaagatttgtgaggctgaccgtgtggcaataaaagccaatatcgtacatttgatgttgtccagccccgagcagatccagaagcaattgtctgatgcaatttcaatcattgggcgggaagatttcccgcaaaagtggcctgacctcctcacagagatggtcaataggtttcaaagcggggattttcacgttattaatggcgttctacgcacagcccatagcctctttaagagatatagacacgaatttaagtccaatgaactctggaccgaaatcaaactggtcctcgatgcgtttgccctacctctgacaaatctgttcaaggcaaccatcgaactgtgcagtacacatgccaatgacgcctctgcgctgcgcatattattctcttcactgatcctgatatcgaagttattttacagcctgaactttcaagatcttccagagttttttgaggacaacatggaaacatggatgaataactttcacaccttgctgactctggacaacaagctgttgcagaccgacgacgaagaggaagcgggtcttcttgagctcttaaaaagccagatctgtgataatgcggccctctacgctcagaaatatgacgaggaatttcagagatacctgcccaggtttgtgaccgctatttggaatctgctggtgacgactgggcaggaggtgaagtacgacctgctggtctcgaacgccattcaatttcttgcttccgtttgtgaaaggccacactacaagaatctgtttgaggaccagaacactctgacaagcatttgtgaaaaggtcatcgtgcctaacatggagtttcgcgctgcggatgaggaagcgtttgaggacaactccgaagaatacatccgccgtgacctcgaggggtccgacattgacacccgccggcgcgcagcttgtgatctggttcgcggcttgtgtaaattttttgaagggccagtgaccggtatctttagcggctacgtgaattctatgctccaagaatatgcaaaaaaccccagcgtgaattggaagcacaaggatgcagctatctacctggttacttctctcgcgtccaaagcacagacccagaagcacggtattacacaggcaaatgaactggtgaacctgaccgagttcttcgtcaatcatattctgccagacttaaaatctgcgaacgtgaacgagttcccagtcctcaaagcagacgggatcaaatacatcatgatatttagaaatcaggtgccaaaggaacatttgttggtttcaattcccctgctgattaaccacttgcaagctgaatctattgtggtccacacgtatgcagcacatgccctcgagagactttttacaatgcgaggcccaaataacgccactttgtttaccgctgcagaaatagctcctttcgtagagatcctcctgacaaatctttttaaggcactcaccttgcccggttcctccgagaatgagtatattatgaaagccataatgagatccttctccctcttgcaggaggccatcatcccttatattcccacactgatcacccaattgacccagaagttgttagctgtgagcaaaaacccatcgaagcctcactttaatcactacatgttcgaggcaatatgtctgagtataaggatcacttgcaaggccaatcccgctgcggtggttaatttcgaggaggccctatttctggtttttacagagatcctacagaacgacgtccaggagtttataccatacgtttttcaggtcatgagcctcctcttggagacgcataagaacgacatcccatcttcctatatggcactcttccctcatttactgcagcccgtactgtgggaacgaactggaaatatacccgctctggtccgcctgttgcaggctttcctggaaagaggcagtaacacaatcgcctctgccgcggcggacaagatacctggcctgctcggcgtcttccagaagttgatagccagcaaggccaatgaccatcagggtttttatcttttaaactctatcattgagcacatgccaccagagtccgtggatcaataccgaaaacagatcttcatacttctcttccaacggctccagaactctaagacaaccaaattcattaagtcattcctggtcttcattaacttgtattgcatcaagtatggcgctttagctctccaggagatattcgatggcatacaacctaagatgtttggaatggttctggaaaaaattatcatccctgaaattcagaaggtgtcaggcaacgtagagaaaaaaatttgtgcagtcggtatcaccaagctccttactgaatgcccccccatgatggacactgaatacacaaagctgtggacccctctcctccaatccctgattggcctgtttgagctcccggaggatgataccatccccgacgaggagcactttatcgatatcgaggacacgcccggctaccagactgccttttctcagttggcattcgctggcaaaaaggaacacgatccagtgggtcaaatggttaacaacccaaaaattcacctcgctcaatcattgcacaagctaagtaccgcttgtccaggacgggtgcctagcatggtatctacaagtcttaatgccgaggctctacagtacctgcagggatatcttcaggcagcttccgttaccttactttag

SEQ ID NO: 116566 - DNA, 2265 bp, Artificial Sequence
  derived and/or modified sequence
atgctctctaacttgaacttccaagacttgccagagtttttcgaggacaatatggagacttggatgaacaactttcatacactgctcactctcgacaacaagctcctacaaactgacgacgaggaggaagctggtctgcttgaactgctcaagtctcaaatctgcgataatgccgcgctgtatgcccagaaatatgatgaggagttccagcggtacctcccacgttttgtgactgctatttggaaccttctggtcaccacaggacaggaagtgaaatatgatttgctggtgtccaatgcaattcagtttctcgcaagtgtttgcgagcggccgcactataaaaatctgttcgaggatcagaacacacttacatccatctgtgagaaggtgatagtgcccaacatggagtttcgcgcagccgacgaagaggctttcgaagacaactctgaagagtacattcgccgtgatctggagggatccgacatcgacacccgccgccgcgccgcctgtgatctcgtcaggggactgtgtaagtttttcgaaggaccagtgacagggatcttcagtggttacgtgaactctatgctgcaggagtacgccaaaaaccccagtgtgaattggaagcacaaagacgctgctatttatctagtgacctccttagcaagcaaagcccagactcagaagcatgggatcacccaggccaacgaacttgtaaacctcactgaattttttgttaaccatatactcccggacctgaaaagtgctaatgtgaatgagtttcccgtgctcaaagctgatggaataaagtatattatgatatttcggaatcaggtcccaaaggagcacttgttagtttccatccctctgctcataaaccacctccaggcagagtccatcgttgtccatacgtacgcagctcacgcactggagagattattcacaatgcggggacccaataacgctaccctgttcaccgcagccgagatagcaccgtttgtggaaattctgctcacgaatttgttcaaagccctgacattgccgggcagctccgagaacgagtacatcatgaaggccatcatgagaagcttctcattactacaagaggccatcatcccttatatcccgaccctcattacccagctgacccagaaactcctggctgttagcaagaatccaagcaagcctcactttaaccattacatgttcgaggcgatatgcctgagcatcagaatcacttgcaaggcaaatcccgccgctgtggtaaattttgaagaagcactgttccttgtcttcaccgagatcttacagaatgacgtacaggagttcatcccgtatgtgtttcaggtgatgagtttgcttctcgaaacccataagaacgacatccctagcagctatatggccctgtttccccacctgctgcaaccagtactttgggagagaactggtaacattcccgcactcgttagactgctgcaggcatttctcgaacgcggcagcaatacaatcgcgagtgcggcagcagacaagatccctggactgttgggggtgtttcaaaagctcatcgctagcaaagcaaacgaccaccagggtttctatctactgaattcaatcattgagcacatgcctcccgaatcggtcgatcagtaccgcaagcagatttttattctcctgttccagcggcttcagaattcaaaaaccaccaaatttatcaagtcttttcttgtctttatcaacctctactgcatcaagtacggtgctctggctctgcaggaaatttttgatggcatccaacccaagatgtttggaatggtgctggaaaagattataattcccgagatccagaaggtgagcggaaacgtagaaaagaagatctgcgccgtgggcatcacaaagctgctcacagagtgtccccctatgatggatacagaatatactaaactctggaccccactgttacagagtctgataggcctgttcgaattgcccgaagacgataccatccctgacgaggaacactttatagacatcgaggacactcccggctatcagaccgcgttcagtcagcttgcatttgcaggcaagaaggagcatgaccccgtcgggcagatggtgaacaacccaaagatccatctggcccagtccctgcacaagctgagcacagcctgccctgggagagtgccttctatggtaagcacctctctcaatgccgaggccctacagtaccttcagggatacttgcaggccgcctcagtaaccttactgtag

SEQ ID NO: 116567 - DNA, 2916 bp, Artificial Sequence
  derived and/or modified sequence
atggagctgagtgatgccaacctgcagaccctgacagagtacctgaagaagaccctggaccctgaccctgccatccggcggcctgctgagaagttcctggagagcgtggagggcaaccagaactaccccctgctgctgctgaccctgctggagaagagccaggacaacgtcatcaaggtgtgtgcctctgtgaccttcaagaactacatcaagaggaactggagaattgtggaggatgagcccaacaagatctgtgaggccgacagagtggccatcaaggccaacatcgtgcacctgatgctgagcagccctgagcagatccagaagcagctgagtgatgccatcagcatcatcggccgggaggacttcccccagaagtggccagacctgctgacagagatggtgaaccgcttccagagcggggacttccacgtgatcaatggagtgctgaggacagcccacagcctcttcaagcgctacagacatgagttcaagagcaatgagctgtggacagagatcaagctggtgctggatgcctttgccctgcccctgaccaacctcttcaaggccaccatcgagctgtgcagcacccacgccaatgatgccagcgccctgcgcatcctcttcagcagcctcatcctgatcagcaagctgttctacagcctgaacttccaggacctgcctgagttctttgaggacaacatggagacctggatgaacaacttccacaccctgctgaccctggacaacaagctgctgcagacagatgatgaggaggaggccggcctgctggagctgctgaagagccagatctgtgacaatgctgccctgtatgcccagaagtatgatgaggagttccagcgctacctgcccaggtttgtgacagccatctggaacctgctggtgaccaccggccaggaggtgaagtatgacctgctggtgtccaatgccatccagttcctggcctctgtgtgtgagcggccccactacaagaacctgtttgaggaccagaacaccctgaccagcatctgtgagaaggtgattgtgcccaacatggagttccgggctgctgatgaggaggcctttgaggacaacagcgaggagtacatcagaagagacctggagggcagtgacatcgacaccaggagaagagctgcctgtgacctggtgcggggcctgtgcaagttctttgagggccctgtgacaggcatcttcagcggctacgtgaacagcatgctgcaggagtatgccaagaaccccagcgtgaactggaagcacaaggatgctgccatctacctggtgaccagcctggccagcaaggcccagacccagaagcacggcatcacccaggccaatgagctggtgaacctgacagagttctttgtgaaccacatcctgcctgacctgaagagcgccaacgtgaatgagttccctgtgctgaaggcagatggcatcaagtacatcatgatcttcaggaaccaggtgcccaaggagcacctgctggtgtccatccccctgctgatcaaccacctgcaggccgagagcatcgtggtgcacacctacgccgcccacgccctggagcggctcttcaccatgaggggccccaacaatgccaccctcttcaccgctgctgagatcgccccctttgtggagatcctgctgaccaacctcttcaaggccctgaccctgcccggcagcagtgaaaatgagtacatcatgaaggccatcatgaggagcttcagcctgctgcaggaggccatcatcccctacatccccaccctcatcacccagctgacccagaagctgctggccgtgtccaagaaccccagcaagccccacttcaaccactacatgtttgaggccatctgcctgagcatccgcatcacctgcaaggccaacccagctgctgtggtgaactttgaggaggccctcttcctggtgttcacagagatcctgcagaatgatgtgcaggagttcatcccctacgtgttccaggtgatgagcctgctgctggagacccacaagaatgacatccccagcagctacatggccctcttcccccacctgctgcagcctgtgctgtgggagaggacaggcaacatcccagccctggtgcggctgctgcaggccttcctggagcggggcagcaacaccatcgccagcgctgctgctgacaagatccctggcctgctgggcgtcttccagaagctgattgccagcaaggccaatgaccaccagggcttctacctgctgaacagcatcatcgagcacatgcctcctgagagcgtggaccagtacaggaagcagatcttcatcctgctcttccagaggctgcagaacagcaagaccaccaagttcatcaagagcttcctggtgttcatcaacctgtactgcatcaagtatggagccctggccctgcaggagatctttgatggcatccagcccaagatgtttggcatggtgctggagaagatcatcatccctgagatccagaaggtgtctggaaatgtggagaagaagatctgtgctgtgggcatcaccaagctgctgacagagtgcccccccatgatggacacagagtacaccaagctgtggacccccctgctgcagagcctgattggcctgtttgagctgcctgaagatgacaccatcccagatgaggagcacttcattgatattgaggacaccccaggctaccagacagccttcagccagctggcctttgctgggaagaaggagcatgaccctgtgggccagatggtgaacaaccccaagatccacctggcccagagcctgcacaagctgagcacagcctgccccggccgggtgcccagcatggtgtccaccagcctgaatgctgaggccctgcagtacctgcagggctacctgcaggccgcctctgtgaccctgctgtag

SEQ ID NO: 116568 - DNA, 2265 bp, Artificial Sequence
  derived and/or modified sequence
atgctgagcaacctgaacttccaggacctgcctgagttctttgaggacaacatggagacctggatgaacaacttccacaccctgctgaccctggacaacaagctgctgcagacagatgatgaggaggaggccggcctgctggagctgctgaagagccagatctgtgacaatgctgccctgtatgcccagaagtatgatgaggagttccagcgctacctgcccaggtttgtgacagccatctggaacctgctggtgaccaccggccaggaggtgaagtatgacctgctggtgtccaatgccatccagttcctggcctctgtgtgtgagcggccccactacaagaacctgtttgaggaccagaacaccctgaccagcatctgtgagaaggtgattgtgcccaacatggagttccgggcagcagatgaggaggcctttgaggacaacagcgaggagtacatccggcgggacctggagggcagtgacatcgacacccggcggcgggccgcctgtgacctggtgcggggcctgtgcaagttctttgagggccctgtgacaggcatcttcagcggctacgtgaacagcatgctgcaggagtatgccaagaaccccagcgtgaactggaagcacaaggatgctgccatctacctggtgaccagcctggccagcaaggcccagacccagaagcacggcatcacccaggccaatgagctggtgaacctgacagagttctttgtgaaccacatcctgcctgacctgaagagcgccaacgtgaatgagttccctgtgctgaaggcagatggcatcaagtacatcatgatcttcaggaaccaggtgcccaaggagcacctgctggtgtccatccccctgctgatcaaccacctgcaggccgagagcatcgtggtgcacacctatgctgcccacgccctggagcggctcttcaccatgaggggccccaacaatgccaccctcttcaccgctgctgagatcgccccctttgtggagatcctgctgaccaacctcttcaaggccctgaccctgcccggcagcagtgaaaatgagtacatcatgaaggccatcatgaggagcttcagcctgctgcaggaggccatcatcccctacatccccaccctcatcacccagctgacccagaagctgctggccgtgtccaagaaccccagcaagccccacttcaaccactacatgtttgaggccatctgcctgagcatccgcatcacctgcaaggccaacccagctgctgtggtgaactttgaggaggccctcttcctggtgttcacagagatcctgcagaatgatgtgcaggagttcatcccctacgtgttccaggtgatgagcctgctgctggagacccacaagaatgacatccccagcagctacatggccctcttcccccacctgctgcagcctgtgctgtgggagaggactggaaacatcccagccctggtgcggctgctgcaggccttcctggagcggggcagcaacaccatcgccagcgctgctgctgacaagatccctggcctgctgggcgtcttccagaagctgattgccagcaaggccaatgaccaccagggcttctacctgctgaacagcatcatcgagcacatgcctcctgagagcgtggaccagtacaggaagcagatcttcatcctgctcttccagaggctgcagaacagcaagaccaccaagttcatcaagagcttcctggtgttcatcaacctgtactgcatcaagtacggggccctggccctgcaggagatctttgatggcatccagcccaagatgtttggcatggtgctggagaagatcatcatccctgagatccagaaggtgtctggaaatgtggagaagaagatctgtgctgtgggcatcaccaagctgctgacagaatgtcctcccatgatggacacagagtacaccaagctgtggacccccctgctgcagagcctcatcggcctgtttgagctgcctgaagatgacaccatcccagatgaggagcacttcatcgacatcgaggacaccccaggctaccagacagccttcagccagctggcctttgctgggaagaaggagcatgaccctgtgggccagatggtgaacaaccccaagatccacctggcccagagcctgcacaagctgagcacagcctgccccggccgggtgcccagcatggtgtccaccagcctgaatgctgaggccctgcagtacctgcagggctacctgcaggccgcctctgtgaccctgctgtag

SEQ ID NO: 116569 - DNA, 2916 bp, Artificial Sequence
  derived and/or modified sequence
atggagctgagcgacgccaacctgcagaccctgaccgagtacctgaaaaagaccctggatcctgacccagccatcaggaggcccgccgagaagtttctggaatcagtagaaggcaatcagaattatcccctccttcttctgactctccttgagaaaagccaggacaacgtaatcaaagtgtgcgcaagtgtgacgttcaaaaactacattaagagaaattggagaattgttgaggatgagccgaataagatttgcgaggctgatcgggtggccattaaggcaaatatcgtgcatctgatgctgtccagccccgagcagatacagaaacaactttctgatgcaatttcaatcatagggcgggaagattttcctcagaagtggccggatctgctcaccgaaatggtgaatagatttcagtcaggtgatttccacgtgattaatggagtccttcgcactgcccatagcctattcaagcgttacaggcatgaattcaagtccaacgagctgtggacagagattaagctggtccttgacgcattcgcccttcctctgaccaatttattcaaggctacgatagagctctgctccacccatgctaatgacgcaagcgcattaaggattctgttttctagtctaattctaatcagcaaactcttctactctctgaactttcaagatctccctgagttcttcgaagacaatatggagacctggatgaacaattttcacaccttgctgactcttgacaacaagttgctgcagacagacgacgaagaggaggctggcttgctcgaactcctgaaaagtcaaatctgcgacaacgcggccctctacgctcagaaatacgacgaagaattccaaaggtacctgcctcggttcgttacagccatctggaatctgcttgtaacgacgggccaggaagtcaaatacgaccttcttgtgagcaacgctatacagtttttagccagcgtgtgcgagcgcccccattataagaacctctttgaagatcaaaataccctgaccagcatttgcgagaaggtgatcgtgcctaatatggagtttagagctgccgacgaagaagcatttgaagacaacagtgaagagtatatccgccgtgacctggaggggagcgacattgacacacgccggcgtgccgcttgcgatctggttcgtggattgtgcaaattttttgaagggcctgttactggcatcttttctggttacgttaacagtatgctgcaggagtatgccaaaaacccttcagtcaactggaagcacaaggacgcagccatatatcttgtcacatcactagcaagcaaagcgcaaactcagaagcacggtatcacccaggctaatgagcttgtcaatttaaccgaattttttgtgaatcacatcttgcctgacctgaagagtgctaacgttaatgagttccctgtcctgaaggccgatggcataaaatatatcatgatcttccgtaatcaggtgcctaaagagcatcttctggtaagcatccccctcttgataaaccacctgcaggcagagtctatagtggtgcatacttatgcagctcacgccctggaaagattatttacaatgcggggccccaataatgccaccctgtttacggccgccgaaattgctcccttcgttgagatcctcctcaccaacctgttcaaagctctgacattgccagggagctcagaaaacgaatacatcatgaaagctattatgcgcagctttagtctgctacaggaggcaatcattccttacatccccacgctcatcacacagcttactcagaaattattggccgtgtctaagaatccatctaaaccgcattttaatcactacatgttcgaggcgatctgcctgtccattaggattacatgcaaggccaatcctgcagctgtggtgaacttcgaggaggcactattcttggtctttaccgagatacttcagaacgacgtccaggaattcatcccatacgtgtttcaggtgatgagtctgctcttggagacacataagaacgatataccgtcgtcctacatggcgctcttcccacacctgcttcaacctgtgctgtgggaacgaaccgggaatattccagctctggtgagactcctgcaggcttttctggaacgggggagcaataccattgcgtccgccgccgccgacaaaatcccaggcttgttgggcgtttttcagaagctgatcgcgagcaaagccaacgatcaccagggtttttacctgctcaactctatcatagaacacatgccacctgagtccgttgaccaatataggaaacaaatcttcatcctgctgtttcagagactgcagaactcgaagaccacgaagtttattaagagctttcttgtgttcatcaatctgtattgcataaagtacggggcgcttgcgctgcaagaaatttttgatggcatacaacccaagatgtttgggatggttctggaaaagattataattcccgaaattcagaaagtgtctggaaacgtcgaaaagaagatatgtgcagtaggaatcacaaagctgctgaccgaatgcccccctatgatggacaccgagtacaccaagctctggactccactactccaatcccttatcgggctcttcgagcttccagaggacgacacaatacccgacgaggaacactttattgatatcgaggatacaccaggctatcagaccgcatttagccagctcgccttcgccggtaaaaaagaacacgatcccgtcggtcaaatggtcaacaatcccaagatccacttagctcagtctttgcacaagctgtcgaccgcttgcccgggcagagttccctcaatggtctccacatctttgaacgcggaagctctgcagtacctgcaaggatatcttcaggccgcttccgtaacattactgtag

SEQ ID NO: 116570 - DNA, 2265 bp, Artificial Sequence
  derived and/or modified sequence
atgctgagcaacctgaacttccaggacctgcccgagttcttcgaggataatatggagacatggatgaataacttccacaccttactgacattggacaacaagctgctgcaaacagacgatgaagaggaagccggcttgctcgagctcctgaagagccagatctgtgacaatgccgcactgtacgctcagaagtacgatgaggaattccaacgctacctcccccggtttgttacagccatttggaacttacttgtgacaactggacaggaggtgaagtacgatctgctagtgagcaatgctatacagttcctggcatccgtttgtgaacggccccattacaaaaacttatttgaagatcagaatacccttaccagcatttgtgaaaaggtgattgtgcccaatatggagtttagggctgctgatgaagaagcctttgaagacaactccgaagagtacatccggagggatcttgaagggtctgacatagataccaggcggagagcagcctgcgacttggtgcgtggcctgtgcaaattcttcgaaggaccagttacaggcatcttctctggttacgtgaactcaatgctacaggaatatgctaaaaatccatccgtcaactggaagcacaaggatgctgctatttacctggttacgtctttggcaagcaaggcccagacccagaagcacgggatcactcaagccaacgagcttgttaatctgacagaattctttgtgaatcacatcttgccagacctaaaatcggcaaacgttaacgagtttcctgtgctgaaggcggatggcataaaatatattatgatctttaggaaccaagtacccaaggagcacctgctagtttccatcccgttgttgattaatcatctgcaggccgaatctatcgtcgtgcacacatatgcagctcacgctctcgagaggctttttactatgcgcggacctaataatgcaaccttgtttacagctgctgagatcgcgccgttcgtggaaattctactgaccaacctgttcaaggccctgacactccccgggagttcagaaaatgagtacatcatgaaagcgataatgagatcatttagcttgctgcaggaggccattatcccttatattccaaccctgattactcaattaactcagaaactcctggctgtaagcaagaatcctagcaagccacactttaaccactatatgttcgaagctatttgcctgagcattagaatcacctgtaaagccaatcccgccgccgtggtgaatttcgaggaagcccttttcctggtgtttaccgagatcttgcagaacgacgttcaggagtttattccttacgtttttcaggtaatgtccctgctgctggagacacacaaaaatgatatacccagcagttacatggccttgttcccccacctcctgcagccagttctttgggaacgcacgggaaacattcccgctcttgtcagactcttgcaggcctttctagagcgaggtagcaacaccatcgccagcgccgctgcagacaagatcccggggctactaggtgttttccagaaactgatcgctagtaaggccaatgaccatcaaggattttatcttctgaactcaatcatagaacacatgccccctgaatcagttgatcagtataggaagcagatatttatcctccttttccaacggctgcagaacagtaagaccaccaaatttatcaaatccttcttggtctttataaatctttattgcattaagtatggtgccttggcactgcaagagattttcgatggaatccagcctaaaatgttcggcatggtgctggagaagattataattccagaaattcagaaagtgtctgggaatgtagagaagaaaatctgtgctgtggggataaccaaactactgaccgaatgtccgccaatgatggacacggagtataccaaactgtggactcccttgctgcagtccctcatcggactgtttgaactgcccgaggatgacactatcccggacgaagaacatttcatagacattgaggacacacccggctaccagaccgctttcagccaacttgcttttgctggaaaaaaggagcatgatccagtcggccagatggtgaataatcccaaaatccacctggcacagtcacttcataaattgagcacggcctgtcccggccgcgtgccctcgatggtatctacaagtctgaacgcagaggccctgcaatatttgcaggggtacctccaggccgcatctgtgaccttattgtag

SEQ ID NO: 116571 - DNA, 2916 bp, Artificial Sequence
  derived and/or modified sequence
atggagctaagtgacgctaaccttcagactttaacagaataccttaagaaaacattggatcctgacccagccatcaggagaccagccgaaaaatttctggaaagtgtcgagggaaaccagaactaccccctgttgctgctaaccctgctcgaaaaatcgcaagataatgtcattaaggtgtgcgcatctgttacctttaagaactacatcaaacggaactggaggatcgtcgaagatgaaccaaataagatttgcgaagcagacagagtggccataaaggccaatattgttcacctcatgctttcatcgcctgaacaaatccagaaacagttatccgacgctatatccatcattgggcgtgaagactttccacagaagtggcccgacctgctgacagagatggtaaatagatttcagagcggggacttccatgtgattaacggcgtcctgcggactgctcacagcctgttcaagcgttacagacacgaattcaagtctaacgagctgtggactgaaatcaagttggtactggacgctttcgccttacccttaactaacctgtttaaagcgactatagagctctgtagtacgcacgccaatgatgcgagtgcgctgagaattctgttctcttccctgattctgatctccaagctcttttactctcttaactttcaggacttgccagagtttttcgaagataatatggagacgtggatgaacaactttcacaccctgttgacattggacaacaagctgcttcagaccgatgatgaggaggaggccggactcctggagctgttgaagtctcagatctgcgacaatgcagctctttatgcccagaaatatgatgaagaattccaaaggtacctgcctagatttgtaaccgccatctggaatctgcttgtaaccaccggccaggaagtcaaatatgacctgctggtgtctaatgccatccaattcctcgcttctgtctgcgaacggcctcattataaaaacctcttcgaggaccaaaacactctcacctcaatctgcgagaaggtaatagtgcctaatatggagtttagggctgccgacgaggaagcattcgaggacaactcggaagaatatatacggagggatttggagggtagcgatatcgatactcgtaggcgtgctgcttgcgatctggtccgcggtttgtgtaaattcttcgaaggaccagtgaccggaatattctccggctacgtgaattcaatgctgcaggagtacgcgaagaatccaagcgtaaactggaagcacaaagacgccgctatttatttggtgacctccctggcatcaaaggctcagacacagaagcacggcataacccaggcaaacgagctggtgaacctgactgaattctttgtcaatcacattcttcccgatctgaagagcgcaaacgtgaacgagtttcctgttttgaaagccgacgggattaaatatatcatgatctttagaaatcaggtgcccaaagaacacctcctggtgagtattcctttgttaataaatcatctgcaagcagaaagtatagtcgtgcacacctatgcggctcacgcccttgagagacttttcaccatgagaggtccaaacaacgccaccctgttcacggcggcagagatcgctcccttcgttgagatactgttgaccaatctctttaaggctctcaccctgcccggttcctctgagaacgagtatatcatgaaggcgataatgcgctccttcagtctcctccaggaagctattatcccttacattcccactttgattacacagctgactcaaaaactgctggcagtgtccaaaaacccatcaaagcctcactttaaccactacatgtttgaggccatctgtctgtcaatccgcatcacatgcaaggcgaacccagccgcagttgtgaatttcgaggaggccctcttcctggtgtttacggaaatactccagaacgacgtgcaggaatttattccatatgtgtttcaggtgatgagcctgctgctcgagacccacaagaatgatataccaagtagttacatggctttgtttccgcacctgttacagcccgtgctttgggagcgaaccggaaacataccagcgctggttaggctgttgcaggcctttttggagagaggcagcaacacaatcgcctccgcagcagccgacaaaattcctggtcttctgggtgttttccagaagctgatcgcatctaaggccaacgatcatcaaggtttctacctcttgaattccattattgagcacatgccacctgaaagtgtggaccagtatcgcaaacagatcttcatacttctgttccagaggttgcaaaacagcaagaccactaaatttatcaaaagctttctcgtttttatcaatttgtactgcatcaagtacggggctctcgccttgcaagagattttcgatgggatacaacctaagatgtttggcatggttttagagaagatcatcattccggaaattcaaaaggtcagcggtaacgtcgagaagaagatctgcgctgtgggtatcacaaaactcttgactgaatgtccccctatgatggacactgaatacactaagctatggacccctctgctccagtctctgatcggcttgtttgaactgccagaggatgataccattccagacgaagaacatttcatcgacatcgaggacacacctggctatcagaccgccttcagccagcttgctttcgccggtaagaaggagcacgacccagtgggccagatggttaacaatccaaagattcaccttgcacagagccttcataagttgtctaccgcgtgccccggaagggtaccttccatggtcagcacttccctgaacgctgaggctctgcaatatcttcaggggtacctgcaggcagcgtccgtgactctcctgtag

SEQ ID NO: 116572 - DNA, 2265 bp, Artificial Sequence
  derived and/or modified sequence
atgctcagtaatctgaacttccaggatctacccgaattttttgaagacaatatggagacgtggatgaataactttcatacgctgctcaccttggacaacaaactcctccaaaccgacgacgaagaggaggcgggtctgctggagctcctgaaatcgcagatctgcgacaatgccgctttatatgcccaaaaatacgatgaggagtttcaacgatatctgcccagatttgtgactgccatttggaacctgttggttaccactgggcaggaagtgaaatacgatcttcttgtatctaatgccattcagttcctagcatcagtgtgtgagcggccacattataagaatctttttgaagatcaaaacaccctgacatccatttgtgaaaaggtgatcgttcctaacatggaatttagagctgccgatgaggaggctttcgaggacaacagcgaggagtacattagacgagatctagaagggtccgatattgacacacggagaagggctgcctgcgatctcgtgcgtggcctgtgcaaattctttgagggccctgtgaccggtatcttctctgggtatgttaactccatgctgcaggaatacgccaagaatccctctgtaaactggaaacacaaagatgctgccatctatctggttacgtccctcgcttcaaaggcacagacacagaagcatgggatcacgcaagcaaacgagctggtcaacctcacagaatttttcgtgaaccacatactgcctgacttgaagtctgcaaacgtgaatgaatttcctgtgcttaaggccgacggcattaagtacattatgatctttagaaatcaggtgccgaaagagcatttgctagtatccattccactactgataaatcatctgcaggccgaaagtattgtagttcacacctacgccgcacatgctctggagcggttattcaccatgcgcggacccaacaatgctacactgtttaccgctgctgaaatcgctcccttcgtcgaaatccttctgaccaacctgtttaaggctctgacacttccgggatcctccgaaaacgagtatatcatgaaagccatcatgcgcagctttagccttctccaggaggccatcattccttacatcccaaccctaatcacacaactcacccagaaactgcttgccgtctccaaaaatccctctaaacctcatttcaaccactacatgtttgaggcgatttgcctttctatacgcatcacatgcaaggccaatccggctgccgtggtaaacttcgaggaagctctgttcctggttttcaccgaaattctgcagaacgatgtccaggagttcattccttatgtgtttcaggtcatgagtctgctgttggaaacgcacaaaaatgacatccccagcagttacatggcactctttccccatctgctccagccagtattgtgggaacgaacaggcaatataccagcattagtgcgcctgctgcaggcatttctcgagcgagggagcaacacaatcgcctccgcagcggctgataaaataccaggcctgctgggcgtcttccagaagctcatagccagcaaagctaacgatcaccagggcttctaccttttaaatagcatcattgagcacatgcctccagaaagcgtggatcagtacagaaagcagatattcattctcctcttccagagactgcagaacagcaagaccaccaaattcattaaaagcttcttggtttttatcaatctgtattgcatcaagtacggtgccctggccctgcaagaaatcttcgatgggatccaacctaagatgttcggaatggtgttagaaaagatcattatccccgaaatccaaaaagttagcggcaatgtggaaaagaaaatttgtgcagtgggcatcacaaaactgctcacggagtgcccgccaatgatggacaccgagtataccaaattgtggacgcctctcctgcagtctctcattgggctgttcgagctgccagaggatgacaccattcccgatgaagaacacttcatcgatattgaggacactcccggttatcagacagcgttttcgcaactggcttttgctggaaagaaagaacatgatccagtcggacagatggttaacaatcccaagatacacttagcccagagtctccataagctgtccacagcttgccccggacgggtccctagcatggtgtcgacttcacttaatgctgaagctctgcaatacctgcaggggtatctgcaagccgcatcagtgacactgctgtag

SEQ ID NO: 116573 - DNA, 3553 bp, Artificial Sequence
  derived and/or modified sequence
gtcgcgccattttgccggggtttgaatgtgaggcggagcggcggcaggagcgggtagtgccagctacggtccgcggctggggttccctcctccgtttctgtatccccacgagatcctatagcaatggaactcagcgatgcaaatctgcaaacactaacagaatatttaaagaaaacacttgatcctgatcctgccatccgacgtccagctgagaaatttcttgaatctgttgaaggaaatcagaattatccactgttgcttttgacattactggagaagtcccaggataatgttatcaaagtatgtgcttcagtaacattcaaaaactatattaaaaggaactggagaattgttgaagatgaaccaaacaaaatttgtgaagccgatcgagtggccattaaagccaacatagtgcacttgatgcttagcagcccagagcaaattcagaagcagttaagtgatgcaattagcattattggcagagaagattttccacagaaatggcctgacttgctgacagaaatggtgaatcgctttcagagtggagatttccatgttattaatggagtcctccgtacagcacattcattatttaaaagataccgtcatgaatttaagtcaaacgagttatggactgaaattaagcttgttctggatgcctttgctttgcctttgactaatctttttaaggccactattgaactctgcagtacccatgcaaatgatgcctctgccctgaggattctgttttcttccctgatcctgatctcaaaattgttctatagtttaaactttcaggatctccctgaattttttgaagataatatggaaacttggatgaataattttcatactctcttaacattggataataagcttttacaaactgatgatgaagaggaagccggcttattggagctcttaaaatcccagatttgtgataatgccgcactctatgcacaaaagtacgatgaagaattccagcgatacctgcctcgttttgttacagccatctggaatttactagttacaacgggtcaagaggttaaatatgatttgttggtaagtaatgcaattcaatttctggcttcagtttgtgagagacctcattataagaatctatttgaggaccagaacacgctgacaagtatctgtgaaaaggttattgtgcctaacatggaatttagagctgctgatgaagaagcatttgaagataattctgaggagtacataaggagagatttggaaggatctgatattgatactagacgcagggctgcttgtgatctggtacgaggattatgcaagttttttgagggacctgtgacaggaatcttctctggttatgttaattccatgctgcaggaatacgcaaaaaatccatctgtcaactggaaacacaaagatgcagccatctacctagtgacatctttggcatcaaaagcccaaacacagaagcatggaattacacaagcaaatgaacttgtaaacctaactgagttctttgtgaatcacatcctccctgatttaaaatcagctaatgtgaatgaatttcctgtccttaaagctgacggtatcaaatatattatgatttttagaaatcaagtgccaaaagaacatcttttagtctcgattcctctcttgattaatcatcttcaagctgaaagtattgttgttcatacttacgcagctcatgctcttgaacggctctttactatgcgagggcctaacaatgccactctctttacagctgcagaaatcgcaccgtttgttgagattctgctaacaaaccttttcaaagctctcacacttcctggctcttcagaaaatgaatatattatgaaagctatcatgagaagtttttctctcctacaagaagccataatcccctacatccctactctcatcactcagcttacacagaagctattagctgttagtaagaacccaagcaaacctcactttaatcactacatgtttgaagcaatatgtttatccataagaataacttgcaaagctaaccctgctgctgttgtaaattttgaggaggctttgtttttggtgtttactgaaatcttacaaaatgatgtgcaagaatttattccatacgtctttcaagtgatgtctttgcttctggaaacacacaaaaatgacatcccgtcttcctatatggccttatttcctcatctccttcagccagtgctttgggaaagaacaggaaatattcctgctctagtgaggcttcttcaagcattcttagaacgcggttcaaacacaatagcaagtgctgcagctgacaaaattcctgggttactaggtgtctttcagaagctgattgcatccaaagcaaatgaccaccaaggtttttatcttctaaacagtataatagagcacatgcctcctgaatcagttgaccaatataggaaacaaatcttcattctgctattccagagacttcagaattccaaaacaaccaagtttatcaagagttttttagtctttattaatttgtattgcataaaatatggggcactagcactacaagaaatatttgatggtatacaaccaaaaatgtttggaatggttttggaaaaaattattattcctgaaattcagaaggtatctggaaatgtagagaaaaagatctgtgcggttggcataaccaaattactaacagaatgtcccccaatgatggacactgagtataccaaactgtggactccattattacagtctttgattggtctttttgagttacccgaagatgataccattcctgatgaggaacattttattgacatagaagatacaccaggatatcagactgccttctcacagttggcatttgctgggaaaaaagagcatgatcctgtaggtcaaatggtgaataaccccaaaattcacctggcacagtcacttcacaagttgtctaccgcctgtccaggaagggttccatcaatggtgagcaccagcctgaatgcagaagcgctccagtatctccaagggtaccttcaggcagccagtgtgacactgctttaaactgcatttttctaatgggctaaacccagatggtttcctaggaaatcacaggcttctgagcacagctgcattaaaacaaaggaagttctccttttgaacttgtcacgaattccatcttgtaaaggatattaaatgttgctttaacctgaaccttgagcaaattagttggtttgtgtgatcatacagttatgtgggtggcttctagtttgcaacttcaagggacaagtattaatagttcagtgtatggcgttggtttgtgttgagcgtttgcacggtttggataatcttaaattttgacggacactgtggagactttctgttactaaatccttttgttttgaagctgttgctatttgtatttctcttgtcctttatattttttgtctgtttatttacgcttttattggaaatgtgaataagtaaagaattacttgtgttacttgccaagcagtgcacatttcatagtttcaaatctgtaatcagcaataaaaatcctaaaatatgtacctaagaa

SEQ ID NO: 116574 - DNA, 2689 bp, Artificial Sequence
  derived and/or modified sequence
gccggggtttgaatgtgaggcggagcggcggcaggagcgggtagtgccagctacggtccgcggctggggttccctcctccgtttctgtatccccacgagatcctatagcaatggaactcagcgatgcaaatctgcaaacactaacagaatatttaaagaaaacacttgatcctgatcctgccatccgacgtccagctgagaaatttcttgaatctgttgaaggaaatcagaattatccactgttgcttttgacattactggagaagtcccaggataatgttatcaaatttaaactttcaggatctccctgaattttttgaagataatatggaaacttggatgaataattttcatactctcttaacattggataataagcttttacaaactgatgatgaagaggaagccggcttattggagctcttaaaatcccagatttgtgataatgccgcactctatgcacaaaagtacgatgaagaattccagcgatacctgcctcgttttgttacagccatctggaatttactagttacaacgggtcaagaggttaaatatgatttgttggtaagtaatgcaattcaatttctggcttcagtttgtgagagacctcattataagaatctatttgaggaccagaacacgctgacaagtatctgtgaaaaggttattgtgcctaacatggaatttagagctgctgatgaagaagcatttgaagataattctgaggagtacataaggagagatttggaaggatctgatattgatactagacgcagggctgcttgtgatctggtacgaggattatgcaagttttttgagggacctgtgacaggaatcttctctggttatgttaattccatgctgcaggaatacgcaaaaaatccatctgtcaactggaaacacaaagatgcagccatctacctagtgacatctttggcatcaaaagcccaaacacagaagcatggaattacacaagcaaatgaacttgtaaacctaactgagttctttgtgaatcacatcctccctgatttaaaatcagctaatgtgaatgaatttcctgtccttaaagctgacggtatcaaatatattatgatttttagaaatcaagtgccaaaagaacatcttttagtctcgattcctctcttgattaatcatcttcaagctgaaagtattgttgttcatacttacgcagctcatgctcttgaacggctctttactatgcgagggcctaacaatgccactctctttacagctgcagaaatcgcaccgtttgttgagattctgctaacaaaccttttcaaagctctcacacttcctggctcttcagaaaatgaatatattatgaaagctatcatgagaagtttttctctcctacaagaagccataatcccctacatccctactctcatcactcagcttacacagaagctattagctgttagtaagaacccaagcaaacctcactttaatcactacatgtttgaagcaatatgtttatccataagaataacttgcaaagctaaccctgctgctgttgtaaattttgaggaggctttgtttttggtgtttactgaaatcttacaaaatgatgtgcaagaatttattccatacgtctttcaagtgatgtctttgcttctggaaacacacaaaaatgacatcccgtcttcctatatggccttatttcctcatctccttcagccagtgctttgggaaagaacaggaaatattcctgctctagtgaggcttcttcaagcattcttagaacgcggttcaaacacaatagcaagtgctgcagctgacaaaattcctgggttactaggtgtctttcagaagctgattgcatccaaagcaaatgaccaccaaggtttttatcttctaaacagtataatagagcacatgcctcctgaatcagttgaccaatataggaaacaaatcttcattctgctattccagagacttcagaattccaaaacaaccaagtttatcaagagttttttagtctttattaatttgtattgcataaaatatggggcactagcactacaagaaatatttgatggtatacaaccaaaaatgtttggaatggttttggaaaaaattattattcctgaaattcagaaggtatctggaaatgtagagaaaaagatctgtgcggttggcataaccaaattactaacagaatgtcccccaatgatggacactgagtataccaaactgtggactccattattacagtctttgattggtctttttgagttacccgaagatgataccattcctgatgaggaacattttattgacatagaagatacaccaggatatcagactgccttctcacagttggcatttgctgggaaaaaagagcatgatcctgtaggtcaaatggtgaataaccccaaaattcacctggcacagtcacttcacaagttgtctaccgcctgtccaggaagggttccatcaatggtgagcaccagcctgaatgcagaagcgctccagtatctccaagggtaccttcaggcagccagtgtgacactgctttaaactgcatttttctaatgggctaaacccagatggtttcctaggaaatcacaggcttctgagcacagctgcattaaaacaaaggaagttctccttttgaacttgtcacgaattccatcttgtaaaggatattaaatgttgctttaacctg

SEQ ID NO: 116575 - DNA, 2916 bp, Artificial Sequence
  derived and/or modified sequence
atggagctgagcgacgccaacctgcagaccctgaccgagtacctgaagaagaccctggaccccgaccccgccatcagaagacccgccgagaagttcctggagagcgtggagggcaaccagaactaccccctgctgctgctgaccctgctggagaagagccaggacaacgtgatcaaggtgtgcgccagcgtgaccttcaagaactacatcaagagaaactggagaatcgtggaggacgagcccaacaagatctgcgaggccgacagagtggccatcaaggccaacatcgtgcacctgatgctgagcagccccgagcagatccagaagcagctgagcgacgccatcagcatcatcggcagagaggacttcccccagaagtggcccgacctgctgaccgagatggtgaacagattccagagcggcgacttccacgtgatcaacggcgtgctgagaaccgcccacagcctgttcaagagatacagacacgagttcaagagcaacgagctgtggaccgagatcaagctggtgctggacgccttcgccctgcccctgaccaacctgttcaaggccaccatcgagctgtgcagcacccacgccaacgacgccagcgccctgagaatcctgttcagcagcctgatcctgatcagcaagctgttctacagcctgaacttccaggacctgcccgagttcttcgaggacaacatggagacctggatgaacaacttccacaccctgctgaccctggacaacaagctgctgcagaccgacgacgaggaggaggccggcctgctggagctgctgaagagccagatctgcgacaacgccgccctgtacgcccagaagtacgacgaggagttccagagatacctgcccagattcgtgaccgccatctggaacctgctggtgaccaccggccaggaggtgaagtacgacctgctggtgagcaacgccatccagttcctggccagcgtgtgcgagagaccccactacaagaacctgttcgaggaccagaacaccctgaccagcatctgcgagaaggtgatcgtgcccaacatggagttcagagccgccgacgaggaggccttcgaggacaacagcgaggagtacatcagaagagacctggagggcagcgacatcgacaccagaagaagagccgcctgcgacctggtgagaggcctgtgcaagttcttcgagggccccgtgaccggcatcttcagcggctacgtgaacagcatgctgcaggagtacgccaagaaccccagcgtgaactggaagcacaaggacgccgccatctacctggtgaccagcctggccagcaaggcccagacccagaagcacggcatcacccaggccaacgagctggtgaacctgaccgagttcttcgtgaaccacatcctgcccgacctgaagagcgccaacgtgaacgagttccccgtgctgaaggccgacggcatcaagtacatcatgatcttcagaaaccaggtgcccaaggagcacctgctggtgagcatccccctgctgatcaaccacctgcaggccgagagcatcgtggtgcacacctacgccgcccacgccctggagagactgttcaccatgagaggccccaacaacgccaccctgttcaccgccgccgagatcgcccccttcgtggagatcctgctgaccaacctgttcaaggccctgaccctgcccggcagcagcgagaacgagtacatcatgaaggccatcatgagaagcttcagcctgctgcaggaggccatcatcccctacatccccaccctgatcacccagctgacccagaagctgctggccgtgagcaagaaccccagcaagccccacttcaaccactacatgttcgaggccatctgcctgagcatcagaatcacctgcaaggccaaccccgccgccgtggtgaacttcgaggaggccctgttcctggtgttcaccgagatcctgcagaacgacgtgcaggagttcatcccctacgtgttccaggtgatgagcctgctgctggagacccacaagaacgacatccccagcagctacatggccctgttcccccacctgctgcagcccgtgctgtgggagagaaccggcaacatccccgccctggtgagactgctgcaggccttcctggagagaggcagcaacaccatcgccagcgccgccgccgacaagatccccggcctgctgggcgtgttccagaagctgatcgccagcaaggccaacgaccaccagggcttctacctgctgaacagcatcatcgagcacatgccccccgagagcgtggaccagtacagaaagcagatcttcatcctgctgttccagagactgcagaacagcaagaccaccaagttcatcaagagcttcctggtgttcatcaacctgtactgcatcaagtacggcgccctggccctgcaggagatcttcgacggcatccagcccaagatgttcggcatggtgctggagaagatcatcatccccgagatccagaaggtgagcggcaacgtggagaagaagatctgcgccgtgggcatcaccaagctgctgaccgagtgcccccccatgatggacaccgagtacaccaagctgtggacccccctgctgcagagcctgatcggcctgttcgagctgcccgaggacgacaccatccccgacgaggagcacttcatcgacatcgaggacacccccggctaccagaccgccttcagccagctggccttcgccggcaagaaggagcacgaccccgtgggccagatggtgaacaaccccaagatccacctggcccagagcctgcacaagctgagcaccgcctgccccggcagagtgcccagcatggtgagcaccagcctgaacgccgaggccctgcagtacctgcagggctacctgcaggccgccagcgtgaccctgctgtag

SEQ ID NO: 116576 - DNA, 2265 bp, Artificial Sequence
  derived and/or modified sequence
atgctgagcaacctgaacttccaggacctgcccgagttcttcgaggacaacatggagacctggatgaacaacttccacaccctgctgaccctggacaacaagctgctgcagaccgacgacgaggaggaggccggcctgctggagctgctgaagagccagatctgcgacaacgccgccctgtacgcccagaagtacgacgaggagttccagagatacctgcccagattcgtgaccgccatctggaacctgctggtgaccaccggccaggaggtgaagtacgacctgctggtgagcaacgccatccagttcctggccagcgtgtgcgagagaccccactacaagaacctgttcgaggaccagaacaccctgaccagcatctgcgagaaggtgatcgtgcccaacatggagttcagagccgccgacgaggaggccttcgaggacaacagcgaggagtacatcagaagagacctggagggcagcgacatcgacaccagaagaagagccgcctgcgacctggtgagaggcctgtgcaagttcttcgagggccccgtgaccggcatcttcagcggctacgtgaacagcatgctgcaggagtacgccaagaaccccagcgtgaactggaagcacaaggacgccgccatctacctggtgaccagcctggccagcaaggcccagacccagaagcacggcatcacccaggccaacgagctggtgaacctgaccgagttcttcgtgaaccacatcctgcccgacctgaagagcgccaacgtgaacgagttccccgtgctgaaggccgacggcatcaagtacatcatgatcttcagaaaccaggtgcccaaggagcacctgctggtgagcatccccctgctgatcaaccacctgcaggccgagagcatcgtggtgcacacctacgccgcccacgccctggagagactgttcaccatgagaggccccaacaacgccaccctgttcaccgccgccgagatcgcccccttcgtggagatcctgctgaccaacctgttcaaggccctgaccctgcccggcagcagcgagaacgagtacatcatgaaggccatcatgagaagcttcagcctgctgcaggaggccatcatcccctacatccccaccctgatcacccagctgacccagaagctgctggccgtgagcaagaaccccagcaagccccacttcaaccactacatgttcgaggccatctgcctgagcatcagaatcacctgcaaggccaaccccgccgccgtggtgaacttcgaggaggccctgttcctggtgttcaccgagatcctgcagaacgacgtgcaggagttcatcccctacgtgttccaggtgatgagcctgctgctggagacccacaagaacgacatccccagcagctacatggccctgttcccccacctgctgcagcccgtgctgtgggagagaaccggcaacatccccgccctggtgagactgctgcaggccttcctggagagaggcagcaacaccatcgccagcgccgccgccgacaagatccccggcctgctgggcgtgttccagaagctgatcgccagcaaggccaacgaccaccagggcttctacctgctgaacagcatcatcgagcacatgccccccgagagcgtggaccagtacagaaagcagatcttcatcctgctgttccagagactgcagaacagcaagaccaccaagttcatcaagagcttcctggtgttcatcaacctgtactgcatcaagtacggcgccctggccctgcaggagatcttcgacggcatccagcccaagatgttcggcatggtgctggagaagatcatcatccccgagatccagaaggtgagcggcaacgtggagaagaagatctgcgccgtgggcatcaccaagctgctgaccgagtgcccccccatgatggacaccgagtacaccaagctgtggacccccctgctgcagagcctgatcggcctgttcgagctgcccgaggacgacaccatccccgacgaggagcacttcatcgacatcgaggacacccccggctaccagaccgccttcagccagctggccttcgccggcaagaaggagcacgaccccgtgggccagatggtgaacaaccccaagatccacctggcccagagcctgcacaagctgagcaccgcctgccccggcagagtgcccagcatggtgagcaccagcctgaacgccgaggccctgcagtacctgcagggctacctgcaggccgccagcgtgaccctgctgtag

SEQ ID NO: 116577 - protein, 217 aa, Artificial Sequence
  derived and/or modified sequence
MAPGSRTSLLLAFALLCLPWLQEAGAVQTVPLSRLFDHAMLQAHRAHQLAIDTYQEFEETYIPKDQKYSFLHDSQTSFCFSDSIPTPSNMEETQQKSNLELLRISLLLIESWLEPVRFLRSMFANNLVYDTSDSDDYHLLKDLEEGIQTLMGRLEDGSRRTGQILKQTYSKFDTNSHNHDALLKNYGLLYCFRKDMDKVETFLRMVQCRSVEGSCGF

SEQ ID NO: 116578 - protein, 183 aa, Artificial Sequence
  derived and/or modified sequence
MAPGSRTSLLLAFALLCLPWLQEAETYIPKDQKYSFLHDSQTSFCFSDSIPTPSNMEETQQKSNLELLRISLLLIESWLEPVRFLRSMFANNLVYDTSDSDDYHLLKDLEEGIQTLMGRLEDGSRRTGQILKQTYSKFDTNSHNHDALLKNYGLLYCFRKDMDKVETFLRMVQCRSVEGSCGF

SEQ ID NO: 116579 - DNA, 654 bp, Artificial Sequence
  derived and/or modified sequence
atggcgcctggtagccggacctcactgcttttggcctttgcgctactgtgcctcccctggctgcaggaggctggagcagtacagactgtacctttatcgaggctgtttgatcacgccatgctgcaggcccacagagcccaccagctggcaattgacacctaccaggagtttgaagagacttatatccccaaagatcagaaatacagctttctgcacgatagccaaacgtctttttgcttttccgacagcatcccgaccccctctaatatggaggaaacccagcagaaatcaaacctggaacttctgagaatcagtctgctgcttattgaaagttggttggagccagtccggttcctgagatctatgttcgccaacaacctggtatacgatacgtctgacagtgacgattatcatcttctcaaggatctggaagaaggcatccagacgttgatgggaagacttgaagacggatcccgtcgcaccggtcagattctgaagcagacgtacagtaaatttgacaccaacagccacaatcatgatgctctgctgaaaaattacggcctgctgtactgctttaggaaagacatggacaaagtagaaacttttctcaggatggtccagtgtagatcagttgagggttcctgtgggttttag

SEQ ID NO: 116580 - DNA, 552 bp, Artificial Sequence
  derived and/or modified sequence
atggcccccggcagccgcacatcattgctccttgccttcgctctgctttgcctgccatggttacaggaggcagaaacatatattcctaaagatcagaaatactccttcctccatgattctcagaccagcttttgttttagcgatagcattccaacccctagcaatatggaggagactcagcagaagagcaaccttgaacttcttcgcatttctctcctacttattgaatcctggcttgaacccgtgcgttttctcaggagcatgttcgctaataatcttgtatatgacacctccgattccgacgactaccacctcctcaaagacctggaagaggggattcaaacgctcatgggtcgcttggaagacggctcaaggcgcacaggtcaaatcttgaaacagacctactccaagttcgatactaatagccacaatcatgacgccttattaaagaattacgggctgctgtattgttttcgaaaggatatggacaaggtcgagacgtttctgcgcatggtccagtgtaggtcggtagaggggtcttgtggattctag

SEQ ID NO: 116581 - DNA, 483 bp, Artificial Sequence
  derived and/or modified sequence
atggctgctggcagccggacttctctgctcctggcattcgcactcttgtgcctgccttggttacaggaggccgactcaataccaaccccctctaatatggaagaaactcagcaaaagtccaacttggaactcctcaggatctctcttcttcttattgaatcatggttggaacccgtccgctttctccggtcgatgtttgcgaataacctagtttacgacaccagtgacagcgatgactatcatttgttgaaggatttagaggaaggcatccaaacgctgatggggcgcttggaagacggctcccgaaggaccgggcaaatacttaaacagacttactctaaatttgatacgaactctcataatcacgacgccctgcttaaaaactatgggctgctgtattgtttccgaaaggatatggataaggtggaaactttcctgaggatggtgcagtgtcgcagtgtcgaagggagctgtggattctag

SEQ ID NO: 116582 - DNA, 654 bp, Artificial Sequence
  derived and/or modified sequence
atggcccctggcagcaggaccagcctgctgctggcctttgccctgctgtgcctgccctggctgcaggaggccggggctgtgcagacagtgcccctgagccggctgtttgaccacgccatgctgcaggcccaccgggcccaccagctggccatcgacacctaccaggagtttgaggagacctacatccccaaggaccagaagtacagcttcctgcatgacagccagaccagcttctgcttcagtgacagcatccccacccccagcaacatggaggagacccagcagaagagcaacctggagctgctgcgcatcagcctgctgctgattgaatcctggctggagcctgtgcgcttcctgcgctccatgtttgccaacaacctggtgtatgacaccagtgacagtgatgactaccacctgctgaaggacctggaggagggcatccagaccctgatgggccgcctggaggatggcagcagaagaacaggccagatcctgaagcagacctacagcaagtttgacaccaacagccacaaccatgatgccctgctgaagaactacggcctgctgtactgcttcaggaaggacatggacaaggtggagaccttcctgaggatggtgcagtgccgctctgtggagggcagctgtggcttctag

SEQ ID NO: 116583 - DNA, 552 bp, Artificial Sequence
  derived and/or modified sequence
atggcccctggcagcaggaccagcctgctgctggcctttgccctgctgtgcctgccctggctgcaggaggccgagacctacatccccaaggaccagaagtacagcttcctgcatgacagccagaccagcttctgcttcagtgacagcatccccacccccagcaacatggaggagacccagcagaagagcaacctggagctgctgcgcatcagcctgctgctgattgaatcctggctggagcctgtgcgcttcctgcgctccatgtttgccaacaacctggtgtatgacaccagtgacagtgatgactaccacctgctgaaggacctggaggagggcatccagaccctgatgggccgcctggaggatggcagcagaagaacaggccagatcctgaagcagacctacagcaagtttgacaccaacagccacaaccatgatgccctgctgaagaactacggcctgctgtactgcttcaggaaggacatggacaaggtggagaccttcctgaggatggtgcagtgccgctctgtggagggcagctgtggcttctag

SEQ ID NO: 116584 - DNA, 483 bp, Artificial Sequence
  derived and/or modified sequence
atggctgctggcagcaggaccagcctgctgctggcctttgccctgctgtgcctgccctggctgcaggaggccgacagcatccccacccccagcaacatggaggagacccagcagaagagcaacctggagctgctgcgcatcagcctgctgctgattgagagctggctggagcctgtgcgcttcctgcgctccatgtttgccaacaacctggtgtatgacaccagtgacagtgatgactaccacctgctgaaggacctggaggagggcatccagaccctgatgggccgcctggaggatggcagcagaagaacaggccagatcctgaagcagacctacagcaagtttgacaccaacagccacaaccatgatgccctgctgaagaactacggcctgctgtactgcttcaggaaggacatggacaaggtggagaccttcctgaggatggtgcagtgccgctctgtggagggcagctgtggcttctag

SEQ ID NO: 116585 - DNA, 654 bp, Artificial Sequence
  derived and/or modified sequence
atggcccccggcagccggaccagcctgctgctggccttcgccctgctctgcctgccatggctgcaggaagctggcgccgttcagaccgtgccactgagtcgcctatttgatcatgcaatgctgcaggcacatagagcacatcaactagcgatcgacacctatcaggaatttgaagaaacctacatccccaaggatcagaagtattcctttttacacgactcacaaacgtctttctgtttctcagattcaatccctactcccagtaacatggaggaaacgcagcaaaagtctaatttggagttgctacgcatctcactcttgctgatcgagtcctggctggagccagtcagattcctccgatccatgtttgccaataacctcgtgtatgatacttctgatagcgatgactatcatctactgaaagacctggaggaaggtattcaaaccctgatgggccgcctcgaagacggcagtcgacgcactggtcaaatactgaaacagacttatagcaagttcgatactaatagccataatcatgacgccctgctgaaaaactatggactcctttactgttttagaaaggatatggacaaagtggaaacatttctccgaatggtccagtgccgctctgtggagggctcttgtgggttttag

SEQ ID NO: 116586 - DNA, 552 bp, Artificial Sequence
  derived and/or modified sequence
atggcccccggcagccggaccagcctgctgctggccttcgccctgctctgcctaccttggctgcaggaggccgagacctacattccaaaagaccagaaatactccttcctccacgatagtcagacatcattctgttttagtgactctattcccacaccgtctaatatggaagagacacaacagaaaagcaatctggagctcttacgcatctctctcctactgatcgagtcttggctggagcccgtgagattcttacgcagcatgttcgcaaataacctggtatacgatactagtgactcagacgattaccatctacttaaggatctggaggagggaatccaaactctgatgggtcgcctggaagatgggagccggcggaccggccagattctgaagcagacatactcaaaattcgacactaacagccacaaccatgatgccctcttgaaaaactacggcctgctttactgtttccggaaggacatggacaaagtagaaacatttttgcgaatggtccaatgccgatccgttgaaggaagttgcggattttag

SEQ ID NO: 116587 - DNA, 483 bp, Artificial Sequence
  derived and/or modified sequence
atggccgccggcagccggaccagcctgctgctggccttcgccctgctctgcctgccctggctccaggaagccgatagcattcctacaccatctaatatggaggagacacagcagaaatccaatctcgaactgctgcggatttccctgctgctcatcgaatcatggctcgagcctgtgcgatttctgcggtccatgtttgccaataacctggtatacgacacctccgactcggacgattaccacttattaaaggacctggaggaaggaatacagacattaatgggcaggctggaggatggatcaagacggactgggcaaatccttaagcagacttactcaaagttcgacacaaacagtcacaaccatgatgcgctgttaaaaaactatggattactgtattgcttccgcaaggatatggacaaagtggagacattcttaagaatggttcagtgccgctccgttgaagggagttgcggattctag

SEQ ID NO: 116588 - DNA, 654 bp, Artificial Sequence
  derived and/or modified sequence
atggcgcctggcagcagaacgagtctcctgcttgcctttgctctgttatgtcttccctggcttcaggaagctggggctgtgcaaactgttcccttaagccgcctgttcgaccatgctatgctgcaagcccatagagcacaccagctcgctatcgatacttatcaggaattcgaggaaacctacatacccaaagatcagaagtactcttttctccatgattcgcagacgtctttctgtttcagtgattctatccctacaccgtcgaacatggaagaaacacaacaaaagagtaacttagaactactcagaatctctctcctgttgattgagagctggctcgaacccgtgcgcttccttcggagtatgttcgccaataacctggtgtatgacacctccgactcagacgattaccatctgctgaaggatctagaagagggaatccagacgctgatggggcgattggaggacggttcccggaggacagggcagatcttgaaacagacctactccaaattcgatactaattcccacaaccatgatgcgcttctgaagaactacggcttgttatactgcttcagaaaggatatggacaaggtggaaaccttcctgaggatggttcaatgccggtctgtcgaaggttcttgcgggttctag

SEQ ID NO: 116589 - DNA, 552 bp, Artificial Sequence
  derived and/or modified sequence
atggctccaggttccaggacatccctgcttctggccttcgccttactctgtctcccgtggcttcaggaggccgaaacttatatcccgaaggaccagaagtattctttcctacacgatagtcagacatccttctgtttttcagactccatcccaaccccatcaaacatggaggaaacccaacaaaaaagcaatttggaattattaaggatttccctgctccttatcgagtcatggctggaaccagtcaggtttttgcgatctatgttcgccaataacctagtttatgacacctccgactccgatgactaccacttattgaaagatctggaagaaggtatccagacccttatggggcgtctggaggatggtagcagaaggactggacagatactgaaacaaacatacagcaagttcgataccaactcccataatcacgacgcactgcttaaaaattatggtctcctgtactgtttccggaaggacatggataaagtggaaaccttcctgcgcatggtgcaatgccgcagtgtggaagggtcttgcggtttctag

SEQ ID NO: 116590 - DNA, 483 bp, Artificial Sequence
  derived and/or modified sequence
atggcagctggctcgaggacctccctgctccttgcctttgcattgctgtgtctgccctggctccaggaggcggattccattccaactcctagcaatatggaggaaacccagcagaaatcgaacttagagctgctccggatctcactgctccttatcgagagctggcttgagcccgtacgctttctgcgctcaatgttcgccaacaacttggtctacgacacatcagacagcgatgattatcacctgctcaaggatctggaggagggaatccagacactcatgggacggctggaggacggatctcgtcgcactggtcagattttgaagcagacttattctaaatttgatacgaatagtcacaatcatgacgccctgctgaaaaattacggcctcctctattgctttcgaaaagacatggacaaagtggagaccttcctgaggatggtgcagtgtaggagtgtagagggcagttgtggattctag

SEQ ID NO: 116591 - DNA, 654 bp, Artificial Sequence
  derived and/or modified sequence
atggcaccaggctcaaggacctccctcttgctcgcattcgcactattatgtctgccatggctgcaggaggcaggagccgtgcaaaccgtcccattgtccagactattcgaccatgccatgctgcaggcccatcgagcccaccagttagccattgatacttaccaagagtttgaggagacttatatccccaaagaccagaaatactctttcttacacgactcccaaactagcttttgctttagcgactccattccaaccccatccaatatggaggagacacagcaaaagagtaatcttgaactcctgcgaatttccctgctgctgattgaaagctggctcgagccagtgcgctttttacgctctatgttcgccaacaacctcgtgtatgatactagcgactccgacgattaccatctcctcaaggatctagaagagggcattcagaccctgatgggacggctggaggatggaagcagacggacaggacagattcttaaacaaacctacagtaagtttgacacaaactcccacaaccacgatgccttacttaagaactatggtctcctttattgttttcgaaaagatatggacaaggtggaaacatttctgagaatggtgcaatgccgttctgttgaagggtcatgcgggttctag

SEQ ID NO: 116592 - DNA, 552 bp, Artificial Sequence
  derived and/or modified sequence
atggcccccggttcacgcacctcccttttgctggctttcgctctgctctgtctgccctggctgcaggaggccgagacctatatccccaaagaccagaagtattcattcttacacgactcacagacatctttctgtttctcagattctatccccaccccatctaacatggaagagactcagcagaaatccaacttagaactccttcgaatctctttactgctaatagaaagttggttggagcctgtgcggttcctgaggtccatgtttgccaacaacttagtgtacgacacttcagacagtgatgactatcaccttctcaaagatctggaggagggtatccagacgcttatgggccggcttgaggatggttcacggcgtacaggacagattctaaagcaaacatattccaaatttgatactaactcacacaaccatgatgccctgctgaaaaactacgggctgctttactgttttagaaaagatatggataaggtggagacatttttaaggatggtgcagtgtaggtccgtggagggctcttgcggattctag

SEQ ID NO: 116593 - DNA, 483 bp, Artificial Sequence
  derived and/or modified sequence
atggcggctggaagtcgcacttctctcctcttagcattcgcgctgctgtgtctcccttggctgcaagaagcagactctattccaacccccagcaacatggaggagacccaacagaagtcgaacttagaactgctgcggatctctctgttgctcatcgagtcatggctggagcccgttcgttttttacgatccatgtttgcgaacaatctggtctacgacactagcgactctgatgattaccacttattgaaggacctagaagaaggtatccagaccctgatgggcagacttgaagacggctcgcgaaggacaggacagattttaaaacagacctattccaagttcgacacgaactcccacaaccacgacgccctgctgaaaaactatggactgctgtattgcttccgcaaagacatggataaagtcgagaccttcctcaggatggtgcagtgccggtcagtggaagggtcctgtggtttttag

SEQ ID NO: 116594 - DNA, 654 bp, Artificial Sequence
  derived and/or modified sequence
atggctcccgggtctcgaacatcccttctactggccttcgctctgctttgtctgccatggctgcaggaggcaggagcagtccagacagtaccattgagcaggctgtttgaccatgccatgctacaggcacaccgagctcaccagttggccattgacacatatcaagaattcgaagaaacctatatccccaaggaccagaagtatagcttcctgcacgattctcaaacctccttttgctttagtgattccatcccaaccccgtctaatatggaagagacacaacaaaaatcaaatctggaactgctccgtatatctctgctactgatcgagagttggctggaacctgttcgtttcttacgttctatgttcgccaataatctggtttatgacacctcagacagtgacgactatcacctattaaaggatctggaggaggggatccagactctcatgggacgcttagaagatggctcacggagaacaggtcaaatactgaaacaaacatatagtaaattcgacacaaattcacacaatcacgacgcactattaaagaattatggtctgctctactgttttcgcaaggatatggacaaagtcgagactttcttaaggatggttcaatgtaggtctgtggaaggatcatgtgggttttag

SEQ ID NO: 116595 - DNA, 552 bp, Artificial Sequence
  derived and/or modified sequence
atggctcccggttctcgaaccagtttattgctggcttttgctctgctgtgcctgccctggctgcaagaagccgagacctacatccctaaagatcagaagtattcttttctccacgactctcaaacatccttctgcttttccgactccattcctacgccttcaaacatggaggagacccagcaaaaaagcaacctggaacttctgcggatctctctcttgctcattgaatcctggttggaacccgtccgatttttacgcagcatgttcgctaacaacctggtttatgacacaagcgactccgatgattaccatctgctgaaggacctcgaagagggaattcaaactctcatgggacggcttgaagatggctcacgcagaaccggacagatactcaagcaaacttactctaaatttgacaccaactcccacaatcacgacgccctgcttaagaactatggattactatattgctttcggaaggatatggataaagttgagacgtttctccgtatggtgcaatgtcgctcagtggaggggtcttgtggcttctag

SEQ ID NO: 116596 - DNA, 483 bp, Artificial Sequence
  derived and/or modified sequence
atggcggctggaagtcgcacttctctcctcttagcattcgcgctgctgtgtctcccttggctgcaagaagcagactctattccaacccccagcaacatggaggagacccaacagaagtcgaacttagaactgctgcggatctctctgttgctcatcgagtcatggctggagcccgttcgttttttacgatccatgtttgcgaacaatctggtctacgacactagcgactctgatgattaccacttattgaaggacctagaagaaggtatccagaccctgatgggcagacttgaagacggctctcgtcgaacaggacagatacttaagcaaacttacagcaaatttgacacaaattcccacaatcacgatgcgctgctgaagaactacggcctactgtactgtttccgaaaagacatggacaaagtcgaaacctttctacgcatggtgcagtgtagatcagtcgaaggatcttgcgggttttag

SEQ ID NO: 116597 - DNA, 900 bp, Artificial Sequence
  derived and/or modified sequence
atgtacacagaaacaggtggggtcaagcagggagagagaactggccagggtataaaaagggcccacaagagaccggctctaggatcccaaggcccaactccccgaaccactcagggtcctgtggacagctcacctagtggcaatggctccaggctcccggacgtccctgctcctggcttttgccctgctctgcctgccctggcttcaagaggctggtgccgtccaaaccgttcccttatccaggctttttgaccacgctatgctccaagcccatcgcgcgcaccagctggccattgacacctaccaggagtttgaagaaacctatatcccaaaggaccagaagtattcattcctgcatgactcccagacctccttctgcttctcagactctattccgacaccctccaacatggaggaaacgcaacagaaatccaatctagagctgctccgcatctccctgctgctcatcgagtcgtggctggagcccgtgcggttcctcaggagtatgttcgccaacaacctggtgtatgacacctcggacagcgatgactatcacctcctaaaggacctagaggaaggcatccaaacgctgatggggaggctggaagacggcagccgccggactgggcagatcctcaagcagacctacagcaagtttgacacaaactcgcacaaccatgacgcactgctcaagaactacgggctgctctactgcttcaggaaggacatggacaaggtcgagacattcctgcgcatggtgcagtgccgctctgtggagggcagctgtggcttctaggtgcccgagtagcatcctgtgacccctccccagtgcctctcctggccctgaaggtgccactccagtgcccaccagccttgtcctaataaaattaagttgtatca

SEQ ID NO: 116598 - DNA, 699 bp, Artificial Sequence
  derived and/or modified sequence
ctccccgaaccactcagggtcctgtggacagctcacctagtggcaatggctccaggctcccggacgtccctgctcctggcttttgccctgctctgcctgccctggcttcaagaggctgaaacctatatcccaaaggaccagaagtattcattcctgcatgactcccagacctccttctgcttctcagactctattccgacaccctccaacatggaggaaacgcaacagaaatccaatctagagctgctccgcatctccctgctgctcatcgagtcgtggctggagcccgtgcggttcctcaggagtatgttcgccaacaacctggtgtatgacacctcggacagcgatgactatcacctcctaaaggacctagaggaaggcatccaaacgctgatggggaggctggaagacggcagccgccggactgggcagatcctcaagcagacctacagcaagtttgacacaaactcgcacaaccatgacgcactgctcaagaactacgggctgctctactgcttcaggaaggacatggacaaggtcgagacattcctgcgcatggtgcagtgccgctctgtggagggcagctgtggcttctaggtgcccgagtagcatcctgtgacccctccccagtgcctctcctggccctgaaggtgccactccagtgcccaccagccttgtcctaataaaattaagttgtat

SEQ ID NO: 116599 - DNA, 749 bp, Artificial Sequence
  derived and/or modified sequence
ccatgcataaatgtacacagaaacaggtggggtcaagcagggagagagaactggccagggtataaaaagggcccacaagagaccggctctaggatcccaaggcccaactccccgaaccactcagggtcctgtggacagctcacctagcggcaatggctgcaggctcccggacgtccctgctcctggcttttgccctgctctgcctgccctggcttcaagaggctgactctattccgacaccctccaacatggaggaaacgcaacagaaatccaatctagagctgctccgcatctccctgctgctcatcgagtcgtggctggagcccgtgcggttcctcaggagtatgttcgccaacaacctggtgtatgacacctcggacagcgatgactatcacctcctaaaggacctagaggaaggcatccaaacgctgatggggaggctggaagacggcagccgccggactgggcagatcctcaagcagacctacagcaagtttgacacaaactcacacaaccatgacgcactgctcaagaactacgggctgctctactgcttcaggaaggacatggacaaggtcgagacattcctgcgcatggtgcagtgccgctctgtagagggtagctgtggcttctaggtgcccgcgtggcatcctgtgaccgacccctccccagtgcctctcctggccctggaaggtgccactccagtgcccatcagccttgtcctaataaaattaagttgtatcatttca

SEQ ID NO: 116600 - DNA, 849 bp, Artificial Sequence
  derived and/or modified sequence
caggctcccggacgtccctgctcctggcttttgccctgctctgcctgccctggcttcaagaggctggtgccgtccaaaccgttccgttatccaggctttttgaccacgctatgctccaagcccatcgcgcgcaccagctggccattgacacctaccaggagtttgaagaaacctatatcccaaaggaccagaagtattcattcctgcatgactcccagacctccttctgcttctcagactctattccgacaccctccaacatggaggaaacgcaacagaaatccaatctagagctgctccgcatctccctgctgctcatcgagtcgtggctggagcccgtgcggttcctcaggagtatgttcgccaacaacctggtgtatgacacctcggacagcgatgactatcacctcctaaaggacctagaggaaggcatccaaacgctgatgggggtgagggtggcgccaggggtcgccaatcctggaaccccactggcttagagggctgggggagagaaacactgctgccctctttgtagcaaggctggaagacggcagccgccggactgggcagatcctcaagcagacctacagcaagtttgacacaaactcacacaaccatgacgcactgctcaagaactacgggctgctctactgcttcaggaaggacatggacaaggtcgagacattcctgcgcatggtgcagtgccgctctgtagagggtagctgtggcttctaggtgcccgcgtggcatcctgtgaccgacccctccccagtgcctctcctggccctggaaggtgccactccagtgcccatcagccttgtcctaataaaattaagttgtatcatttca

SEQ ID NO: 116601 - DNA, 654 bp, Artificial Sequence
  derived and/or modified sequence
atggcccccggcagcagaaccagcctgctgctggccttcgccctgctgtgcctgccctggctgcaggaggccggcgccgtgcagaccgtgcccctgagcagactgttcgaccacgccatgctgcaggcccacagagcccaccagctggccatcgacacctaccaggagttcgaggagacctacatccccaaggaccagaagtacagcttcctgcacgacagccagaccagcttctgcttcagcgacagcatccccacccccagcaacatggaggagacccagcagaagagcaacctggagctgctgagaatcagcctgctgctgatcgagagctggctggagcccgtgagattcctgagaagcatgttcgccaacaacctggtgtacgacaccagcgacagcgacgactaccacctgctgaaggacctggaggagggcatccagaccctgatgggcagactggaggacggcagcagaagaaccggccagatcctgaagcagacctacagcaagttcgacaccaacagccacaaccacgacgccctgctgaagaactacggcctgctgtactgcttcagaaaggacatggacaaggtggagaccttcctgagaatggtgcagtgcagaagcgtggagggcagctgcggcttctag

SEQ ID NO: 116602 - DNA, 552 bp, Artificial Sequence
  derived and/or modified sequence
atggcccccggcagcagaaccagcctgctgctggccttcgccctgctgtgcctgccctggctgcaggaggccgagacctacatccccaaggaccagaagtacagcttcctgcacgacagccagaccagcttctgcttcagcgacagcatccccacccccagcaacatggaggagacccagcagaagagcaacctggagctgctgagaatcagcctgctgctgatcgagagctggctggagcccgtgagattcctgagaagcatgttcgccaacaacctggtgtacgacaccagcgacagcgacgactaccacctgctgaaggacctggaggagggcatccagaccctgatgggcagactggaggacggcagcagaagaaccggccagatcctgaagcagacctacagcaagttcgacaccaacagccacaaccacgacgccctgctgaagaactacggcctgctgtactgcttcagaaaggacatggacaaggtggagaccttcctgagaatggtgcagtgcagaagcgtggagggcagctgcggcttctag

SEQ ID NO: 116603 - DNA, 483 bp, Artificial Sequence
  derived and/or modified sequence
atggccgccggcagcagaaccagcctgctgctggccttcgccctgctgtgcctgccctggctgcaggaggccgacagcatccccacccccagcaacatggaggagacccagcagaagagcaacctggagctgctgagaatcagcctgctgctgatcgagagctggctggagcccgtgagattcctgagaagcatgttcgccaacaacctggtgtacgacaccagcgacagcgacgactaccacctgctgaaggacctggaggagggcatccagaccctgatgggcagactggaggacggcagcagaagaaccggccagatcctgaagcagacctacagcaagttcgacaccaacagccacaaccacgacgccctgctgaagaactacggcctgctgtactgcttcagaaaggacatggacaaggtggagaccttcctgagaatggtgcagtgcagaagcgtggagggcagctgcggcttctag

SEQ ID NO: 116604 - DNA, 387 bp, Artificial Sequence
  derived and/or modified sequence
atggaggaaacacagcagaagtctaatctcgagttgcttcacatttccctgctattgattgagagccggctcgaacccgtgagattcctgcgcagcacctttactaataatcttgtatacgatacctcagactctgacgactatcatctgctgaaggatttagaggagggaattcagatgcttatgggccgcttagaggacggttcacatcttaccggccagacacttaaacagacctacagcaagttcgataccaacagtcacaaccacgatgctctgctaaaaaattacggcctactgcactgttttcggaaggacatggataaggtagaaaccttcctcagaatggtacaatgcagatcggtcgaggggtcatgtggattctag

SEQ ID NO: 116605 - DNA, 387 bp, Artificial Sequence
  derived and/or modified sequence
atggaggagacccagcagaagagcaacctggagctgctgcacatcagcctgctgctgattgagagccggctggagcctgtgcgcttcctgcggagcaccttcaccaacaacctggtgtatgacaccagtgacagtgatgactaccacctgctgaaggacctggaggagggcatccagatgctgatgggccgcctggaggatggcagccacctgaccggccagaccctgaagcagacctacagcaagtttgacaccaacagccacaaccatgatgccctgctgaagaactacggcctgctgcactgcttcaggaaggacatggacaaggtggagaccttcctgaggatggtgcagtgccgctctgtggagggcagctgtggcttctag

SEQ ID NO: 116606 - DNA, 387 bp, Artificial Sequence
  derived and/or modified sequence
atggaggagacccagcagaagagcaacctggagctgctgcacatctcccttctgctgatcgagagcagactggagccggtcaggttcctgagaagtacgttcacaaacaatctcgtgtatgatacctctgactctgacgactaccatctcctcaaagacctggaggagggtatacagatgctgatgggaagacttgaggatggatcccacctgaccggccagacattaaagcagacttactcaaagtttgatacaaattcacacaatcatgacgcgctccttaagaattatggcttgcttcactgcttccggaaggatatggacaaggtggagacttttcttcggatggttcagtgcaggtcggtggaagggagctgcgggttctag

SEQ ID NO: 116607 - DNA, 387 bp, Artificial Sequence
  derived and/or modified sequence
atggaagagactcaacaaaagtccaacctcgagctgctgcatattagcctgctgttgatagagtctcggctggaaccagtgaggttcctgaggtccacgtttacaaacaatctagtctacgacacatctgactctgatgactaccacctgctcaaggatctcgaggaaggcatacagatgctgatgggcaggctggaagatggatcccacctgacggggcagaccctcaagcagacttactccaagttcgacacaaattcccataatcacgacgccctcctcaaaaactacggcctgctgcactgcttcagaaaagatatggacaaagtggaaacgttcctgcggatggtgcagtgtaggtctgtcgagggctcttgtgggttctag

SEQ ID NO: 116608 - DNA, 387 bp, Artificial Sequence
  derived and/or modified sequence
atggaggagacccagcagaagagcaacctggagctgctgcacatcagcctgctgctgatcgagagcagactggagcccgtgagattcctgagaagcaccttcaccaacaacctggtgtacgacaccagcgacagcgacgactaccacctgctgaaggacctggaggagggcatccagatgctgatgggcagactggaggacggcagccacctgaccggccagaccctgaagcagacctacagcaagttcgacaccaacagccacaaccacgacgccctgctgaagaactacggcctgctgcactgcttcagaaaggacatggacaaggtggagaccttcctgagaatggtgcagtgcagaagcgtggagggcagctgcggcttctag

SEQ ID NO: 116609 - protein, 228 aa, Artificial Sequence
  derived and/or modified sequence
MSSSEEVSWISWFCGLRGNEFFCEVDEDYIQDKFNLTGLNEQVPHYRQALDMILDLEPDEELEDNPNQSDLIEQAAEMLYGLIHARYILTNRGIAQMLEKYQQGDFGYCPRVYCENQPMLPIGLSDIPGEAMVKLYCPKCMDVYTPKSSRHHHTDGAYFGTGFPHMLFMVHPEYRPKRPANQFVPSSCSRHPDVPLLPRRRPFCRMHFRLREVYHQQLIPVHGDHHLL

SEQ ID NO: 116610 - protein, 234 aa, Artificial Sequence
  derived and/or modified sequence
MEKCKGTSRMAGTTSADVKMSSSEEVSWISWFCGLRGNEFFCEVDEDYIQDKFNLTGLNEQVPHYRQALDMILDLEPDEELEDNPNQSDLIEQAAEMLYGLIHARYILTNRGIAQMLEKYQQGDFGYCPRVYCENQPMLPIGLSDIPGEAMVKLYCPKCMDVYTPKSSRHHHTDGAYFGTGFPHMLFMVHPEYRPKRPANQFVPRLYGFKIHPMAYQLQLQAASNFKSPVKTIR

SEQ ID NO: 116611 - protein, 215 aa, Artificial Sequence
  derived and/or modified sequence
MSSSEEVSWISWFCGLRGNEFFCEVDEDYIQDKFNLTGLNEQVPHYRQALDMILDLEPDEELEDNPNQSDLIEQAAEMLYGLIHARYILTNRGIAQMLEKYQQGDFGYCPRVYCENQPMLPIGLSDIPGEAMVKLYCPKCMDVYTPKSSRHHHTDGAYFGTGFPHMLFMVHPEYRPKRPANQFVPRLYGFKIHPMAYQLQLQAASNFKSPVKTIR

SEQ ID NO: 116612 - DNA, 687 bp, Artificial Sequence
  derived and/or modified sequence
atgagcagcagcgaggaggtgagctggatcagctggttctgcggcctgagaggcaacgagttcttctgcgaggtggacgaggactacatccaggacaagttcaacctgaccggcctgaacgagcaggtgccccactacagacaggccctggacatgatcctggacctggagcccgacgaggagctggaggacaaccccaaccagagcgacctgatcgagcaggccgccgagatgctgtacggcctgatccacgccagatacatcctgaccaacagaggcatcgcccagatgctggagaagtaccagcagggcgacttcggctactgccccagagtgtactgcgagaaccagcccatgctgcccatcggcctgagcgacatccccggcgaggccatggtgaagctgtactgccccaagtgcatggacgtgtacacccccaagagcagcagacaccaccacaccgacggcgcctacttcggcaccggcttcccccacatgctgttcatggtgcaccccgagtacagacccaagagacccgccaaccagttcgtgcccagcagctgcagcagacaccccgacgtgcccctgctgcccagaagaagacccttctgcagaatgcacttcagactgagagaggtgtaccaccagcagctgatccccgtgcacggcgaccaccacctgctgtag

SEQ ID NO: 116613 - DNA, 687 bp, Artificial Sequence
  derived and/or modified sequence
atgagtagctcagaagaggtaagttggatctcatggttctgtggcctgcggggaaacgaatttttttgcgaggtcgacgaggactatatccaagacaaatttaaccttacaggtttgaatgagcaggtacctcactaccgccaagctctggacatgatactggatctggaaccagacgaggagctggaagataatcctaatcagagcgacctgatcgagcaggccgccgagatgctgtacgggctgattcacgcgcgttatatactgacaaatcggggcattgcgcagatgttagagaagtaccagcaaggggatttcggctattgtccccgagtatactgtgaaaaccagcctatgctccccatcggactgtctgatattcccggcgaagccatggtcaaactatactgcccgaaatgcatggatgtgtacacccctaaatcttctagacatcatcacactgatggggcctatttcgggaccggatttccacatatgctgttcatggtgcacccggaatacagacccaagaggcccgcgaaccaattcgtgccatcctcctgttctcggcatcccgatgttcccctgctgcctcgaagacgccccttttgtcgtatgcactttagattaagagaagtttaccatcaacagcttatccccgtgcacggcgaccatcatcttctgtag

SEQ ID NO: 116614 - DNA, 687 bp, Artificial Sequence
  derived and/or modified sequence
atgagcagcagcgaggaggtgtcctggatctcctggttctgtggcctgcggggaaatgagttcttctgtgaggtggatgaggactacatccaggacaagttcaacctgaccggcctgaatgagcaggtgccccactaccggcaggccctggacatgatcctggacctggagccagatgaggagctggaggacaaccccaaccagagcgacctgattgagcaggccgctgagatgctgtatggcctcatccacgcccgctacatcctgaccaacagaggcatcgcccagatgctggagaagtaccagcagggcgactttggctactgcccccgggtgtactgtgagaaccagcccatgctgcccatcggcctgagtgacatccctggagaggccatggtgaagctgtactgccccaagtgcatggatgtgtacacccccaagagcagccgccaccaccacacagatggagcctactttggaacaggcttcccccacatgctgttcatggtgcaccctgagtaccggcccaagaggcctgccaaccagtttgtgcccagcagctgcagccgccacccagatgtgcccctgctgccccggcggcggcccttctgcaggatgcacttccggctgcgggaggtgtaccaccagcagctgatccctgtgcacggggaccaccacctgctgtag

SEQ ID NO: 116615 - DNA, 687 bp, Artificial Sequence
  derived and/or modified sequence
atgagcagcagcgaggaggtgagctggatcagctggttctgcggcctgaggggaaatgagttcttctgcgaagtcgatgaagactacatacaagataagtttaacctcactggactcaatgaacaggtgccccattatagacaggcccttgatatgatactggacctggagccggacgaagagcttgaagacaatcctaaccagagcgatttaatcgagcaggcagccgaaatgctctatggccttatacatgcccggtatattctcacaaacagaggtatcgcccagatgttggagaaataccaacaaggagattttggctactgtcctagggtgtactgcgagaaccaacccatgctgcctattgggttatctgatatcccgggcgaggctatggtgaaactgtactgcccaaagtgcatggacgtctatacgcccaagtctagcaggcatcatcacaccgatggcgcctacttcgggactgggttcccccacatgctgtttatggtgcacccagagtacaggcctaagagacccgctaaccagttcgtcccctcctcttgtagccggcatccggacgtacctttgctgccacgccgtaggccattctgtagaatgcactttcggctcagggaggtgtatcatcagcagctgatacctgtgcacggagaccaccaccttctctag

SEQ ID NO: 116616 - DNA, 687 bp, Artificial Sequence
  derived and/or modified sequence
atgtcttcttccgaggaggtctcttggatctcatggttttgcggactcaggggtaacgaattcttctgcgaggttgatgaggattatatccaggacaaatttaaccttaccgggctcaacgaacaagtcccgcattacagacaagcccttgatatgattctggaccttgagcccgacgaagagttggaagacaaccccaatcaatccgacctcattgaacaagcagccgaaatgctatacggtctaatccacgccagatatatcctcaccaacagggggatagcccagatgctggaaaaatatcagcagggtgatttcgggtactgtcctcgcgtgtattgtgagaaccagcctatgctcccaatcggtctgagcgacatcccaggtgaggccatggtgaagttgtactgccccaagtgcatggacgtctatacaccaaagagctcacggcatcaccacactgatggtgcatactttggaaccggctttccccacatgcttttcatggtacatccggagtatcgccctaaaagaccagctaaccagttcgtgccttcatcctgctctcgacatccagatgtaccgctgctgccgagacgacggccattctgtaggatgcacttcagactgagagaagtatatcaccagcagttgattcccgtccatggagatcatcacctcttgtag

SEQ ID NO: 116617 - DNA, 705 bp, Artificial Sequence
  derived and/or modified sequence
atggagaagtgcaagggcaccagcagaatggccggcaccaccagcgccgacgtgaagatgagcagcagcgaggaggtgagctggatcagctggttctgcggcctgagaggcaacgagttcttctgcgaggtggacgaggactacatccaggacaagttcaacctgaccggcctgaacgagcaggtgccccactacagacaggccctggacatgatcctggacctggagcccgacgaggagctggaggacaaccccaaccagagcgacctgatcgagcaggccgccgagatgctgtacggcctgatccacgccagatacatcctgaccaacagaggcatcgcccagatgctggagaagtaccagcagggcgacttcggctactgccccagagtgtactgcgagaaccagcccatgctgcccatcggcctgagcgacatccccggcgaggccatggtgaagctgtactgccccaagtgcatggacgtgtacacccccaagagcagcagacaccaccacaccgacggcgcctacttcggcaccggcttcccccacatgctgttcatggtgcaccccgagtacagacccaagagacccgccaaccagttcgtgcccagactgtacggcttcaagatccaccccatggcctaccagctgcagctgcaggccgccagcaacttcaagagccccgtgaagaccatcagatag

SEQ ID NO: 116618 - DNA, 705 bp, Artificial Sequence
  derived and/or modified sequence
atggaaaagtgcaagggaacatctcgcatggccggtactacgtctgcagacgtgaagatgagctctagcgaggaagtaagttggatctcttggttttgcgggcttcggggcaacgaatttttttgcgaggtcgacgaggattatattcaggacaagtttaatctgactggcctcaacgaacaggtacctcattaccgacaggcgttggacatgatcttggacttagaaccagatgaggagctggaggataatcctaatcagagcgacctcatcgagcaggctgccgagatgctttatgggctgatccatgctcgatatatcctcaccaatagagggattgctcagatgctggaaaagtaccagcagggagatttcggctactgcccgcgagtttattgtgaaaaccagccaatgctcccaattggactgagcgacataccaggcgaggcgatggtcaaactgtattgtcccaaatgcatggacgtatatactcccaaaagtagccgccatcaccacacagatggagcatactttggcaccggcttccctcacatgttgttcatggtgcacccagagtacaggccaaagcggcctgccaatcagttcgtgcctaggttatatggtttcaaaattcatcctatggcttaccagttacaactgcaagcggcctctaactttaaaagcccagtgaaaaccatccggtag

SEQ ID NO: 116619 - DNA, 687 bp, Artificial Sequence
  derived and/or modified sequence
atgagtagtagtgaagaagtgtcttggattagctggttttgtggacttcggggtaacgagtttttttgtgaggtggacgaggattacatccaagataaattcaatctgacggggttgaatgaacaggtgccccattaccgccaagccttagatatgattcttgatctggaacctgacgaggagttggaggataatcccaaccaatccgaccttatcgagcaggctgcggagatgctttacggactgatccatgctagatatatcctcacaaatagaggtatcgcccagatgctggagaaatatcagcaaggcgacttcggttactgtcctcgagtgtactgtgaaaatcagcctatgctgcctattggactaagcgacattcccggggaggctatggtgaaactgtattgtccaaagtgtatggacgtctatacgccgaaaagctccagacaccatcatactgacggagcatacttcggaaccggctttcctcacatgctctttatggtccacccagaatatcgccccaaaaggccagccaaccagttcgtcccatctagctgttcgcgacaccccgatgtcccactgcttccaagacgccgccccttctgtaggatgcattttaggctgcgcgaagtatatcaccagcagctcattccagtccacggtgaccaccatttactgtag

SEQ ID NO: 116620 - DNA, 687 bp, Artificial Sequence
  derived and/or modified sequence
atgagttcctccgaggaagtgagctggataagttggttctgtgggttgaggggcaatgagtttttttgcgaagtcgatgaggactatattcaagataaattcaacctgacggggcttaacgagcaggtaccacactaccgacaggctctcgatatgattctcgatctggaacctgacgaggagttagaggataacccaaaccagtccgacctgatagaacaagctgcagaaatgttgtacggcttgatacatgcaaggtacattctgactaatcgaggcattgctcagatgctggaaaagtatcagcaaggggacttcggatactgccccagagtgtactgtgaaaatcagcctatgctgccaattgggctaagtgacatcccaggagaggctatggttaaactgtattgccctaaatgtatggacgtgtacaccccaaaatccagtcgccatcaccacactgatggtgcgtatttcgggactggcttcccccacatgttgttcatggtgcaccccgagtaccggcccaaaagacccgcgaaccagtttgttccctcatcctgcagtaggcatccagacgtgcccctcctgcctcggcgccggccattttgtcgtatgcacttcagactgagagaggtgtatcatcaacaacttatacccgtgcatggagatcaccacttgctctag

SEQ ID NO: 116621 - DNA, 705 bp, Artificial Sequence
  derived and/or modified sequence
atggagaagtgcaagggcaccagcaggatggccggcaccaccagcgcagatgtgaagatgagcagcagcgaggaggtgtcctggatctcctggttctgtggcctgcggggaaatgagttcttctgtgaggtggatgaggactacatccaggacaagttcaacctgaccggcctgaatgagcaggtgccccactaccggcaggccctggacatgatcctggacctggagccagatgaggagctggaggacaaccccaaccagagcgacctgattgagcaggccgctgagatgctgtatggcctcatccacgcccgctacatcctgaccaacagaggaattgcccagatgctggagaagtaccagcagggcgactttggctactgcccccgggtgtactgtgagaaccagcccatgctgcccatcggcctgagtgacatccctggagaggccatggtgaagctgtactgccccaagtgcatggatgtgtacacccccaagagcagccgccaccaccacacagatggagcctacttcggcaccggcttcccccacatgctgttcatggtgcaccctgagtaccggcccaagaggcctgccaaccagtttgtgccccggctgtatggcttcaagatccaccccatggcctaccagctgcagctgcaggccgccagcaacttcaagagccctgtgaagaccatcagatag

SEQ ID NO: 116622 - DNA, 705 bp, Artificial Sequence
  derived and/or modified sequence
atggagaagtgcaagggcaccagccggatggccggcaccaccagcgccgatgtgaagatgagcagctccgaagaggtgagctggatttcatggttttgcggactgcggggcaatgagtttttttgcgaagtggacgaggactatatccaagataagttcaacctgactgggctgaatgaacaggtgccccattatcggcaggccctggatatgattctggatctagaacctgacgaagagctcgaagataatccaaatcagtctgatctcatcgaacaggccgccgagatgctatatggtctcatccacgctcggtatatattaactaaccggggtattgcgcaaatgctcgagaagtaccaacaaggagattttggctattgtcctcgggtctactgcgaaaaccagcccatgctcccaatcggactgtccgacatccccggagaagccatggtgaaattgtattgccccaaatgcatggacgtctacaccccaaagtcctctaggcaccaccacaccgacggcgcttattttggtaccggctttcctcatatgctgtttatggtccaccccgagtataggccgaaacgcccggctaatcagtttgtgcctagactgtatggatttaagatccatcctatggcataccagctgcagttgcaggcagcgagcaatttcaaatctcccgtcaagactataagatag

SEQ ID NO: 116623 - DNA, 687 bp, Artificial Sequence
  derived and/or modified sequence
atgagcagcagcgaggaggtgagctggatcagctggttctgcggcctgcgcgggaatgaatttttctgcgaggtggacgaggactatatccaggacaagttcaatcttaccggcctgaatgagcaagtgcctcattataggcaagctctggatatgattctggatctagagcctgacgaagaactggaagataatccgaaccagagtgacctcatcgaacaggctgccgaaatgctctatggactaattcacgctaggtatatcctgacaaatagaggtatagcccagatgttagaaaaataccagcagggtgattttggttattgcccccgtgtgtattgcgagaaccagccgatgttgccgatcggcctgtctgatatccccggggaggccatggttaaactgtactgcccaaaatgcatggacgtctatactcccaagagttcaaggcatcaccatacagatggggcctactttggaacaggcttccctcatatgctctttatggtgcaccctgagtaccggcctaaacgtccagctaatcaatttgtgccatctagctgttccagacaccctgatgttcctctgttgcccagacgtcggcctttctgcagaatgcattttcggttgcgcgaggtataccatcagcaactcataccagtgcacggcgatcatcatctattgtag

SEQ ID NO: 116624 - DNA, 687 bp, Artificial Sequence
  derived and/or modified sequence
atgagcagcagcgaggaggtgagctggatcagctggttctgcggcctgaggggtaacgagtttttctgtgaagtcgatgaggattacattcaagataaattcaacctgactggactcaatgagcaggtgcctcattaccgccaagctctcgacatgatactggatctcgagccagatgaggagctggaggacaatcctaatcagtccgatttgatcgagcaggcagctgagatgctctacggtctgattcatgccaggtatatactgacaaatagaggaatcgcccaaatgcttgagaagtatcaacagggagatttcgggtactgtccacgggtctactgcgagaatcagccaatgctcccaattggactgagcgatattccaggcgaagcgatggtgaagctgtactgtcccaagtgcatggacgtgtacacccctaagagctctaggcaccatcacacagatggtgcatatttcggtacgggattcccccatatgctgtttatggtccaccctgagtatcgacccaagcgtcccgctaaccaatttgtgccaagcagctgctcccggcacccagacgtcccactcctccctaggagacggccattttgccgcatgcattttaggctccgggaggtttatcatcagcagcttatacccgtacacggtgatcatcaccttctatag

SEQ ID NO: 116625 - DNA, 705 bp, Artificial Sequence
  derived and/or modified sequence
atggagaagtgcaaaggcacctcgaggatggctgggacaacaagcgcagacgttaagatgagtagctctgaagaagtgtcttggataagctggttctgtggattgcgaggtaacgaatttttctgtgaagtagacgaggattacattcaggacaagttcaacctgacaggactcaatgaacaggtaccgcactacaggcaggccctagatatgatactcgatttggagccggatgaagaactagaggacaatcccaaccagagcgatttaatcgagcaagcagccgaaatgttgtatgggctcatccatgcacggtacatactgactaaccgcggaattgctcagatgcttgagaaatatcagcaaggggatttcggatactgcccaagagtttattgtgaaaatcagccgatgcttcccatcggcctgtctgatattccaggggaggcaatggtgaaactctactgtccaaagtgcatggatgtttacaccccaaaatctagtcgccaccaccatacagacggagcatacttcggaacaggcttcccccacatgctgtttatggtccaccccgaataccgtcccaaacgcccagctaatcagttcgtgccgcgactttacggatttaaaattcaccccatggcataccagctacaactgcaggcggctagtaactttaagtcaccagtgaagactatcagatag

SEQ ID NO: 116626 - DNA, 687 bp, Artificial Sequence
  derived and/or modified sequence
atgagctcatctgaggaggtatcttggatcagttggttttgcgggttgcggggtaacgaattcttctgcgaagtcgacgaggactatatccaggataagtttaaccttactggattgaacgagcaggtgcctcactaccgacaggctctcgacatgatcctcgacttggaacccgatgaggagctggaggacaacccaaatcaatcagacctgatcgaacaagctgctgaaatgctgtacgggttgatacatgctcggtatattttgacaaaccgcggtatcgcacagatgctcgagaaatatcaacagggggatttcggctactgccctagagtgtactgcgaaaatcagccgatgctcccaattggcctctctgatatcccaggggaagccatggtgaaactgtattgccccaaatgcatggatgtgtatacaccaaagagctctcgccatcatcacaccgacggagcttattttggcacgggcttcccacacatgctgtttatggtgcaccccgaataccggccaaagaggccagccaatcagttcgtgccatcgtcctgctcgaggcaccccgatgtcccgttgctgccacgaaggcggccattttgccgcatgcactttagattacgtgaggtgtaccaccagcagctgattcccgtgcacggcgaccaccacctcctatag

SEQ ID NO: 116627 - DNA, 687 bp, Artificial Sequence
  derived and/or modified sequence
atgtcctcctccgaagaagtctcatggatctcctggttctgcggtctgaggggtaatgagttcttctgcgaagtcgatgaagactatatacaggacaaattcaatctgacaggcttgaatgagcaggtaccacactatcgacaggctctagacatgattttggacctagaacctgacgaagagttggaagacaacccaaatcagagtgatctgattgaacaggccgcagaaatgttgtatggtctgatccacgcacgctatatcttaacaaatcgcggaatagcccagatgctcgagaagtaccagcaaggagatttcggctattgtccacgagtatactgtgagaaccaacctatgctgcccattggtctatcagatattcctggagaagccatggtgaagttgtattgtcccaagtgtatggacgtctacacaccaaagagttcccggcaccaccataccgacggggcatattttgggacaggctttcctcacatgcttttcatggtgcacccggaataccgtcccaaaaggccagccaatcagtttgtgcctagctcatgtagccgacacccggacgtccctttactgccacgtaggcgcccattttgtcgaatgcattttagacttcgggaagtttaccaccagcagttgatcccagtccacggagatcaccatctgttatag

SEQ ID NO: 116628 - DNA, 1061 bp, Artificial Sequence
  derived and/or modified sequence
ccccacaatgcccttcgccttcctcaacgtggcccccgctccaagcccattttctggagccaggaatccactctgtgggttaggaaaggccctcaggaggcggagggaaacctgtggaatgccgagaagccgtgtaatgaaataacgtcacgcctgcccctcaccattactctgaccagggttcgaaggtcacacttagagcctaaggggaaatggagaagtgcaaagggacgagcagaatggctggcaccacctcagctgacgtgaagatgagcagctcagaggaggtgtcctggatttcctggttctgtgggctccgtggcaatgaattcttctgtgaagtggatgaagactacatccaggacaaatttaatcttactggactcaatgagcaggtccctcactatcgacaagctctagacatgatcttggacctggagcctgatgaagaactggaagacaaccccaaccagagtgacctgattgagcaggcagccgagatgctttatggattgatccacgcccgctacatccttaccaaccgtggcatcgcccagatgttggaaaagtaccagcaaggagactttggttactgtcctcgtgtgtactgtgagaaccagccaatgcttcccattggcctttcagacatcccaggtgaagccatggtgaagctctactgccccaagtgcatggatgtgtacacacccaagtcatcaagacaccatcacacggatggcgcctacttcggcactggtttccctcacatgctcttcatggtgcatcccgagtaccggcccaagagacctgccaaccagtttgtgcccaggctctacggtttcaagatccatccgatggcctaccagctgcagctccaagccgccagcaacttcaagagcccagtcaagacgattcgctgattccctcccccacctgtcctgcagtctttgacttttcctttcttttttgccaccctttcaggaaccctgtatggtttttagtttaaattaaaggagtcgttatcgtggtgggaatatgaaataaagtagaagaaaaggccatga

SEQ ID NO: 116629 - DNA, 648 bp, Artificial Sequence
  derived and/or modified sequence
atgtcatcgtccgaagaagtgagttggatcagttggttttgtggcctgagaggtaacgagtttttctgtgaagtggacgaggactatatacaagacaagtttaatctgacaggactgaacgagcaggtgcctcactaccgccaggcgctcgatatgattctggatttggagccggacgaagagctagaagacaatcccaaccagtcagacctgatcgaacaggcagcagagatgctgtacgggctgattcatgcccggtacatcctgactaatagaggcatcgctcagatgctagaaaaatatcaacagggagatttcggatattgcccaagagtttactgtgagaatcagccaatgcttcccatcggattgagtgacattcccggtgaagccatggtgaagttatattgcccaaagtgcatggatgtgtatacccctaagtcctcccggcaccaccacacggatggcgcttactttggaactggattcccacacatgctgttcatggtgcacccagagtaccgccccaagagacctgcgaaccagttcgtccctcggctctatggctttaagatccaccctatggcttatcagctgcagttgcaggccgcaagcaattttaaatctccggtgaaaactatcaggtag

SEQ ID NO: 116630 - DNA, 648 bp, Artificial Sequence
  derived and/or modified sequence
atgtccagctccgaggaggttagttggatttcttggttctgtggtctacgcgggaatgagtttttttgtgaagttgacgaggactatattcaggataaattcaatttaactggattaaacgagcaagttccgcattatagacaggcactggatatgatactcgacttagagcccgacgaggaattagaggacaatccgaaccaatcagatctgattgaacaggccgctgagatgctctacgggctaatccacgcccggtatatcctgacaaatcgcggcatagctcagatgcttgagaagtaccagcagggcgactttgggtattgcccccgcgtgtactgcgaaaatcagcccatgttgccgatcggcctctcagacatccccggagaagccatggtcaagttgtactgtccaaagtgtatggatgtctacacacccaaatcctcgcggcaccatcacaccgacggggcatactttggaaccggtttcccacacatgttattcatggtgcaccccgaataccggccaaagcggcccgcgaatcagttcgtgccccgattatacggctttaagatccatccaatggcataccagctccaactccaggctgctagcaacttcaagtctccagtgaagaccatcagatag

SEQ ID NO: 116631 - DNA, 648 bp, Artificial Sequence
  derived and/or modified sequence
atgtcctcaagcgaggaggtgtcgtggatctcttggttttgtgggctgcggggcaatgaattcttctgcgaagtggacgaggactacatccaggataaattcaacctgactggattgaatgaacaggtgccccactatcggcaggcgctggatatgatcttggatctggagcccgacgaggagcttgaggataaccccaatcaatccgatttaatcgagcaagccgctgagatgctgtacggtctgatacatgctcggtatatccttactaatcggggcatcgcgcagatgctggagaagtaccagcagggcgactttggttactgtcctcgggtgtattgtgagaaccagccaatgctaccaattgggctttctgacatcccaggggaggccatggtaaagctgtactgcccaaagtgcatggacgtgtacacgcctaagtcctccaggcaccaccatactgacggtgcctatttcgggaccggattcccgcacatgctgttcatggtgcaccctgagtacagacccaagaggcctgctaaccagttcgtgccacgtctctatggattcaagatacaccccatggcctaccagctgcaattacaggccgcgagcaatttcaaaagccccgtgaagaccataagatag

SEQ ID NO: 116632 - DNA, 648 bp, Artificial Sequence
  derived and/or modified sequence
atgtctagctctgaggaggtctcctggatcagctggttctgcggtctgagaggcaacgagttcttctgtgaggtagacgaggactacattcaggacaagtttaacctcacagggctcaacgagcaggtgcctcactatagacaagcattggacatgattctagatctggagcccgatgaagagcttgaagataatcccaaccagtctgacctcatcgagcaagcagctgagatgctttacggacttatccacgctcggtatatccttaccaatcgcgggatcgctcagatgttggagaaatatcagcagggggactttggatactgccctcgcgtgtactgcgaaaatcagcctatgttacctataggactgtctgatatcccaggggaagcaatggtgaagctctattgccccaaatgcatggacgtgtacactcccaagagctcccgccatcaccacacggatggcgcatacttcggcacaggtttccctcacatgctgttcatggtgcaccctgagtaccgtccaaagcgtcccgcaaatcaattcgtccctagactatacggcttcaagatccatcctatggcctaccagctacaattgcaggccgctagcaatttcaagtcaccagtcaagaccatacgctag

SEQ ID NO: 116633 - DNA, 687 bp, Artificial Sequence
  derived and/or modified sequence
atgtcatcatctgaggaggtgtcctggatttcatggttttgcgggttgcgtgggaacgaatttttctgcgaggtggacgaggactatatacaggacaagtttaacctcactggactgaatgaacaggtccctcattatcggcaggccctcgacatgattttggatctcgagcccgatgaagaactggaggataacccaaatcaaagcgatctcatcgaacaggccgccgagatgttgtacggtttgattcatgcccggtacatcctgactaatagagggatagcccaaatgcttgagaagtaccaacagggtgacttcggctactgccctcgagtctattgcgagaatcaacctatgctgccaattgggctctccgacattcccggtgaagccatggtcaaactgtattgtcctaaatgtatggacgtctatacccccaagtccagccgccatcaccataccgacggggcttactttggcacggggtttccgcacatgctgttcatggtgcatccagagtaccgaccaaaaaggccagccaaccaattcgtaccatctagttgttcgcggcacccagacgtgcctctcttgcccagaaggagacccttctgtaggatgcactttcggcttagagaagtttaccaccaacagttgattcctgtccatggggatcaccatttgctatag

SEQ ID NO: 116634 - DNA, 648 bp, Artificial Sequence
  derived and/or modified sequence
atgtcatcgagcgaggaggtcagctggattagctggttctgtggcctacgaggcaacgaattcttttgtgaggttgacgaggactatattcaggacaagtttaatctgacgggattaaatgaacaagtaccgcattacaggcaagctttagacatgatcttggatctcgagccagacgaggagctcgaagataatcccaaccagagtgacctgatagagcaggcagctgagatgttgtatggcctgatccatgcgcggtacatcctgacaaatagaggaattgcccagatgctggagaagtaccagcagggcgatttcggctactgcccacgagtttattgcgaaaatcagccgatgctaccaatcgggctgtccgatatccctggggaagctatggtgaaactctactgccccaagtgtatggatgtatatacgcctaaaagttcacggcatcaccatactgacggagcatactttgggactggctttcctcacatgttgtttatggtacatcccgagtataggccaaagcggcctgcaaaccagtttgtacccaggctgtacgggttcaagatccatcccatggcctatcagttacaactacaggcggcttctaatttcaagagtccggtgaaaacaattaggtag

SEQ ID NO: 116635 - DNA, 648 bp, Artificial Sequence
  derived and/or modified sequence
atgagctccagtgaggaagtcagctggatttcgtggttctgtggactgagaggcaatgagttcttctgcgaggtggacgaagactacattcaggataagtttaacctaactggcctcaatgagcaggtgccccactacagacaagcactggatatgatcctcgacctagagccagatgaagagctcgaggacaaccccaatcagagtgacctgattgagcaggcagcagagatgctctacggcttgattcatgctcgttacattctaaccaatcgggggattgcacagatgctggaaaaatatcagcagggggacttcggctattgccctcgggtgtattgtgagaaccaaccaatgctgcccatcggtctgagcgatattccgggagaggcaatggttaaactttattgcccaaaatgtatggacgtctacactcccaagagcagccggcaccaccacacagatggagcctactttgggacaggttttcctcatatgttattcatggtgcacccagaataccggccaaagagacccgccaaccaatttgtaccccgcctttacgggtttaagattcatcccatggcataccagctgcagcttcaagccgcaagcaacttcaagtcaccagtcaaaacaattcgatag

SEQ ID NO: 116636 - DNA, 705 bp, Artificial Sequence
  derived and/or modified sequence
atggagaaatgcaagggcaccagtaggatggccggcaccactagcgccgatgtcaaaatgagtagctccgaggaggttagctggatcagctggttctgcggtttgagggggaacgagttcttttgtgaggtggatgaggattatattcaggacaagttcaatcttactggcttaaatgaacaggtccctcattacagacaggccttagacatgatactcgatttggagcctgacgaggagctggaggacaacccaaaccagagcgatctgatcgagcaagccgccgaaatgctttatggtctcatccatgctcgctacatactgacaaatagaggtatcgctcaaatgttagaaaaataccaacagggtgatttcggctattgccctcgcgtctattgtgagaaccaacccatgcttccgatcgggctatccgatatccctggtgaggcgatggtgaagctctactgtccgaaatgcatggatgtgtacactcctaaatcatctaggcaccatcacaccgacggggcgtacttcgggactgggttcccacatatgctgttcatggtgcatcccgagtaccggcctaagcgccccgccaaccaattcgtgcccagactttatggcttcaaaatccatcccatggcttaccaattacagctgcaggcagcttcaaacttcaaaagtcctgtcaagaccatccgctag

SEQ ID NO: 116637 - DNA, 648 bp, Artificial Sequence
  derived and/or modified sequence
atgtcctcttctgaagaggtgtcctggatttcctggttctgcggccttagaggcaacgaattcttttgtgaggtggatgaggattacatccaggacaagttcaatctgacagggctcaacgagcaagtgcctcattaccggcaggcattagacatgattctggacctcgagcccgacgaggaattggaagacaatccgaatcagtcggacctcatcgagcaggctgccgaaatgctgtacggactaatccatgcgaggtacattctgacaaatagaggtattgcacaaatgttggaaaagtaccagcaaggtgactttggatactgccctcgcgtttactgcgaaaatcaaccaatgctacctataggcttatctgatatccctggtgaagccatggtgaagctatactgccctaaatgcatggacgtatatacaccaaagagctcacggcatcaccatacagacggtgcttattttgggactggatttccccacatgttgtttatggtccacccagagtatcgaccaaagcggccggcgaatcaatttgttcctagactgtacggttttaaaattcatccaatggcatatcagctccagcttcaagccgcctccaatttcaagtcacccgtgaagaccattaggtag

SEQ ID NO: 116638 - DNA, 687 bp, Artificial Sequence
  derived and/or modified sequence
atgtcatcaagcgaagaggtcagttggatctcctggttttgcggcctacgggggaatgagttcttttgcgaagttgacgaggactacattcaggacaaattcaatcttaccggattgaacgaacaggtgccgcattaccgacaggctctagacatgatactggaccttgaaccagatgaagaattagaagacaacccgaatcagagtgatctcatagagcaagccgccgagatgctgtacggcctgattcacgccagatacatcctcaccaacaggggcatagctcaaatgttggaaaaataccagcagggtgacttcggatactgtccaagagtgtattgtgagaaccagccgatgttaccaatcggtctcagcgatattcctggtgaggctatggtgaagctgtattgccctaagtgcatggatgtttacactccgaaatctagtcgccaccaccacaccgatggagcgtacttcgggactggctttccccatatgctcttcatggtgcatccagaataccggccaaaacgaccggccaaccagttcgtgccttccagctgctcgagacatcccgatgtgcccctgctgccccgaagaagaccgttctgccgtatgcacttccgccttagggaagtctatcatcagcaacttattccagtgcatggtgaccaccacctgctgtag

SEQ ID NO: 116639 - DNA, 687 bp, Artificial Sequence
  derived and/or modified sequence
atgagctcttccgaggaggtgtcttggatcagttggttttgtgggttgaggggcaacgaatttttttgcgaggtggacgaagattatattcaggacaaatttaacctcactggactgaacgagcaggtgccccattaccggcaggctctggacatgattcttgatttggaacctgatgaggagctagaagacaaccccaatcagagcgatttgatcgagcaggcagctgagatgctttacgggcttattcacgcccgatacatcctcactaatagggggattgctcagatgctggagaagtatcagcagggtgacttcggctattgccctagggtctactgcgaaaaccaacctatgctgcccatcgggctgtctgatatacctggggaagcaatggtaaagttatattgccccaagtgtatggatgtctacaccccaaagagcagccgccaccaccacacggacggcgcttattttggaaccggcttcccgcatatgttattcatggtgcaccctgaatacaggcccaagcgtcccgcaaaccagttcgttccatcatcatgcagcagacatccagacgttccgctgctgcctcggagacgacccttctgcagaatgcatttccgacttcgtgaggtctaccatcagcaactcattcctgtccacggtgatcatcacctgctatag

SEQ ID NO: 116640 - DNA, 648 bp, Artificial Sequence
  derived and/or modified sequence
atgagcagctcggaggaagtctcttggatttcctggttttgtggcctgcgcggcaacgagtttttttgcgaggtggatgaagactatattcaggataaattcaacctaacaggtctcaatgagcaggtgccgcactaccgccaggccctggatatgatcctggatctggaaccggacgaggaattggaagataaccccaatcagtccgacttgattgagcaggccgcagaaatgctctacggactgatacacgcaagatatattctgacaaacaggggaatcgcccagatgttggagaagtatcaacaaggggactttggctattgccctagagtgtactgcgaaaatcagcccatgctgccaatcggcctcagcgacatcccgggggaagccatggttaagctgtattgtcccaagtgtatggacgtttatacacccaaatcctcccggcaccatcacacggacggagcttacttcggaaccggatttccgcacatgctcttcatggtgcatcctgagtacaggcccaaacggcccgcaaatcagtttgtacctcggttgtacggcttcaaaattcatccgatggcgtatcagctccagttgcaggcagcgagcaacttcaagagtcctgttaagacgattcgatag

SEQ ID NO: 116641 - DNA, 705 bp, Artificial Sequence
  derived and/or modified sequence
atggagaaatgtaagggtaccagtcgcatggccggaactacttctgccgatgtaaaaatgtctagtagcgaagaggttagctggataagctggttctgcggcctcagagggaatgagttcttttgtgaagttgatgaggattatatccaggataaatttaacttgactggtctgaatgagcaggtaccacactataggcaggctctggacatgatcctggacctagagccggatgaagagctggaagataaccctaaccagtcagatttgattgagcaggccgcagagatgttgtacggtctgatccatgcgcgttacatcctcaccaatcgaggtatagcccaaatgctggagaagtaccagcagggcgacttcggctactgtcccagagtctactgtgagaatcagcctatgctgccaatcggattgtccgatattccgggagaggccatggtcaagttatattgtccaaaatgcatggatgtgtacaccccaaaaagttctcggcatcatcatacagacggagcctacttcgggaccggcttcccgcacatgctgtttatggtccatcctgagtaccgcccaaaacggcccgcgaaccagtttgtgcctcgcctctatggctttaaaattcacccgatggcctaccagctgcaactgcaggcggcctctaatttcaagagcccagtgaagactatacgctag

SEQ ID NO: 116642 - DNA, 648 bp, Artificial Sequence
  derived and/or modified sequence
atgtcatcatcagaagaggtcagttggatttcttggttttgcggtctcaggggaaacgaattcttttgcgaagtggatgaggattacattcaggacaagtttaacttgaccggactgaacgagcaggttccgcactatcggcaggccctcgacatgatactcgacctagaacctgatgaggagctcgaggataatccgaatcagtcggatcttatagaacaggctgctgagatgctctacggcctgatccacgctagatacatcttaacaaatcggggtatagcccagatgctggaaaagtaccagcagggcgattttggctattgcccacgggtatattgtgaaaatcagcctatgttgcctattgggctctcggatatcccaggagaggcaatggtgaagctctactgcccaaagtgtatggacgtctatacgcctaaaagttctagacatcaccacaccgatggtgcctattttgggaccgggttccctcacatgttgttcatggtacatcccgaataccgccccaagaggccggctaaccagtttgtcccacggctctacggtttcaaaatccatcccatggcttaccaacttcagctccaggctgccagcaatttcaagtctcctgtgaagacaatacgttag

SEQ ID NO: 116643 - DNA, 705 bp, Artificial Sequence
  derived and/or modified sequence
atggagaagtgcaagggcacatctcgcatggctggaacgactagcgcagatgtcaagatgtccagcagcgaggaggtatcttggattagctggttttgtggcctgcgtggtaatgaattcttctgtgaggtcgatgaggattatattcaagacaaattcaatctaactgggctcaatgagcaagttccacattatcgccaagccctagacatgatcttggatctggagcccgacgaggagcttgaagacaatcctaatcagagtgatctgatcgaacaggccgcagaaatgttatacggactgatccacgctagatatatcttaactaacagagggattgcccagatgctcgaaaagtatcagcagggcgattttggctactgcccgagggtgtattgcgagaaccagccaatgctgccaatcggcctctcagatatccccggtgaagctatggtcaagctgtattgccctaagtgcatggatgtttacacacctaaatcaagcaggcatcaccacactgatggcgcatacttcggaacaggttttccccacatgctctttatggtgcacccagagtatcggccaaaaagacctgcaaaccagttcgttcctcgcctttacggttttaagatccaccccatggcctaccagcttcagcttcaggccgcatcaaactttaaatcccctgttaagacaataaggtag

SEQ ID NO: 116644 - DNA, 705 bp, Artificial Sequence
  derived and/or modified sequence
atggaaaaatgcaaaggcacttctcggatggcaggtacaaccagcgcggacgttaaaatgagttctagcgaggaggtatcctggattagttggttttgcggtctacggggcaatgaattcttctgcgaggtagacgaggattacatccaggataaatttaacctgacaggcctcaacgagcaagtcccccattaccggcaggctctcgacatgatcctggacctggaacccgatgaagagcttgaagacaatccgaatcaaagtgatctgatagagcaggccgctgagatgctgtatggtttgatccatgctaggtacatccttaccaacagaggcatcgcccagatgctggaaaagtaccagcagggcgactttgggtactgtccaagagtctactgcgagaaccagcccatgttgcccatcggcttgtcagatattccaggcgaagctatggtcaagctgtattgtcctaagtgcatggacgtgtatacccccaaatcttcccggcatcaccataccgatggggcttattttggcaccgggtttccccacatgctttttatggtacaccctgaataccgccccaaacgccccgctaatcagttcgtccctcgtttatatggctttaagatccatccaatggcatatcagttgcagctccaggctgcttccaattttaaatcacctgtgaagacgattcgttag

SEQ ID NO: 116645 - DNA, 648 bp, Artificial Sequence
  derived and/or modified sequence
atgagcagctctgaggaagtctcctggatatcctggttttgcggcctgagaggaaacgaattcttttgtgaggtcgacgaggactacatccaggataaatttaatctgacaggcctcaacgagcaagtacctcattacagacaggctcttgatatgatcctggacctggagcccgatgaggaactagaggacaacccgaatcagtcagacctcatcgaacaagccgccgagatgctgtacggccttatacatgcgcgctacatcctgacgaatcggggcatcgcgcagatgctggagaaataccagcaaggggacttcgggtactgtcctagggtgtattgtgagaatcagcccatgctgcccattggtttaagcgacattcctggagaggctatggtaaaactatactgtcccaagtgtatggatgtatatacaccaaaatcctcacgccaccatcatacagacggcgcttactttgggacgggtttcccccatatgctattcatggttcacccggaatatcggcctaagcggcctgccaatcagttcgtacctcggctgtacggcttcaagattcaccctatggcttatcagctacagctccaggcggcttcaaattttaaatctcccgtgaaaaccatccgatag

SEQ ID NO: 116646 - DNA, 648 bp, Artificial Sequence
  derived and/or modified sequence
atgtccagcagcgaagaggtgtcgtggatctcctggttttgcggtctccgtggtaacgaattcttctgtgaagttgacgaggattacatacaagataaatttaacctgaccggtcttaatgagcaagtgcctcactaccgccaggccctcgacatgatcctcgacttggaacccgatgaagagctggaagataatccaaatcagtctgacctcatcgagcaggcagccgaaatgctctatggcctgattcacgctcgctacatactgaccaaccgcgggatcgctcagatgctggagaagtatcaacaaggcgacttcggatattgcccacgcgtctattgcgagaaccagccaatgctgcccatcggactttctgatatccctggagaggccatggtgaagctgtactgcccaaaatgcatggacgtatacacgccaaaatcctccagacaccaccatacagacggggcttactttggtaccggatttccacatatgttgttcatggtgcaccctgaatacaggcccaagcgccccgcaaatcaatttgtgcccagactgtacggttttaagatacaccccatggcctaccaattgcagctgcaggcagcctcgaacttcaagagtcctgtcaaaacgattcgatag

SEQ ID NO: 116647 - DNA, 705 bp, Artificial Sequence
  derived and/or modified sequence
atggaaaaatgcaagggcacaagcagaatggctggtaccacctccgctgatgtcaaaatgagctcaagcgaggaggtctcctggattagctggttctgcggtctccgaggaaacgagtttttttgcgaggtggatgaagactacatccaggataagtttaacctgaccggcctcaatgagcaggtcccccactatagacaggctcttgacatgattctggaccttgaaccggatgaagaacttgaggataatccaaaccagtcggatctgatagaacaagccgcggagatgctttacggactgatccacgctcggtatatcttaaccaacaggggaatcgctcagatgctggagaagtatcaacagggcgatttcggctactgtcctcgcgtctattgtgaaaatcagcccatgctgcccatcggcttatcagacatcccgggtgaggcaatggttaagctgtactgtccgaaatgcatggacgtttatacacctaagtcgagtcggcaccaccatacggacggtgcgtactttggtacaggatttcctcacatgctgttcatggtgcatcccgaatatcgaccgaagcgcccggccaatcagttcgtacctcgattgtacggctttaagattcatcctatggcatatcagctacagctccaggccgcctctaatttcaagagtcctgttaaaacaatcagatag

SEQ ID NO: 116648 - DNA, 648 bp, Artificial Sequence
  derived and/or modified sequence
atgagctctagcgaagaagtctcatggataagctggttctgcggactcagaggtaacgaatttttttgcgaagtggatgaggattatatacaggacaagtttaatctgactggtctcaacgagcaggtgccgcattacaggcaagccctcgacatgatcctcgatctagaaccagacgaggagctggaagataacccaaaccagtcggacctaatcgagcaggccgctgagatgctttacggtctgatccacgcccgttatattttgacgaacagagggattgctcagatgttggagaagtatcagcagggggactttggttattgtccgagagtgtactgcgaaaaccagcctatgctgcctatcggactatctgatatcccaggcgaggctatggtgaaactgtactgtcctaaatgcatggatgtgtacacccccaaatctagcagacaccatcacacagacggtgcctactttggaacgggcttccctcatatgctgtttatggtgcaccctgaatacagacccaaacgaccggccaaccagttcgtgccccgactttatgggtttaaaattcatccaatggcctatcaattacaactgcaggccgcctccaattttaagagccccgtgaagacgatccgctag

SEQ ID NO: 116649 - DNA, 687 bp, Artificial Sequence
  derived and/or modified sequence
atgagctctagcgaggaggtcagttggattagctggttctgtggactccgcggaaacgagtttttttgtgaagtcgatgaagactacatccaggacaagtttaatttaaccggcctcaatgaacaggttcctcattatcgacaggctctggacatgatcctggatctcgagcccgatgaggagttagaagacaatcccaaccagtccgacctgattgaacaggctgccgaaatgctttacggcctcatccacgccaggtatattctgacgaacaggggcatcgctcaaatgcttgaaaaatatcagcagggggattttggctactgccctcgggtttactgcgagaatcaacccatgctccccattgggctgagcgatattcccggagaagccatggttaagctttactgccctaaatgcatggatgtgtacactcccaaatcctcgaggcaccaccataccgacggagcttacttcggaacaggcttccctcatatgttatttatggtccacccagagtataggcccaagcgccccgcgaatcaattcgtcccgagctcttgctcccgccaccctgacgtacccctgcttccacgccgtaggccattttgccgcatgcactttcgattgcgcgaggtatatcatcagcaactgattcccgtacatggcgatcaccatctactttag

SEQ ID NO: 116650 - DNA, 705 bp, Artificial Sequence
  derived and/or modified sequence
atggaaaagtgcaagggaaccagccggatggcaggcactactagcgcagacgtcaagatgtcatcttccgaggaggtgtcttggatttcatggttttgcggcctgagggggaacgagtttttctgtgaagtggatgaggactatatccaggataagttcaacttaaccgggttaaatgaacaagtcccacactataggcaagccctcgacatgatactggatctggaaccggacgaggagttggaggataatccaaaccaatcggacctcattgagcaggccgctgagatgctgtacgggctgatccacgcacggtatatcttgaccaatcgcggcatcgcccagatgctcgaaaagtaccaacagggggatttcggctactgcccgcgagtgtactgtgagaaccagcccatgttgcctatcggcctttccgacatcccaggggaagccatggtcaagctctactgccctaagtgcatggatgtgtatactcctaagagctccaggcatcatcacactgacggtgcctacttcgggacgggcttccctcatatgctgtttatggtgcaccctgagtatcggcccaagcggcccgccaatcagtttgttcctcggttgtacggcttcaaaattcaccccatggcttatcagcttcagttgcaggccgcgagcaatttcaagagtcctgtgaagaccatccggtag

SEQ ID NO: 116651 - DNA, 648 bp, Artificial Sequence
  derived and/or modified sequence
atgtcctcgtctgaggaagttagctggatttcatggttctgtggcttacgtggcaacgagttcttctgtgaggtagacgaagactatatccaggacaagttcaatctcacaggccttaacgagcaggtgcctcactacaggcaggctcttgacatgattctggacctagaacccgatgaagaactggaggataaccccaaccagtctgacctgatcgagcaggcagcagaaatgctttatggactcatccatgctaggtacatcctcaccaatcgcggcattgctcagatgctggaaaagtatcagcagggagactttggatactgccctcgggtgtattgtgagaaccaacctatgctgccaataggattgtccgacataccaggagaggctatggtgaagctgtactgccccaagtgcatggacgtgtacacgcccaaatcgagccgccatcatcacacggatggtgcttacttcgggactggcttccctcacatgttgttcatggtgcaccccgagtaccgaccaaagcgccctgctaatcagttcgtgccccggctgtacggtttcaaaattcatcccatggcctatcagctccagttacaagccgcctcaaatttcaagtcccccgtgaagactatccgctag

SEQ ID NO: 116652 - DNA, 648 bp, Artificial Sequence
  derived and/or modified sequence
atgtcttcatctgaagaagtgtcatggattagttggttctgtggattgcgcggtaatgaatttttttgtgaagttgatgaggattacattcaagataaattcaatttgactgggctgaacgaacaggtgccacactacagacaagctttagatatgatcctcgacctggaaccagacgaggagttagaggacaaccccaaccaatccgacctgattgagcaggcggcagaaatgctttacgggctgattcatgcccgctatatccttaccaaccgcggcattgcccagatgctagagaagtaccagcagggcgacttcggatactgtcccagagtgtattgcgagaaccagccaatgttgcccatcgggctttctgacatcccgggggaagcgatggtcaaactatactgccctaagtgcatggatgtatatacacccaagtcctctcggcatcatcacactgacggagcgtactttggcaccggattcccacacatgttattcatggtccatccagagtacaggccgaagcgacctgccaaccagttcgtcccacggctgtacggcttcaagatacaccccatggcctaccagcttcagctgcaggcagctagtaacttcaagtcgccagtgaagactattcgatag

SEQ ID NO: 116653 - DNA, 648 bp, Artificial Sequence
  derived and/or modified sequence
atgtccagctccgaggaggtcagctggatttcttggttctgcggactgaggggtaacgaattcttctgcgaggtggatgaggactatatccaggacaagttcaacttgactggactgaacgagcaggtgccccactaccgccaggctttggatatgatactggacctggagcctgatgaagagctagaggataaccccaaccagagcgacttgattgagcaggctgccgagatgctgtacgggctgatccacgcccgctacattctgacaaacagagggattgcccagatgctagagaagtaccagcagggggactttgggtattgcccacgtgtctattgcgagaaccagccgatgcttcctatcggactttccgacatccccggtgaagccatggttaagttgtattgcccaaaatgcatggatgtatatacaccaaagtcttcccgccatcatcatactgatggcgcttatttcggaacaggattccctcatatgctgtttatggtgcacccagagtacaggcctaagaggcccgccaaccagtttgtgcctagactatacgggtttaaaattcacccaatggcctaccaattgcaacttcaggcagcctccaactttaagagccccgtgaaaaccattcggtag

SEQ ID NO: 116654 - DNA, 648 bp, Artificial Sequence
  derived and/or modified sequence
atgtcatcatccgaggaagtctcttggatctcctggttctgcggtctgcgcggtaacgagttcttttgcgaggtcgacgaagactatatccaagacaagtttaatctcaccggactcaatgagcaggttccccactaccgccaggctctggacatgattctggatttagaacccgatgaagagctggaggacaacccaaaccagtcagatctgatcgaacaggccgctgaaatgctgtacggtcttatccatgctcgttacatcctgacaaatcggggcattgcccagatgctggaaaagtaccaacagggagatttcggttattgcccacgagtatactgcgagaaccagcccatgttgcctatcgggttatccgacatcccaggggaggccatggtaaagctatattgtccaaaatgcatggatgtctacacccctaagtcctcacgacaccaccatacggatggtgcgtacttcggcacgggcttcccgcacatgctttttatggtgcaccctgagtatcggcctaagcgacccgcaaaccaatttgtgccacggctttatggttttaaaattcaccctatggcctatcagctgcaactgcaggccgcttctaacttcaaaagtccagtgaagacgattagatag

SEQ ID NO: 116655 - DNA, 648 bp, Artificial Sequence
  derived and/or modified sequence
atgtctagcagcgaggaggtctcctggatcagttggttctgcggactgaggggcaatgaatttttctgtgaagtggacgaggactacattcaggataagtttaatctcaccggtttgaacgagcaggtgccgcactatcggcaggcacttgatatgatccttgacctcgagcctgacgaggaacttgaggataaccccaaccagagcgacctgatcgaacaggcagctgaaatgctctacggtctgatccacgcacggtacatcctgaccaatcgagggatcgctcagatgctggaaaagtatcagcagggcgattttggatactgcccacgggtctattgtgaaaaccagccaatgctcccaatcggacttagtgacatcccgggtgaggcgatggtgaaactttactgtcctaagtgcatggacgtctatactccaaagtcgtctcgccaccaccatactgacggtgcttatttcggcaccggctttcctcatatgctgttcatggtgcaccccgagtatagaccgaagcgccccgcaaatcagttcgtcccaagattatacgggttcaaaattcaccccatggcttaccagctacagctgcaggcagctagtaactttaagagccctgtgaaaaccattagatag

SEQ ID NO: 116656 - DNA, 648 bp, Artificial Sequence
  derived and/or modified sequence
atgtccagttcagaggaagtctcttggatctcatggttttgcggcctacgcgggaatgagtttttctgtgaggtggacgaggactacatccaagacaaattcaaccttaccggactgaacgagcaggtgccccactaccgtcaagccctagacatgattctggatttggagccagacgaagaactggaagacaatcctaatcagtccgacctgatcgaacaagccgctgaaatgttatacgggctgatacacgctcgttatattctgacaaatcgtggcattgcacagatgctggagaagtatcagcagggagatttcggatattgcccccgagtgtattgtgagaatcagcccatgctaccaattggcctgtcagatattccaggggaagccatggtcaaactgtattgtccgaagtgtatggacgtctacacgcctaaatcttcgagacatcatcacacagatggtgcatatttcgggaccggctttccccatatgctcttcatggtacacccagagtaccgacccaagcggcctgcaaaccagttcgtgccgcggttatatggcttcaaaattcaccctatggcctaccagctacagttgcaagcggctagcaactttaaatctccagtgaagacaatccggtag

SEQ ID NO: 116657 - DNA, 648 bp, Artificial Sequence
  derived and/or modified sequence
atgtcctcttctgaagaggtctcatggatcagctggttttgcgggcttagaggcaatgaattcttctgcgaagtcgacgaggactatatacaggacaagttcaacttgactggccttaacgagcaagtgccacactaccgtcaggctctggatatgatcctcgacctggagcccgacgaggaactggaagataacccaaatcagagtgacctcatagagcaggcagccgagatgctctacgggctcatacacgcaagatacatactaactaaccggggcatagcccagatgttggagaagtatcaacaaggagactttggctattgccccagagtctattgcgagaatcaaccaatgctaccaataggcctttcagacattccaggcgaagctatggtaaagctgtactgccccaagtgtatggacgtgtacacacctaaatccagtcgccaccatcataccgatggtgcctattttggtacgggtttcccacatatgcttttcatggttcaccccgagtatcggccaaagcgtcccgccaaccaatttgtacctaggctttacggtttcaagatccatccaatggcataccagctgcagctgcaggccgctagtaacttcaaaagtccagtcaagaccattcgatag

SEQ ID NO: 116658 - DNA, 648 bp, Artificial Sequence
  derived and/or modified sequence
atgagtagcagcgaggaggtttcttggatctcatggttctgcggccttcgaggaaatgaatttttctgcgaggtcgacgaggactacattcaagataaatttaacctgaccggacttaacgaacaggtcccacattatagacaggccctagatatgatattggacctggagccagatgaggaattggaggataatcccaatcagagtgaccttatcgaacaggccgccgagatgttgtatgggctaatacatgccaggtacatacttaccaaccgcggcattgcccagatgctggagaagtaccagcagggcgattttgggtactgccctagagtgtactgtgagaaccagccgatgttaccaatcggcttaagcgatatcccaggggaagcaatggtaaaactgtactgcccgaaatgcatggacgtgtacacgcccaagtctagccgtcaccatcacaccgacggtgcctactttggcaccggctttcctcacatgctgttcatggtacaccccgagtatagacccaagcgaccagccaaccagttcgtgcctaggttatatggttttaaaatacaccccatggcatatcagttgcagctgcaggctgcttctaatttcaagtccccggtcaaaactattagatag

SEQ ID NO: 116659 - DNA, 648 bp, Artificial Sequence
  derived and/or modified sequence
atgagctccagcgaagaagtgtcctggatctcttggttctgcgggctccggggaaacgagttcttttgcgaggttgatgaagattacattcaagataaatttaatctcactggattgaatgagcaggtcccccattaccggcaggcactggacatgatcctagacctggagccggatgaggaactggaggataaccctaaccagtcagacctgattgaacaagccgctgagatgctttatggtctgatccacgcccggtacattctgactaatagaggaatagcccagatgctggaaaaatatcaacagggagatttcgggtactgcccccgcgtgtattgtgagaatcagcctatgctgcctatcggcttatcagatatacctggtgaggcgatggtgaaattgtactgcccaaaatgtatggacgtgtacactcctaagagtagtaggcatcaccataccgacggcgcgtactttgggaccgggtttccacatatgctgttcatggtgcatccagagtatagacccaaaagaccggccaaccagttcgtgccccggctgtacggtttcaaaattcacccgatggcctaccaactgcagctgcaggctgcctccaatttcaaaagtccggttaagactattagatag

SEQ ID NO: 116660 - DNA, 648 bp, Artificial Sequence
  derived and/or modified sequence
atgagcagcagcgaggaggtgtcctggatctcctggttctgtggcctgcggggaaatgagttcttctgtgaggtggatgaggactacatccaggacaagttcaacctgaccggcctgaatgagcaggtgccccactaccggcaggccctggacatgatcctggacctggagccagatgaggagctggaggacaaccccaaccagagcgacctgattgagcaggccgctgagatgctgtatggcctcatccacgcccgctacatcctgaccaacagaggcatcgcccagatgctggagaagtaccagcagggcgactttggctactgcccccgggtgtactgtgagaaccagcccatgctgcccatcggcctgagtgacatccctggagaggccatggtgaagctgtactgccccaagtgcatggatgtgtacacccccaagagcagccgccaccaccacacagatggagcctactttggaacaggcttcccccacatgctgttcatggtgcaccctgagtaccggcccaagaggcctgccaaccagtttgtgccccggctgtatggcttcaagatccaccccatggcctaccagctgcagctgcaggccgccagcaacttcaagagccctgtgaagaccatcagatag

SEQ ID NO: 116661 - DNA, 648 bp, Artificial Sequence
  derived and/or modified sequence
atgagcagcagcgaggaggtgagctggatcagctggttctgcggcctgcgggggaacgagtttttttgtgaagttgatgaggattacatccaggataaattcaacctgactgggctgaatgaacaggtgcctcactaccggcaagcacttgacatgattcttgacctggaacccgatgaagaattggaggacaaccccaaccagtctgacctgattgagcaggcagcagagatgctgtatggattgatccacgcccgatacatattgactaatcgaggtatcgcccagatgctcgaaaagtatcaacagggtgacttcggctactgcccccgggtgtactgcgagaaccagcccatgctgccgattggcctttcagacatacccggggaggcgatggtgaaactgtactgtcccaaatgtatggatgtctataccccaaaatcaagccggcatcatcacaccgacggcgcctactttggtaccgggtttccacacatgctcttcatggttcacccagaatatcgacctaaacggcctgccaatcagttcgttcctaggctgtatgggttcaaaatccatccgatggcttaccaactccaactgcaggcagctagtaatttcaagagccctgtgaaaacgatccgctag

SEQ ID NO: 116662 - DNA, 648 bp, Artificial Sequence
  derived and/or modified sequence
atgagcagcagcgaggaggtgagctggatcagctggttctgcggcctgagaggtaatgagtttttctgtgaagtggacgaagactatatccaggataaattcaatttgacgggtttgaacgaacaggtgccacactatcgtcaggcgctggacatgattcttgatctcgaacccgatgaagagctcgaagataaccccaaccagtcggacctcatcgagcaggccgcggagatgctttatggcctgattcacgctcgatacatattaactaacagggggatcgctcagatgctggagaagtaccaacagggggatttcggttattgccctcgcgtttattgcgagaatcagccaatgcttccaattggcctgagtgatatccccggggaggctatggtgaaactgtactgtccaaagtgtatggacgtgtacacccccaaaagctcaagacaccaccatacagatggcgcgtattttgggactggttttccacatatgcttttcatggtacaccccgagtatcgaccgaagcggccagcaaaccagttcgtgcccaggttatacggtttcaagatccatccaatggcctaccaattgcagcttcaggctgcttcaaacttcaagtcacccgttaaaactatcagatag

SEQ ID NO: 116663 - DNA, 648 bp, Artificial Sequence
  derived and/or modified sequence
atgagcagcagcgaggaggtgagctggatcagctggttctgcggcctgagaggaaatgagtttttttgtgaagtggacgaggactatattcaagacaagttcaacctgacaggcctgaacgaacaagttccccattataggcaggcccttgacatgatcctcgatctcgaacctgacgaagaattggaagataatccaaaccagtccgatctgatcgagcaggctgcggagatgttatatggcctgattcatgctcggtacatcctgacaaaccgcggaatcgctcagatgttggagaaataccagcagggagacttcggctactgtccccgggtttactgcgaaaaccagcccatgctgccaatcggcctaagcgacatccccggtgaagccatggttaaactgtactgtccaaaatgcatggacgtttacaccccaaagagttcacgccaccatcatacagacggagcctatttcgggacaggtttcccgcacatgctcttcatggtgcaccccgagtaccgacctaagaggcccgccaaccagttcgtaccgcggttgtatggctttaagattcatcctatggcataccaactacagctgcaggctgcctcaaactttaagtcaccagttaagactatccgctag

SEQ ID NO: 116664 - DNA, 648 bp, Artificial Sequence
  derived and/or modified sequence
atgagcagcagcgaggaggtgagctggatcagctggttctgcggcctgcgagggaatgagttcttttgcgaggttgacgaggactacattcaggacaagttcaatctgacaggtctgaatgagcaggtaccccattacaggcaggccctggatatgattcttgaccttgagccagatgaggaactggaggacaatccaaaccagagcgatctgatcgaacaggccgctgagatgctgtacggtcttatccacgcacgatatattcttactaaccgcggcatcgcccagatgctggagaaataccagcagggagactttggctactgccctcgcgtgtattgtgagaaccaacccatgctacccattggactgtcagacattccaggagaggccatggttaagctgtactgtccaaaatgtatggacgtttacactcctaagagctcacgacaccatcacacagatggcgcttatttcggcactggctttccacatatgttattcatggtccacccagaatatcgacccaagaggcctgccaatcagttcgtcccaaggctatacggatttaaaattcaccccatggcttaccagttgcagctgcaagccgcttccaatttcaaaagtcctgtgaagacaatcagatag

SEQ ID NO: 116665 - DNA, 687 bp, Artificial Sequence
  derived and/or modified sequence
atgagcagcagcgaggaggtgagctggatcagctggttctgcggcctgcggggaaatgagttcttctgcgaggtggacgaggattacatccaggataaatttaacctcacagggctaaacgagcaggtgccccactatcgccaggctctggacatgattctagaccttgaacccgatgaggagttagaggacaatccgaatcagagcgacctaatagaacaggccgcagagatgttatatggtcttatccacgcgaggtatatacttacgaacagagggatagcacagatgctggagaagtatcagcagggcgactttggctattgtcctagagtgtactgtgagaatcagcccatgctgcccatcggactgtcggatatccctggtgaggctatggtcaaactctattgccctaagtgtatggacgtgtatacacctaagtcctcccgccaccaccatacagacggtgcttattttggaacaggttttccgcatatgctgttcatggttcacccagagtatcgccctaagaggcccgcgaaccagttcgtcccaagcagttgttcccgtcatcccgatgtccccttattgcccaggcggcgacccttttgcaggatgcattttcggctgcgcgaggtgtatcatcagcaactgattccagtccacggggatcatcacttgctctag

SEQ ID NO: 116666 - DNA, 648 bp, Artificial Sequence
  derived and/or modified sequence
atgagcagcagcgaggaggtgagctggatcagctggttctgcggcctacggggtaatgaatttttttgcgaggtcgacgaggattacattcaggacaagttcaacctaactggactcaatgagcaggtgccacactaccgacaggcactggatatgatcctggatctggaaccagacgaggaacttgaggacaaccctaaccagagcgaccttatcgaacaagccgctgaaatgctgtacggcctgattcatgcacggtatatcctcacaaaccggggaatagctcagatgctggaaaagtatcagcaaggcgacttcggatactgcccccgtgtgtactgcgagaaccaacccatgctccccattgggctgtctgacatccctggagaggctatggtaaagttgtactgccctaaatgcatggacgtctacacacctaaatcatctcgtcaccaccacaccgacggagcttacttcggcacgggcttccctcacatgctttttatggtgcacccagagtatcggcctaagcgcccagccaatcagtttgtgcccaggttgtatggttttaagattcaccctatggcttaccagctgcagctgcaggctgccagcaattttaaaagcccagtgaagaccatccggtag

SEQ ID NO: 116667 - DNA, 648 bp, Artificial Sequence
  derived and/or modified sequence
atgagcagcagcgaggaggtgagctggatcagctggttctgcggcctgagagggaacgagttcttttgtgaagtcgacgaagactatattcaggacaaatttaaccttaccggcctcaatgagcaggtcccccactatcgacaagcactcgatatgattctggaccttgagccagacgaggaactggaggacaatcccaaccagtctgaccttatcgagcaagccgctgagatgctgtacggcttgatacatgctcgttatatcctgacgaacaggggcattgcccagatgctggagaaataccaacagggagatttcgggtactgcccgcgcgtatattgtgaaaaccagccaatgctgccaatcggcctgtccgacatacccggggaggcaatggtgaaactttattgcccaaagtgtatggacgtctatacacctaagtcaagcagacatcaccatacagatggtgcctattttgggactgggttcccccacatgctgttcatggtgcatcctgagtaccgccccaagcgtcctgccaatcagttcgtcccacggctatacgggtttaagatccaccccatggcttatcagctgcagctgcaggccgcatccaattttaagagccctgtgaagaccatccggtag

SEQ ID NO: 116668 - DNA, 705 bp, Artificial Sequence
  derived and/or modified sequence
atggagaagtgcaagggcaccagccggatggccggcaccaccagcgctgatgtaaaaatgtcctcctccgaggaggtgagctggatttcctggttctgtggactgagagggaacgagtttttttgtgaagtagatgaagactatattcaagacaaattcaatctgaccggtctcaacgagcaggtaccacactacagacaagctctcgacatgattcttgacctggagcccgacgaggaattagaagacaacccaaaccaatctgaccttatcgagcaggccgccgaaatgctgtatggccttatccatgctagatacattctcaccaaccgcggcatcgctcagatgttggaaaagtaccaacaaggagacttcgggtattgcccgcgagtgtactgcgaaaaccaaccaatgcttccaattgggttatcagacattcctggcgaggccatggtcaagctctattgtccaaaatgtatggacgtctatactccaaagtcctcaagacatcatcacactgatggagcatattttggtaccgggttccctcacatgctcttcatggttcatcccgaatatcgcccaaaaagaccagccaatcagtttgtgccacggctttacgggtttaagatacatcctatggcctatcaattgcagctccaggccgcctctaacttcaaatcacccgtgaagacaattcgctag

SEQ ID NO: 116669 - DNA, 648 bp, Artificial Sequence
  derived and/or modified sequence
atgagcagcagcgaggaggtgagctggatcagctggttctgcggcctacggggaaacgaattcttttgtgaagttgacgaagattatatccaggacaagttcaatctaactggtctgaatgaacaggtcccccattatagacaggccctagacatgatactggacttggagccagacgaggagctcgaggataatccaaaccagagcgatctgatagaacaggcagccgaaatgttgtacggacttatacacgctcgttacatcctgaccaatcgcgggattgcccagatgctggagaagtaccagcaaggtgattttggctactgtccccgagtgtattgtgagaaccaacccatgcttcccattggcctttctgatatcccaggcgaggctatggtgaagttgtattgccctaaatgcatggatgtctatacacccaaatcctctagacaccaccatacagatggagcctatttcgggacagggttcccgcacatgctgtttatggtccaccctgaatatcggcccaagcgccccgctaatcagtttgtgccaagattatacggattcaaaatccaccccatggcctaccagttacagctgcaggcagcttctaacttcaaatcccccgtcaagactattcggtag

SEQ ID NO: 116670 - DNA, 687 bp, Artificial Sequence
  derived and/or modified sequence
atgagcagcagcgaggaggtgagctggatcagctggttctgcggcctgaggggcaacgaattcttttgtgaggttgatgaagactatatccaagataagttcaatctgacaggactcaacgagcaggtccctcactaccgacaggctctggatatgatcctggacctggaaccagacgaggaactggaagataaccctaaccagtccgacctcatcgaacaagcagccgaaatgctgtacggcctgattcatgctcggtacatcctcactaacaggggtatagcgcagatgctggagaagtaccagcaaggtgacttcggatattgcccgcgtgtatactgtgagaaccagcctatgttaccaattggtctatcagatattccaggcgaagctatggttaagctgtactgtcccaagtgtatggacgtctacacccctaaatcttcccgccaccatcacactgatggtgcctacttcggtacaggatttcctcacatgttgtttatggtccacccagagtaccgccccaagcgacccgccaatcagtttgtgccctcatcgtgtagtcgccatccggacgtgcccttattgcctcgaagacgccccttctgtcgcatgcactttaggctccgtgaggtctaccatcagcagctcattcccgtacatggcgaccaccatctgctgtag

SEQ ID NO: 116671 - DNA, 687 bp, Artificial Sequence
  derived and/or modified sequence
atgagcagcagcgaggaggtgagctggatcagctggttctgcggcctgagaggcaatgagtttttctgtgaggtggatgaagattatattcaggataagttcaacttgaccggcctcaacgaacaagttcctcactaccgccaagcattagatatgatcctggacttagagccagacgaggagcttgaagataatcccaaccagtctgacctcatagaacaggccgcggaaatgctgtatggcctgatacacgctcgctacattctaactaatcgtggtatcgctcagatgttagaaaaatatcagcaaggcgacttcggatactgcccgagagtgtattgtgaaaatcagcccatgttgcccataggtttaagcgatatccccggtgaggccatggttaaactgtattgtccgaagtgtatggacgtgtatacccccaagtcttccagacatcaccataccgacggtgcatatttcggcacgggctttccacacatgctgtttatggtacatccggaataccggcctaaacgaccggccaatcagttcgtccccagctcgtgtagccgccaccctgacgtgcctcttctgcctcggcggcgccccttctgccggatgcacttcaggttacgtgaggtctatcaccaacagctgattccagtgcatggggaccaccacctcctatag

SEQ ID NO: 116672 - DNA, 648 bp, Artificial Sequence
  derived and/or modified sequence
atgagcagcagcgaggaggtgagctggatcagctggttctgcggcttgaggggtaacgagttcttttgtgaagtagatgaagattacatacaggacaagttcaatctcacaggcttaaacgaacaggtcccacattaccgccaagctctggatatgattctggacctggaaccagatgaagaactcgaggacaaccccaaccagtccgatcttatcgagcaggctgctgaaatgttgtacggtttaatccacgcccgttatatcctgacgaatcgtggcatcgcgcagatgctggagaaataccagcagggcgacttcggctattgcccccgcgtttattgcgagaaccagcccatgctgcctatcggactgagtgatatcccaggcgaggcgatggtaaagctgtactgccctaagtgtatggatgtctacaccccaaagtcctcaaggcaccatcatactgacggcgcctactttggaactggatttcctcacatgctgtttatggtgcatcctgagtacaggccaaaacggccagctaaccagttcgtccctcgcctgtacggcttcaagatccacccaatggcctaccagctgcagctccaggctgcaagcaactttaagtcccccgtgaaaaccataagatag

SEQ ID NO: 116673 - DNA, 705 bp, Artificial Sequence
  derived and/or modified sequence
atggagaagtgcaagggcaccagccggatggccggcaccaccagcgccgacgtgaagatgtcgtccagcgaagaagtcagttggatttcctggttctgcgggctgcgcggtaatgagtttttttgcgaggttgacgaagattatatccaagacaagttcaacttaactgggttgaacgagcaagtgccacattaccgtcaagctttggacatgattctggacctggaacccgacgaagagctggaagataacccgaatcagtcagacttgatcgagcaggccgctgaaatgctgtacggccttatccatgcgcggtacatcctaaccaacagggggattgcccagatgctggagaaataccagcaaggagatttcggttactgcccccgtgtgtactgtgagaaccagcctatgttacccattggattatcagatattcctggcgaggcgatggtgaagctgtactgcccaaaatgcatggacgtgtatacgcctaaatccagtaggcaccatcatacggacggcgcatattttgggacggggttccctcatatgctgtttatggtccatcccgagtatcggccaaagcggcctgcgaaccagttcgttccccgcctgtatggatttaaaatacaccctatggcatatcagctgcagctgcaggcggcttcaaactttaagtcgcctgttaagacgatcagatag

SEQ ID NO: 116674 - DNA, 648 bp, Artificial Sequence
  derived and/or modified sequence
atgagcagcagcgaggaggtgagctggatcagctggttctgcggcctgagaggcaacgaattcttctgtgaggtcgacgaggactatatccaggataaattcaatctcacggggttgaacgagcaggtgcctcactaccgccaagcgctggacatgattctggatctggagcctgatgaggagcttgaagataacccgaatcagagcgatttgatcgaacaggccgctgaaatgctgtacgggctgatacatgctagatacatcttgaccaacaggggtattgcccaaatgcttgagaagtaccaacaaggggactttggttactgcccccgggtatattgcgaaaaccagccaatgctacccattggcttgagcgacatccctggcgaggccatggttaaactttactgtcccaagtgcatggatgtttacacacccaaatcttcgagacatcaccacactgatggggcttacttcggtaccgggtttccccacatgctgttcatggtgcacccagagtaccgcccaaaaaggcccgcgaatcagtttgtccctcggttgtatgggttcaagattcatccaatggcttaccagctgcaactgcaggccgcctctaacttcaaatccccggtgaaaacaatacgctag

SEQ ID NO: 116675 - DNA, 705 bp, Artificial Sequence
  derived and/or modified sequence
atggagaagtgcaagggcaccagccggatggccggcaccaccagcgcagatgtgaaaatgtcctcttcggaagaagtgtcatggatcagttggttttgtgggttgagagggaacgagttcttctgcgaggtggacgaggattacattcaggacaaatttaatctaactggcctcaacgagcaagtgcctcattacaggcaggctctcgatatgatcttagacctagagcctgatgaagaacttgaagacaatcccaatcagtctgatctgatcgagcaggccgcggaaatgttgtacgggctcatccatgcacgttatattctaactaacaggggcatcgctcagatgttagagaagtaccaacaaggtgactttggttattgcccgagagtgtactgtgaaaatcagcctatgctgcctatcggactgagtgacattcccggagaggcaatggtgaaactgtactgccccaaatgtatggacgtctacaccccaaaatccagcaggcatcatcacacagacggggcttacttcgggacggggtttccacacatgctgtttatggtccatcccgaatataggccaaagcgtccagccaaccagttcgtaccccgactctatggatttaaaatccatccgatggcttaccaactgcagctgcaggccgcgagcaattttaaatcccctgtgaaaacaattaggtag

SEQ ID NO: 116676 - DNA, 705 bp, Artificial Sequence
  derived and/or modified sequence
atggagaagtgcaagggcaccagccggatggccggcaccaccagcgctgacgtcaaaatgagttcgtccgaggaggtttcatggatctcttggttttgtggtctcagaggcaatgagtttttttgcgaggtggatgaagattatatccaggacaaatttaacctaacgggacttaacgaacaagtgccacattataggcaggccctcgacatgatcctggatcttgagcctgacgaagaacttgaggacaaccccaaccagtccgacctgatcgagcaggctgcagaaatgctgtatggtctgattcatgctcggtacatcttgaccaatcgcgggatcgctcagatgctcgaaaagtaccagcaaggcgattttggctactgtcctcgcgtgtactgcgagaatcagcctatgctgcccattggtctctccgatatcccgggcgaggccatggtcaaattgtactgtccaaaatgcatggacgtgtacactcccaaatcttcaaggcatcatcacacagatggcgcgtacttcgggaccgggtttccacatatgctattcatggtgcaccctgagtacaggcctaaaagacctgcaaaccagtttgttccgcgtctgtacgggttcaagattcatcccatggcttatcagctgcagctgcaggctgcatcgaacttcaagagccctgtaaaaacaatccgatag

SEQ ID NO: 116677 - DNA, 648 bp, Artificial Sequence
  derived and/or modified sequence
atgagcagcagcgaggaggtgagctggatcagctggttctgcggcctgcgcggcaatgaattcttttgcgaggtggacgaagactatatccaggacaagttcaacctgaccggacttaatgagcaggtgcctcattacagacaggccttggatatgatccttgacctggaacccgacgaagaacttgaggacaaccccaaccaatccgacttgattgaacaagcagctgaaatgttgtacggtctaatccatgctcgttacattctcaccaatcgcggtatcgcccaaatgctggaaaaataccagcaaggtgatttcggctattgccctcgggtgtactgtgaaaaccagccaatgttgcctatagggctttccgacataccaggagaggcgatggtaaaactgtattgtcccaaatgtatggatgtttacacaccaaagtcttcaagacatcaccacacagacggagcatatttcgggactgggttccctcacatgctttttatggtacatccagagtataggcctaaacgacctgccaaccagtttgttcctaggctatatggcttcaagattcatcctatggcctaccagctgcagcttcaagctgctagcaactttaaatcgccggtcaaaactatcagatag

SEQ ID NO: 116678 - DNA, 648 bp, Artificial Sequence
  derived and/or modified sequence
atgagcagcagcgaggaggtgagctggatcagctggttctgcggcctgagagggaacgagttcttttgcgaggtcgatgaagattatatccaggacaagtttaacctcactgggctgaatgaacaggtaccccactaccggcaggccttagacatgatccttgatctcgagccagacgaggagctggaggataaccccaaccaaagtgatcttatcgagcaggcggccgaaatgctgtatgggttaattcatgctaggtatattctgaccaataggggaattgcccagatgctggagaagtaccagcagggggacttcggatactgtccacgggtttactgtgagaaccaacctatgctccctatcgggcttagtgacatccctggagaagccatggtcaagctctactgcccaaagtgcatggacgtctatacacctaaaagttctcggcatcatcataccgatggagcatacttcggtacagggttcccacatatgctgttcatggtgcatcctgagtataggcctaaacgacctgctaaccaatttgttccacgactctacgggttcaagatacatcctatggcttaccagttacagttgcaagccgccagcaactttaagtcccccgttaaaaccataaggtag

SEQ ID NO: 116679 - DNA, 705 bp, Artificial Sequence
  derived and/or modified sequence
atggagaagtgcaagggcaccagccggatggccggcaccaccagcgccgacgtaaagatgtcatcctccgaggaggtaagctggatatcctggttctgtggacttagaggaaatgagttcttctgtgaagtggatgaagactatatacaagacaaatttaacctgacaggactcaacgagcaggtgcctcattatcgccaggcactggatatgatcctggaccttgaaccagacgaggagcttgaagacaaccccaaccaatcggatcttatcgagcaggctgccgagatgctctatggactgatccacgcacgctatatcctcaccaatcgtggaatcgcacagatgcttgaaaagtatcagcaaggggactttggatactgcccgcgtgtgtactgtgaaaaccaacctatgctgcctatcggcctatccgacatacccggggaagctatggtgaagctgtattgtcctaagtgtatggatgtatatactcctaagtcttcacgccatcatcacactgacggcgcctacttcggcaccggattccctcacatgctcttcatggttcatccagagtatcggcccaagaggcctgcaaaccagtttgtcccacgcttgtatgggttcaagatacatccgatggcataccagctgcagcttcaggccgcaagtaactttaagtccccggttaagacgatccggtag

SEQ ID NO: 116680 - DNA, 648 bp, Artificial Sequence
  derived and/or modified sequence
atgagcagcagcgaggaggtgagctggatcagctggttctgcggcctgagagggaacgagtttttttgcgaagtggatgaggattacattcaggacaagttcaatctgacaggcctcaacgagcaagtgccccattatcgccaggcacttgatatgatcttagatcttgagcccgatgaggagctcgaggacaatccaaaccaaagcgatttaatcgaacaggccgcagagatgttgtacgggctcatacacgcccgctatatccttacaaatcgcggcattgcccagatgttggagaagtatcagcagggtgatttcgggtactgcccccgggtgtactgcgaaaaccaaccaatgctgccgattggactgtcagatattcctggggaagccatggtgaaactatattgcccaaaatgcatggacgtatacacacctaaaagcagtcgacaccaccacactgacggggcgtactttggaactgggttccctcacatgctatttatggtccacccagagtaccgcccgaagagaccagcgaatcaattcgtgcctcgcctctacgggttcaagattcaccctatggcgtatcagctgcagctgcaagcagcctcgaactttaaatcccccgtgaaaacgattcggtag

SEQ ID NO: 116681 - DNA, 687 bp, Artificial Sequence
  derived and/or modified sequence
atgagcagcagcgaggaggtgagctggatcagctggttctgcggcttgagggggaatgagtttttttgcgaggtggacgaagattacatccaagataagttcaacctgacgggcctcaatgagcaggttcctcattatcggcaggcccttgatatgatactcgatctagagccggacgaggaactggaagacaatcctaaccaaagtgatctaatcgagcaggctgcagaaatgctatatggactgatccacgccagatacatactgaccaatcgcggcatagcacagatgctcgagaaataccaacagggtgacttcggatattgtccaagggtgtattgtgaaaaccagccaatgcttcctataggactaagcgatatacctggagaggcaatggtgaagctctactgtccaaaatgcatggatgtctatacaccaaagagtagtcgtcaccaccatacggacggagcgtatttcggcaccggcttccctcacatgttattcatggtgcatcccgagtaccggccgaagcgtcccgccaatcagttcgtaccgagcagctgcagccggcatcctgatgtaccactgttgccaagaaggaggcccttctgcaggatgcacttcaggctcagagaagtgtaccaccaacaactgattcctgtgcatggggaccaccacctactgtag

SEQ ID NO: 116682 - DNA, 705 bp, Artificial Sequence
  derived and/or modified sequence
atggagaagtgcaagggcaccagccggatggccggcaccaccagcgcggacgtcaaaatgagttcttcagaagaggtttcctggattagctggttttgcggcttaaggggtaacgaatttttctgtgaagtggacgaggattacatccaggacaaattcaacctcaccggattgaacgagcaggttcctcactacagacaggcactggatatgatcctggatctcgagccagacgaggaacttgaagataatccaaatcagtcggacctgatcgagcaggcggctgaaatgctgtacggcctgattcacgctcgatatatactcacaaatagaggaattgctcagatgctggaaaagtatcagcagggggactttggctattgtccccgagtgtattgtgaaaatcaaccaatgctgcctattggtctctcggatattccaggagaggctatggtcaagctgtactgtcctaaatgcatggatgtctataccccaaaaagcagtcggcaccatcacaccgatggtgcgtatttcggaaccggcttcccgcacatgcttttcatggtacaccccgagtaccggccaaagcgacctgctaaccagtttgtgccaaggttgtatggatttaaaattcatcccatggcgtaccagttgcaacttcaagctgcttctaacttcaagtctcctgttaagaccatacgttag

SEQ ID NO: 116683 - DNA, 648 bp, Artificial Sequence
  derived and/or modified sequence
atgagcagcagcgaggaggtgagctggatcagctggttctgcggccttagaggcaacgaattcttctgtgaggttgatgaagattatatacaggacaagttcaacctgacaggcttaaatgagcaggttccccactatcgacaggcactcgatatgatactcgaccttgaaccagacgaagaactggaagacaatcccaaccagtcagatttgatcgaacaggcagctgaaatgttgtatgggctgattcacgcacgctacatattgaccaatcgaggaatcgcacagatgctcgaaaagtatcaacagggggactttggctactgtcctagagtgtactgtgagaaccagcctatgctacccatcggcctaagtgacatccccggtgaggccatggtcaagctgtactgccctaaatgtatggatgtgtacacaccaaagagctctagacaccatcacacagacggagcctacttcggtaccgggttccctcacatgctgttcatggtgcaccccgagtatcggccaaaacgcccagccaatcaattcgtccccagactttatggcttcaagattcaccccatggcctatcagcttcagctgcaagccgctagtaatttcaaaagccccgtgaaaactatcaggtag

SEQ ID NO: 116684 - DNA, 648 bp, Artificial Sequence
  derived and/or modified sequence
atgagcagcagcgaggaggtgagctggatcagctggttctgcggcctcagaggtaacgaattcttttgcgaagtagatgaggactacatccaagacaaattcaacctgacaggattaaacgagcaggtgcctcattaccgccaagcgttagacatgatacttgatttagagcccgatgaagaactagaggataatccaaaccagagcgacctcatcgagcaggccgcagagatgctttacgggctgattcacgctcggtacatactcacaaataggggcatagctcagatgctcgagaaatatcagcagggagattttggatactgccctagggtgtactgtgagaatcagcccatgctgcccatcggactgagcgacatcccaggggaggccatggtgaagctgtactgccctaagtgcatggacgtctacacccccaagagtagtaggcatcatcacaccgatggagcctactttgggactggttttccccacatgctgtttatggtgcacccagagtaccgaccaaagcgacccgccaatcagttcgtcccaagactctatggtttcaagatccatcccatggcttatcagctgcaattgcaggcagcttccaactttaagtcacctgtgaaaacaatcaggtag

SEQ ID NO: 116685 - DNA, 648 bp, Artificial Sequence
  derived and/or modified sequence
atgagcagcagcgaggaggtgagctggatcagctggttctgcggcttacggggaaatgaatttttttgtgaggtggacgaagattatattcaggataagttcaatttaacaggcctgaacgaacaggtgcctcattacagacaggcattggatatgattctggatctcgagccagatgaggagctggaagataatccaaaccaaagcgacctaatcgaacaggctgctgaaatgctgtatgggctgatccacgcacgctacatcctaaccaacaggggcatcgcacaaatgctggaaaagtaccagcaaggggactttggctactgtccaagggtttattgtgagaatcaacccatgctccctattggactctcggacatcccaggtgaagccatggtcaaactgtattgtcccaagtgcatggacgtctacacgccaaagagtagtcggcaccatcacactgacggggcatactttgggactggttttccccacatgctctttatggtccatccagaatatagacctaagcgcccggccaatcagttcgttccaaggctgtacggattcaaaattcacccaatggcttatcagctccagctccaggccgcctccaatttcaaatcacccgtcaagaccatcaggtag

SEQ ID NO: 116686 - DNA, 648 bp, Artificial Sequence
  derived and/or modified sequence
atgagcagcagcgaggaggtgagctggatcagctggttctgcggcctacgaggcaatgagttcttttgcgaggtggacgaagactacatccaggataaattcaacctgaccggcctgaatgagcaggtgccccattacagacaggctctggatatgatactggatctggagcctgatgaagaactggaagacaatcctaaccaatctgacctgatcgaacaggccgcagagatgctgtatggcctgatccatgcacgatacattctcactaaccgaggcatcgcacagatgctcgagaagtatcaacagggagacttcgggtattgtcctcgggtttactgtgaaaatcagccaatgttgcctattgggctatcagatatccctggcgaagctatggtcaagctatactgtccaaaatgcatggacgtctatacacccaaatcgtcccgacatcaccacaccgatggtgcgtacttcggcaccggtttcccccacatgctgtttatggtacatccggagtaccgcccaaagcgcccagcaaatcagtttgtgccacggctttacggctttaagatacaccccatggcatatcaattgcaactgcaggctgctagcaattttaagtctccagtgaagacgatcaggtag

SEQ ID NO: 116687 - DNA, 648 bp, Artificial Sequence
  derived and/or modified sequence
atgagcagcagcgaggaggtgagctggatcagctggttctgcggcctgcggggaaatgaattcttttgtgaagtggacgaagattatattcaggataagttcaatctgaccggattgaatgaacaggtgccacactaccgccaggcactcgatatgattctcgacttggagcctgatgaagaactggaggataaccccaatcaaagtgacctgatagagcaggcagccgagatgctgtacggacttattcatgctagatatatcttgactaaccgggggattgcccagatgctggaaaagtatcagcagggtgattttggctactgcccccgagtttattgtgagaaccagcccatgctgcccatcggtctttcggatatcccgggggaagcaatggtgaagttatactgtccaaagtgtatggatgtgtacaccccaaagtcctcccgacaccaccacacagacggggcttattttggcactggtttcccccacatgctgttcatggtacatcccgagtataggcctaaacgcccggctaatcagttcgtgccgagattgtatggctttaaaatccatccaatggcatatcagcttcagctgcaggccgcaagcaatttcaagagccctgtgaagaccataagatag

SEQ ID NO: 116688 - DNA, 648 bp, Artificial Sequence
  derived and/or modified sequence
atgagcagcagcgaggaggtgagctggatcagctggttctgcggcctgcgtggcaacgagttcttttgtgaagtggatgaggattacatccaggacaagttcaatctgacagggttgaacgagcaagtgcctcactatcgccaggctcttgacatgattctcgatttggagcccgacgaggagttggaggacaatcccaatcagagcgatctgatcgagcaggccgccgagatgttatatggactgatacatgccagatacatcctgactaacaggggcattgcgcagatgctcgaaaagtaccagcaaggggactttggttattgtcccagggtttattgcgagaaccaaccaatgctgccgatcggcttatcggatattcccggtgaggcaatggtcaagctgtactgtcctaaatgtatggacgtctatactcccaaatcgagccgtcaccaccacacggacggcgcctattttggaaccggttttcctcatatgctttttatggtgcaccctgagtatcggcctaaaaggcctgcgaatcaattcgttcccaggctctatggtttcaaaatacatcccatggcttatcagcttcaacttcaggcggcttcaaactttaaatcgcccgttaagaccattaggtag

SEQ ID NO: 116689 - DNA, 648 bp, Artificial Sequence
  derived and/or modified sequence
atgagcagcagcgaggaggtgagctggatcagctggttctgcggcttaagagggaatgaattcttttgcgaggttgacgaggactatatccaagacaagtttaaccttaccggtctgaacgagcaagttcctcattataggcaagctctggatatgatcctcgatctcgaaccagatgaggaactggaagataatccaaaccaatccgatcttattgagcaggcggccgaaatgttatacggtctcatacatgcccgatatatcctgacgaatagagggatagcccagatgctggaaaagtatcaacagggcgactttggctactgcccaagggtgtattgtgagaatcaacctatgctgcccattggactgtctgacatcccaggggaagccatggttaaactatactgccctaagtgtatggacgtatacacccctaagtcctctcgacatcaccataccgacggtgcttattttggtaccggatttccccacatgctgttcatggtccatcctgagtacagaccgaagcgccccgccaatcagtttgtcccaagattatatgggtttaagattcaccccatggcataccaactgcagctgcaggcagccagcaatttcaaaagcccagtaaaaacgattaggtag

SEQ ID NO: 116690 - DNA, 648 bp, Artificial Sequence
  derived and/or modified sequence
atgagcagcagcgaggaggtgagctggatcagctggttctgcggcctcagaggcaacgaattcttctgtgaggttgacgaggattacatccaagataagttcaatctcaccggactcaacgagcaggttccacactatcggcaggcgctggatatgatccttgacctggaaccagacgaggaattggaagataaccctaaccagtcggaccttattgagcaggccgctgagatgctctatggcctaatccatgctaggtacatattaactaatagaggcatcgcccagatgcttgagaagtatcagcagggggatttcggatattgcccacgggtttactgtgagaatcagcccatgctaccaattggattgtctgacatccctggcgaggctatggttaagttgtattgtcccaagtgtatggacgtctatactcctaaatcgtcccgtcatcaccataccgatggcgcgtatttcgggaccggctttccccacatgctgttcatggtgcacccggaatatagacctaagagacccgcaaatcagtttgtcccacgactgtacggattcaaaatacaccccatggcctaccagctccaattgcaagcagctagtaactttaaatcccccgtgaagacaatcagatag

SEQ ID NO: 116691 - DNA, 648 bp, Artificial Sequence
  derived and/or modified sequence
atgagcagcagcgaggaggtgagctggatcagctggttctgcggcctcagaggcaacgaattcttttgtgaggttgatgaggattatattcaagacaagttcaatttgacagggctgaacgagcaagtcccgcactatcgtcaagcgctggatatgattctcgaccttgaacctgacgaagaactggaggacaatccaaaccagagtgacttgatcgaacaggcagctgaaatgctgtacgggctgatacatgccaggtacatcttaacaaaccgaggcattgcacagatgctcgagaagtaccagcagggcgacttcggctattgtcctagggtttactgcgagaaccagcccatgttgcctatcggcctgagcgatatacccggcgaagcaatggtgaagctgtactgccctaaatgcatggacgtttatacgcccaaaagctctcgacaccaccataccgacggcgcatacttcggcaccggatttcctcacatgttgtttatggtccaccccgaatacaggcccaaaaggcccgccaatcagttcgtgcctagactatacgggttcaagattcatccgatggcctaccagctgcagctgcaggccgctagcaacttcaagagccccgtcaaaactatcagatag

SEQ ID NO: 116692 - DNA, 648 bp, Artificial Sequence
  derived and/or modified sequence
atgagtagctctgaggaggtcagttggatttcctggttttgtgggctcagaggaaacgaatttttttgcgaggtggatgaagactacattcaggacaaattcaaccttacgggccttaatgagcaggtcccacactacagacaggcactggacatgatcctcgaccttgagcccgacgaggaactggaagacaaccctaatcagtctgatcttattgagcaggccgcagagatgctctacggtctaatccacgccagatacatcctgacaaatcggggtatcgctcagatgctggaaaagtaccagcagggggacttcggatattgccctcgggtttattgtgagaaccagcctatgctgccaattggcttgtccgacataccaggggaggcgatggtgaagctgtactgtcccaagtgtatggacgtgtatacccccaagtcatcacgccaccaccacacagacggcgcatactttggaaccggatttccacatatgctgtttatggttcatccagaatacagacccaagcgcccagccaatcagttcgtgcctcgcctgtacggattcaagatccaccccatggcatatcaactgcaactgcaggccgcttccaattttaaaagcccagtcaagaccataaggtag

SEQ ID NO: 116693 - DNA, 648 bp, Artificial Sequence
  derived and/or modified sequence
atgagcagtagcgaggaagtttcctggatcagctggttctgcggcctgcgcggaaatgaattcttctgtgaagtggatgaagactacatccaagacaagttcaatctgactggactaaatgagcaggtcccccactatcggcaggccttggacatgattctggacttagaaccagacgaagagttggaggacaatcccaaccaaagcgacttgatcgaacaggcagccgagatgctatatggccttatccacgccagatatattttaactaatcgcggaattgcccagatgcttgaaaagtatcaacagggcgattttggctattgtcccagggtatactgcgagaaccaacctatgttacccatcggcctgagcgatattccgggagaggctatggtaaaactctactgtcctaagtgcatggacgtgtatacacccaagagctcaaggcatcaccacactgacggggcatatttcggaactggctttcctcacatgctgtttatggttcaccctgagtacaggcccaaaaggcccgctaatcaatttgtaccgaggctttacggcttcaagattcaccccatggcttatcaacttcagctgcaggcagcctccaacttcaaatctcccgtaaaaaccattagatag

SEQ ID NO: 116694 - DNA, 648 bp, Artificial Sequence
  derived and/or modified sequence
atgtctagctcagaggaagtgtcctggatctcctggttttgcggattgcgaggcaacgaatttttctgcgaggtggatgaggactatatccaggacaagtttaacctaaccgggctcaatgaacaggtgcctcattatcgacaggcattggatatgattctggatttggagcctgatgaggaacttgaggataatccgaatcagagcgaccttatcgaacaggcagcggaaatgttgtacggccttatacatgcaaggtatattttaaccaaccggggaatcgctcagatgctcgaaaagtaccagcaaggcgacttcggctattgtcctagggtgtactgtgagaatcagcccatgctgcccatcgggcttagcgatattcctggtgaggccatggtgaagttatactgccccaagtgcatggatgtttatacccctaagtcaagcagacaccatcatacggacggagcttattttggtacaggcttcccacatatgttatttatggtgcaccccgaatatcggccaaaaagacctgcgaatcaatttgtccctcggctttacggcttcaagatccatccgatggcgtaccagctacagctacaggctgcaagcaatttcaagtcccctgtcaaaacgatacgctag

SEQ ID NO: 116695 - DNA, 648 bp, Artificial Sequence
  derived and/or modified sequence
atgagcagcagcgaagaagtcagttggatctcctggttctgtgggctgcgaggcaacgagttcttttgtgaggtggatgaggactatatccaagacaagtttaacctcaccggcctgaatgagcaggtcccacattatcgacaggccctcgatatgatactggatctagaacccgatgaggagctcgaggataatcccaatcagtccgatctgatcgaacaggccgctgagatgctctacggacttatccacgctagatacattttgaccaaccgtggaatcgcacaaatgctcgagaagtaccagcagggcgattttgggtactgccccagggtctactgtgaaaaccagccaatgctgcccatcggcctcagcgacatcccaggcgaagcaatggtgaagctgtactgtcctaaatgtatggacgtgtacactcctaagagtagtcgccaccaccatacagacggggcatatttcggcaccggttttccacacatgttatttatggtacatcccgagtatcggccaaagcgcccagccaaccagtttgtgccccgtctgtacggtttcaagatccatccaatggcctatcagctccaactacaggccgctagcaattttaagtccccagtgaagactattcgttag

SEQ ID NO: 116696 - DNA, 687 bp, Artificial Sequence
  derived and/or modified sequence
atgtctagcagtgaagaagtgagctggatctcatggttttgtgggctccgtgggaatgaattcttttgtgaggtggatgaggactatatccaagataaatttaatctcacaggtttgaacgaacaggtgcctcactacagacaggcccttgatatgatcctggacctggagcctgacgaagagttggaggataatccaaaccaaagcgatttgatcgagcaggcagccgagatgctctatggcctgattcacgcacggtatatcttgaccaatcgagggatcgcacagatgttggaaaaataccagcagggcgacttcggttattgtcctagggtgtactgtgaaaaccagccaatgcttcccattgggctgagcgacattcctggagaggccatggtgaaactgtactgtcctaaatgcatggacgtatacactccaaagagttcccgtcaccaccacaccgacggtgcttacttcggcaccgggtttcctcacatgctgttcatggtgcaccctgagtataggcccaagcgtccggcaaatcaatttgtgccgtcttcgtgctcacgacatccggatgttcccctactgcctcgaagacgcccattctgtcgcatgcatttccggctgagagaagtgtaccaccagcaactgattcctgtacatggcgaccatcatctgctctag

SEQ ID NO: 116697 - DNA, 648 bp, Artificial Sequence
  derived and/or modified sequence
atgtcttcttctgaggaggtctcttggatatcatggttctgtggtctaaggggcaacgaattcttctgcgaagtggatgaggattacatccaggacaagtttaatctgactggtctgaacgaacaggtgccacactacagacaggcattggacatgatactcgatctggaaccggatgaagaactggaagataacccaaatcagagcgaccttatcgagcaggccgctgagatgctatatggtctcatccacgcaagatatatcttaactaataggggcatcgcccagatgctcgagaagtatcagcagggagatttcgggtactgtcctcgtgtatactgtgaaaatcagccgatgttacctatcggtttgagtgacattcccggagaggcaatggttaaattgtattgtccaaagtgtatggatgtgtacacacccaaaagctctcggcaccaccacaccgacggagcctatttcggaacaggcttcccacacatgctgtttatggtgcaccctgaatacaggccaaagagacctgccaaccaatttgtcccccgactgtacggttttaaaattcaccctatggcttaccagctgcagcttcaagccgcaagcaacttcaaatcgcctgtgaagactattcgctag

SEQ ID NO: 116698 - DNA, 648 bp, Artificial Sequence
  derived and/or modified sequence
atgagctctagtgaggaggtttcttggatcagctggttttgtggactgcgcggaaacgagtttttttgtgaagtggacgaggactatattcaggacaagtttaacctcacaggactgaatgaacaggtcccgcactaccgccaggcgctggacatgatccttgatctggaacccgatgaagagcttgaggacaaccccaatcaaagtgacctcattgaacaagcagctgagatgctgtatggcttgatccacgcccgttatatcctgacgaatcggggtatcgcccagatgctggaaaaatatcagcagggagacttcgggtactgtcctagagtgtactgcgaaaatcagcccatgctcccaattgggctgtctgacattcccggagaggcgatggtgaagttgtactgccctaagtgcatggatgtatataccccaaaatcctcacggcatcaccataccgatggagcctactttggaacagggttcccacacatgttgttcatggtccatcccgagtacagacccaagcgcccagcaaaccaattcgtaccacggttgtatggctttaagatacacccgatggcctaccagcttcagctccaggccgctagcaattttaagtcaccagtcaaaaccattcgctag

SEQ ID NO: 116699 - DNA, 705 bp, Artificial Sequence
  derived and/or modified sequence
atggaaaaatgcaaagggactagcaggatggcaggaacgacatctgctgacgtaaaaatgtccagctcagaagaggtgtcatggatcagttggttttgcgggctacgcggaaatgagttcttttgcgaagtcgacgaagattacatccaggataagttcaatcttactggcctaaacgagcaggtcccccattataggcaagcactcgacatgatcctagatcttgaacctgatgaagagctcgaggataatcctaaccagtccgacctaattgaacaggccgcagaaatgctttacgggcttatccacgcccgttacattctgaccaaccggggtatcgcccaaatgctggagaagtaccagcagggagattttgggtactgtcccagagtctactgtgagaaccagcccatgctcccaatcgggctgtcagatattccaggtgaagcaatggtaaagctgtactgccccaagtgcatggacgtgtatactccaaagagttcccgccaccaccacactgacggagcctattttggtaccggctttcctcatatgctctttatggtgcaccctgagtatcgtcccaagcgcccagccaaccagttcgtgcctcgcctttatggtttcaagattcacccaatggcctatcagctacaactacaggctgcctctaattttaaatcgcctgtgaaaacgatccggtag

SEQ ID NO: 116700 - DNA, 648 bp, Artificial Sequence
  derived and/or modified sequence
atgtcctcttccgaagaggtctcctggatctcatggttctgcggactgagggggaacgaatttttttgcgaagtggatgaggattatatacaggacaagtttaaccttaccggattgaatgaacaggtcccccactaccgccaggcactggatatgattctggacttggagcccgatgaagagcttgaagataatcctaaccagtctgatctgatcgagcaggctgcagagatgttgtacgggctcattcacgcgcgatatatactgacgaataggggaatcgcccagatgctggagaagtaccaacagggagacttcgggtactgtcctagggtttattgcgagaatcagcctatgttgccaattggtttgtcagatattccaggtgaggccatggttaagctgtattgccctaaatgtatggacgtgtataccccaaagtcatccagacaccaccatacagatggcgcttattttggcaccggatttccacacatgctgttcatggttcatccagaatataggcctaagagaccagcaaaccaattcgtgcctagactgtatggttttaagatacatccgatggcttaccagctccagctgcaagccgcaagcaactttaagagccctgtcaagaccattagatag

SEQ ID NO: 116701 - DNA, 687 bp, Artificial Sequence
  derived and/or modified sequence
atgagtagttctgaggaggtgtcctggatatcctggttttgcggattgaggggtaacgaatttttctgcgaagtggacgaagattacattcaggataaattcaatctgaccggactcaatgaacaagtcccgcattaccgacaggccctagacatgatcctggacctagagcccgatgaggagctggaagataacccaaaccaatccgatctgattgaacaggctgcggaaatgctgtatggcctcattcatgcccgatacattctgacaaatagaggcatcgcccagatgctcgagaaatatcagcagggtgactttgggtactgtccacgtgtttactgcgagaatcagcccatgctgccaataggcctgagcgatattcctggggaagctatggtgaaactctactgccctaaatgcatggacgtgtacacacctaagtcatctcgtcaccaccatactgatggtgcttactttggaaccggcttccctcacatgttgttcatggtgcaccctgagtaccgccctaaacgcccagccaatcagttcgtgccaagcagctgcagccggcatccagacgtacccctcctgcctcgaagaaggcccttttgtcggatgcacttcaggctgcgcgaggtgtaccaccagcagctgattccagtgcatggagaccaccacctcctttag

SEQ ID NO: 116702 - DNA, 687 bp, Artificial Sequence
  derived and/or modified sequence
atgtcgtcaagcgaggaggtttcctggatctcctggttctgcggcttacgcggaaatgagttcttctgcgaggtagatgaggattatatccaagacaaattcaatctaacaggcctcaacgagcaagtgccccattaccgccaggccctggacatgattcttgacctggaacccgatgaggaattggaagataatcctaaccagagtgacttaattgagcaggctgcggaaatgctctatggtctgattcatgccagatatatacttactaaccgagggatcgcccaaatgctcgaaaagtatcagcagggcgatttcgggtattgccccagggtgtattgcgagaaccagccaatgttgccaataggtctgagcgatatccccggtgaggcgatggtgaaactgtactgtcccaaatgtatggatgtgtatacccccaagagctcccgacaccaccatacggatggcgcatactttggaactggatttccacacatgctgtttatggtgcaccccgagtatcgtcctaaaaggcccgcaaaccaatttgttcccagcagctgctccaggcaccctgatgtgcctttgctgccgagacgtcgccctttttgccgcatgcacttcaggctcagagaagtgtatcatcagcaacttattccagtgcacggtgaccaccatctgctctag

SEQ ID NO: 116703 - DNA, 648 bp, Artificial Sequence
  derived and/or modified sequence
atgtcatcaagtgaagaagtgagctggattagttggttttgtggactgagaggaaacgaattcttttgcgaggtagacgaggattatattcaggataagttcaatctgactggactcaatgagcaggtcccacactatagacaggctctagacatgatcttagacctcgaacctgatgaagagttagaggacaatcccaatcagtccgacttaatcgagcaggccgcagaaatgctctacggtctcattcacgcacgctacattctcaccaatcgaggcatcgctcaaatgttggaaaagtatcagcagggcgactttgggtactgccctcgcgtgtattgcgagaatcagcccatgctgcccatcggactgtccgatattcctggagaggccatggtaaaattgtattgcccgaaatgcatggacgtgtataccccgaagagtagcagacaccatcacaccgacggagcatatttcgggactggcttcccacatatgctgttcatggtgcatcctgagtacagacctaaacgcccagccaaccagttcgtcccgaggctctacgggttcaagattcacccaatggcttaccagctccagcttcaggcggctagcaactttaagagcccagtaaagacaatccggtag

SEQ ID NO: 116704 - DNA, 705 bp, Artificial Sequence
  derived and/or modified sequence
atggagaagtgcaagggaacctcacggatggccggaacaactagcgctgacgtgaagatgtccagtagcgaggaggtgtcttggatctcgtggttttgcggacttcggggaaatgaatttttctgcgaggtcgacgaggattatatccaggacaagtttaatctcaccggcctgaatgagcaggtccctcattacaggcaggccctcgacatgattctggatctcgaacctgacgaagagcttgaggacaatccgaaccagagcgacctgatcgaacaggccgctgagatgctgtatggcttaattcatgccagatacatcctaacaaatcgcggaattgcccaaatgctcgaaaagtaccaacagggcgattttggctactgtcctagagtctattgcgagaatcagccaatgttacccatcggcctcagcgatatccctggcgaagctatggtgaaactgtattgtccaaaatgtatggatgtttacacgccgaagtcttcccgccaccaccatacagacggtgcgtacttcgggacaggatttccacacatgctgtttatggttcaccccgagtacaggccgaagcggcctgctaatcagtttgtaccacgactttacggatttaaaatccaccctatggcgtatcaactgcagctgcaggcagcatctaattttaaaagcccggtcaaaactatccggtag

SEQ ID NO: 116705 - DNA, 648 bp, Artificial Sequence
  derived and/or modified sequence
atgtccagttctgaagaagtgagttggatctcatggttctgcggactacgaggaaacgaatttttctgcgaggtggatgaagactacatccaggataaattcaacctcactggtcttaacgaacaggtgcctcactatcggcaagccctggatatgattctggatttggagccagatgaagaactggaggataatcccaatcagtccgacctgatcgaacaggcagctgagatgttatatggactaatacacgccaggtatatcctcaccaatcgcggaattgctcagatgcttgagaaataccaacagggtgacttcgggtattgtccaagggtttactgcgagaatcagccaatgttgccgatcgggctctcagatatccctggggaggcaatggttaagctgtactgcccgaagtgtatggatgtttacactcctaaatcaagtcggcaccatcacaccgatggcgcatattttggtacaggattcccgcatatgctctttatggttcaccctgagtacaggcctaaacgaccagcgaaccaattcgtgcccaggctgtatgggtttaagattcaccctatggcctatcagctgcagctgcaggccgcaagtaatttcaagtcacctgtgaaaaccatccgctag

SEQ ID NO: 116706 - DNA, 705 bp, Artificial Sequence
  derived and/or modified sequence
atggagaagtgtaagggcacaagcagaatggctggcaccacttcggccgacgttaaaatgagtagctcggaagaagtgagctggattagctggttttgcgggctgcgcggtaatgaattcttctgtgaagtcgacgaggattatatccaggataagttcaacctcaccggcctgaatgagcaggtcccgcattataggcaggccctagatatgattcttgatctggaacctgacgaagagcttgaggataaccctaatcaaagcgatctcattgagcaagccgcagaaatgctgtatgggctgatacatgctagatacattttgaccaataggggcatcgctcagatgttagaaaagtaccagcagggcgatttcggctactgcccgagagtatattgtgagaatcaaccaatgctacccatcggcctttctgacataccgggagaggccatggtgaaactgtattgccccaaatgcatggacgtttacactcctaaatcttcaaggcaccaccataccgacggagcatattttggcacaggtttcccccacatgttattcatggtacatccagagtatcgtcctaagagaccggcaaatcagttcgtgccacggctctacggtttcaaaattcatccaatggcttaccaactgcagctgcaggccgcttccaactttaagtcccctgtgaaaacgattcggtag

SEQ ID NO: 116707 - DNA, 705 bp, Artificial Sequence
  derived and/or modified sequence
atggagaagtgcaagggcacctctagaatggcgggaacgacgtccgccgatgtgaaaatgtccagtagtgaggaggtgtcctggatctcttggttctgcggtctgcgaggaaatgagttcttttgcgaagtggacgaggactatattcaggacaagttcaatctcacaggtctcaacgagcaagtgccccactaccggcaggccttggatatgattttagatctcgagcccgacgaagagttggaggacaaccctaatcagtctgacctgatagagcaggccgctgagatgttgtacggcctgattcatgccagatacatcctaacaaatcgcggtatagcgcagatgctggagaaataccagcagggggatttcggttattgtccccgagtctattgtgagaatcagccgatgttacctatcgggctgagcgacatccccggagaggccatggtgaagctgtactgccccaaatgcatggacgtttacacccctaaatccagtaggcaccaccatacggacggtgcttatttcgggacgggatttccgcatatgctctttatggtccaccccgagtacaggcccaagaggcccgctaatcagttcgtccctaggctctacggcttcaaaatccatccgatggcctaccagcttcagctgcaagctgcatctaactttaagtcacctgtgaagacgattcgatag

SEQ ID NO: 116708 - DNA, 648 bp, Artificial Sequence
  derived and/or modified sequence
atgtcgagttcagaggaagtatcctggatttcttggttctgtgggctccggggtaacgagttcttctgcgaagtagacgaggactatattcaagacaagttcaacctcacaggcctgaacgaacaggtgccacactaccggcaggctctggacatgatcctcgatctggagcctgacgaagaactggaagacaatcccaaccagagcgacttaattgagcaggcggctgaaatgctgtatgggcttatccacgcccgatatatcctgacaaatcggggaatcgctcagatgctggaaaagtatcagcagggcgattttgggtattgtccccgagtgtattgcgagaaccagccaatgctacccatcggactatccgatatccctggtgaagctatggtgaaattgtattgtcccaaatgtatggacgtttatacgccgaagagcagccggcatcaccacacagacggagcgtattttgggacgggatttccccatatgctctttatggtgcaccctgagtaccggccaaaacggccagctaaccagttcgtaccaagactgtacggattcaagattcaccctatggcgtatcaactccagctgcaggccgcttcgaactttaaaagccctgtgaaaaccattaggtag

SEQ ID NO: 116709 - DNA, 648 bp, Artificial Sequence
  derived and/or modified sequence
atgtcttccagcgaagaagtgtcctggattagctggttctgtggcctgcggggaaacgaattcttttgtgaagttgatgaagactacatccaggataaattcaatctcacaggactgaatgagcaggtcccgcattaccgtcaagctctcgacatgatcctagacctcgagcctgacgaggagctggaagacaaccctaaccaatctgacctgattgaacaggctgcagagatgctatacggactgatccatgcgaggtatatcctgactaaccggggtattgcgcagatgctggagaagtatcagcagggagatttcggctactgccccagggtgtattgcgagaatcagcccatgctgcctatcgggctgagcgatattcccggagaggcgatggtgaaactgtactgccccaagtgcatggacgtctacactcccaaaagttctcggcaccaccacactgacggggcatatttcggcactggctttccgcacatgctgttcatggtgcacccagaatatcgcccaaaacgcccagctaaccagtttgtcccacgtctttacggttttaaaatccacccgatggcctaccagcttcagctgcaggccgcttctaacttcaaaagtcccgtcaagacaattagatag

SEQ ID NO: 116710 - DNA, 705 bp, Artificial Sequence
  derived and/or modified sequence
atggagaaatgtaagggcacaagcagaatggccggaacgaccagcgctgatgtgaagatgtcgagctctgaggaagtttcctggatctcctggttttgcgggctccgcggaaacgagttcttctgcgaggtggacgaagactacatacaggataaattcaacctgactggattaaacgaacaggtaccacattatcggcaggccttggatatgattctcgacctagaacccgacgaggagctggaggacaaccccaatcaatccgatctgatcgagcaagctgccgaaatgctttatgggttgatacacgccaggtatatcttaaccaatcgtgggattgcccagatgctggagaaataccagcaaggcgactttggctactgcccgagagtgtattgtgagaaccaacctatgctcccgatcggcttgtctgacatccccggagaggctatggtgaaattgtactgccctaagtgcatggatgtgtatacgcctaagtcctcccgccaccaccatacggatggcgcttactttggtacagggtttccgcacatgttattcatggtacaccccgaatacaggcccaagcgtcccgctaaccagttcgtgcccagactttatggcttcaaaattcatcctatggcgtaccagctgcagttgcaggcagctagcaactttaagtccccagtgaagactatcaggtag

SEQ ID NO: 116711 - DNA, 648 bp, Artificial Sequence
  derived and/or modified sequence
atgagtagcagtgaggaagtttcatggatcagttggttttgtggactaagggggaatgagtttttctgtgaggtcgacgaggactatattcaggataagttcaacctgactggcctgaacgagcaagtgccacactataggcaggccctggatatgatcctggatctggaacctgatgaggaattggaagataatcctaatcagagcgaccttatcgaacaggccgctgaaatgttatacggcctgattcacgctaggtatatactgactaacaggggtattgcacaaatgttggagaagtaccaacagggggactttggctattgcccgcgagtctattgtgagaaccagccaatgctgcccattggcctgagcgacattcctggtgaagccatggtgaaactatactgtccgaagtgcatggacgtgtacactcccaaatctagtcgacaccatcacacagacggagcttacttcggcacaggattcccacatatgctgttcatggttcaccccgagtaccgccctaaacggcctgctaatcagttcgtgccacgactgtacggctttaaaatccatccaatggcataccaattgcagctgcaggcagcatctaattttaaaagtccagtcaagaccatccgatag

SEQ ID NO: 116712 - DNA, 687 bp, Artificial Sequence
  derived and/or modified sequence
atgtccagcagtgaggaggttagctggatctcctggttctgcggactgagaggcaatgagtttttctgtgaggtcgacgaagattatatccaggacaaattcaatttgacgggcttgaacgagcaggtgccacactaccgtcaagctctcgatatgattctagacctggagccagacgaagagctcgaggacaatccaaatcagtcagacctgattgagcaagccgctgagatgctctacgggcttattcacgctcgttatatcttaacaaacagagggattgcacaaatgctcgagaagtaccagcaaggggacttcgggtactgtcccagggtgtactgtgagaatcaaccaatgctgccgatcgggctcagtgatatcccaggagaagccatggtgaaattgtactgtccaaaatgcatggacgtctacactcctaaaagctctcgacaccatcataccgacggggcttactttggcacaggatttccacacatgctgtttatggtgcacccagaataccggcctaaaaggcccgctaaccagttcgtcccatctagttgttctaggcaccctgacgttcccttgctgccaagacgcagacctttctgtaggatgcactttcggttaagggaagtgtaccaccagcagctcatccctgtgcacggggaccatcatctgctctag

SEQ ID NO: 116713 - DNA, 705 bp, Artificial Sequence
  derived and/or modified sequence
atggagaaatgcaagggtacctcaagaatggctggaactactagtgccgacgttaaaatgtcgtcctctgaagaagtttcctggatctcctggttctgcggactaagagggaacgaatttttttgcgaggttgatgaagattatatccaagacaaattcaacctaacaggcctcaacgaacaggtgccccactaccggcaagccttggatatgatactggatctggagcccgacgaagaattggaagataatcccaaccaatccgatcttatcgagcaggcggctgaaatgctctacgggctgatccacgcaaggtatattcttactaatagagggatcgcccagatgctcgagaaatatcaacagggcgattttggctattgtcctcgcgtctactgtgagaaccagccgatgttgccaattggactgtccgacatcccaggtgaggcgatggtgaaactgtactgtccaaaatgcatggatgtttacacaccaaagtcgtcaaggcaccatcacaccgacggagcctactttggcaccggcttcccccatatgctcttcatggtccacccagagtatcggcctaagagacctgcgaatcagttcgtgccacgcctatacggctttaaaatccacccaatggcttatcaattgcagctgcaggctgcctccaactttaaatctcccgtgaaaacgataaggtag

SEQ ID NO: 116714 - DNA, 648 bp, Artificial Sequence
  derived and/or modified sequence
atgtcaagtagcgaagaagtctcttggatctcctggttttgtggtctccgagggaacgagtttttctgcgaggtggatgaggactacattcaggacaaatttaacctaaccggtttgaatgagcaggtgcctcattacaggcaggcactggacatgattttggatctggaacctgatgaagagcttgaagataatcccaatcagagcgacctgatcgagcaagcggcagaaatgttgtacggcctgatacacgcacgttacatactgacaaaccgtgggatagctcagatgctcgagaagtaccagcagggtgacttcgggtactgtccacgcgtttactgcgaaaaccagccaatgctgcctataggtttgtctgatataccgggagaggccatggtgaagctctattgcccaaagtgtatggatgtgtatacaccaaagtcttcgaggcaccaccacacagacggggcttattttggcactggattccctcatatgttattcatggtgcacccagagtacaggccaaaacgtcccgcaaatcagtttgttccacggctgtatgggttcaaaatccatcccatggcttatcaactgcagttgcaggctgcttctaatttcaaaagcccagtgaagactattaggtag

SEQ ID NO: 116715 - DNA, 648 bp, Artificial Sequence
  derived and/or modified sequence
atgtcctccagtgaagaggtgtcttggatcagttggttctgcggcctccgcggtaacgagttcttttgtgaagtggacgaggactatatacaggacaagtttaatctgaccggactgaacgaacaggtacctcactaccggcaggctctcgatatgatcctagacttagagcccgacgaagaactggaggataacccaaaccagtctgacctgattgagcaagcggctgaaatgctatatggccttattcacgccagatatatactcactaacaggggtattgcgcagatgctagagaaataccagcagggcgactttggctactgccctagggtgtactgtgagaaccagccaatgctccctattgggttaagcgacatcccaggtgaagctatggtgaagctctattgccctaagtgcatggacgtgtatacacccaaatcttcacgccaccaccacaccgacggggcatactttggcactggcttcccccacatgttgtttatggtgcaccctgagtataggcccaagcgaccagcaaaccagttcgtgcccaggctgtatggtttcaaaatccatccgatggcctatcagctgcagctgcaggcagcaagcaacttcaaatctcccgtaaagacaatccggtag

SEQ ID NO: 116716 - DNA, 648 bp, Artificial Sequence
  derived and/or modified sequence
atgagttcttcagaggaggtcagctggatttcatggttttgcggcctccggggaaatgagttcttctgcgaagttgatgaggactatatccaggacaaatttaacctgactgggctgaatgagcaggttccccattacagacaggctctggacatgattctggacttggagcccgacgaagagttagaggacaaccctaaccagtccgatcttatcgagcaggccgcagagatgctatacggtctcatccacgctagatatatcttgacaaatcggggaatcgcccagatgctggagaagtatcagcagggagattttggatactgccccagagtgtactgcgagaatcaacccatgcttcctatcggtttgagtgacattccgggagaggcaatggtgaaactttactgccctaaatgcatggacgtgtatacgcctaaaagctcccgccatcaccacacagacggcgcttattttggaaccggtttcccacacatgcttttcatggtccaccctgagtaccgaccaaagcgcccagccaaccagttcgtgccgaggctctacgggttcaaaattcaccctatggcctatcagctgcagctgcaagccgctagcaatttcaagtcacctgtcaaaactatccggtag

SEQ ID NO: 116717 - DNA, 648 bp, Artificial Sequence
  derived and/or modified sequence
atgagttcatcagaagaggtcagttggatcagctggttctgcggactgaggggcaacgaatttttttgcgaagttgacgaggactacattcaggataaatttaacttaacgggtcttaatgagcaggttccacattatagacaggccctcgacatgatcctcgacctggagccagacgaggagttggaggataatcccaatcagagcgacctgatcgagcaggctgcagaaatgctctatggcctgatccacgccaggtatatcctcactaaccgtggcattgcccagatgctcgagaaatatcagcagggtgacttcggatactgtccccgagtgtattgtgagaatcagcccatgctgccgatagggctgagcgacattccgggtgaggccatggtgaagctgtattgcccaaagtgcatggacgtttatacacccaagtcttccagacaccaccatacagacggagcttatttcggcactggtttcccccacatgctgttcatggtgcaccctgaatatcggccaaaacggcctgccaaccagttcgtccctcgtctgtatggctttaagattcatcccatggcttaccagctacaactgcaggctgcctccaactttaagagccctgtaaagactatccggtag

SEQ ID NO: 116718 - DNA, 648 bp, Artificial Sequence
  derived and/or modified sequence
atgtccagttccgaagaggtatcctggatctcttggttttgcgggctccgtgggaacgaattcttctgtgaagtggacgaagactacattcaagataaatttaatctcacgggccttaacgaacaggtgcctcactatcggcaggctcttgacatgattctggacctggaaccagatgaagagctggaagataaccctaaccaaagcgacttgatcgaacaggccgctgaaatgctttacggtcttattcacgcacgatatattctgaccaatcgaggcatcgctcagatgttggagaagtatcagcagggggactttggttattgtcccagggtttattgtgagaaccagcctatgctgccgattgggttaagtgacatcccgggtgaagccatggttaagttgtactgcccaaagtgcatggacgtgtatactcccaaaagtagtcgtcaccaccacactgacggagcctattttggcactgggttcccccatatgctctttatggtccacccagaatatcgacctaagaggccggctaaccagttcgtgccccgactttacggctttaaaatccaccctatggcgtaccagctgcagctccaggctgcttccaactttaaatccccagtaaagaccattagatag

SEQ ID NO: 116719 - DNA, 648 bp, Artificial Sequence
  derived and/or modified sequence
atgtcctcttctgaggaagtgagttggatttcttggttctgtgggctgcgtggtaacgagtttttttgcgaggtggatgaggattacattcaggataagttcaacttaacagggctgaatgagcaggtcccccattacagacaggctctggacatgattcttgatctggagcccgacgaggagctggaagacaatcctaaccagagtgacttgatcgagcaggccgcagaaatgctctacggcctgatacacgcacggtatattttgacaaaccgaggaatagctcagatgctggaaaagtatcagcagggagattttggctattgccctcgtgtctattgcgaaaatcagcctatgttgcccatcggtctgagcgatatccccggtgaagccatggttaaactgtattgtccaaagtgcatggacgtgtatacacctaaatcttcacggcatcaccacacagatggcgcttatttcggtactggcttcccccacatgttgtttatggtgcatccggagtatcgcccaaagcgtccggctaaccaattcgtgccaaggctatatggcttcaaaattcacccaatggcctaccagttgcaacttcaggccgcatcaaattttaagtctcccgtcaagactataaggtag

SEQ ID NO: 116720 - DNA, 648 bp, Artificial Sequence
  derived and/or modified sequence
atgagttcatctgaggaagtatcttggattagctggttctgtggattgcgagggaatgagttcttctgcgaagtggacgaggactatatccaggacaagtttaaccttaccggtctgaacgaacaggtgccgcattatcggcaggcactagatatgatcctggatcttgagccagatgaagagcttgaggacaacccaaatcaatctgaccttatcgagcaggccgcagagatgctgtacggcctcatacacgcaaggtatattcttacaaaccggggaattgcccagatgctcgaaaagtatcagcagggagacttcgggtattgtccacgggtgtactgcgagaaccagcccatgctgcctataggattgagcgacatccccggtgaggctatggtaaaactctattgccctaaatgcatggacgtgtacacacctaagtcatcccgtcaccaccataccgacggtgcctattttggaaccggatttcctcatatgctgttcatggtgcacccagagtaccggcctaagagaccggcaaaccagtttgtgccccgactctacggatttaaaatccatccaatggcttaccaactccaactccaggctgcctccaattttaaatcacctgttaaaactatacggtag

SEQ ID NO: 116721 - DNA, 648 bp, Artificial Sequence
  derived and/or modified sequence
atgagttccagcgaggaagtgagttggatctcttggttttgcggtcttcggggaaatgaattcttctgcgaggtggatgaggactacattcaggataagttcaaccttaccggcctgaatgagcaggtgccccactatcgccaagcgctggacatgatcctcgacctggagcctgacgaagaactagaggataacccgaaccagtcagacctgattgaacaggcggctgagatgttgtacggtctgatccacgcacgttacatactaacaaacagaggcattgcccaaatgctggaaaaatatcagcagggagacttcggctattgccctcgcgtgtactgcgaaaatcagccaatgttgccgattgggttatctgacataccgggagaagccatggttaaactatactgcccaaagtgcatggacgtgtacacaccaaagtcaagcaggcaccaccatacagatggagcatactttggtacagggtttccgcacatgctttttatggtacaccctgaatacaggccaaaacggccagctaaccagttcgttccgcgattatatggattcaagatccatcccatggcttatcagctgcagttgcaagcagcatcaaactttaaatccccggttaaaaccatcagatag

SEQ ID NO: 116722 - DNA, 648 bp, Artificial Sequence
  derived and/or modified sequence
atgagctccagcgaggaggtttcctggatttcttggttctgtggacttcggggtaacgaattcttttgtgaggtggacgaggactacattcaggacaagttcaacttaacaggtctcaatgaacaagtgccacactatcgccaggccttggacatgattctggacttagagcccgacgaggaacttgaggataaccctaatcagtcagaccttatcgaacaagcagccgagatgctatacggactgatccatgccaggtacattctgacaaacagagggatcgctcagatgctggaaaagtaccagcagggggatttcggttattgtcctagggtatattgtgagaaccaacctatgctgcctattggactgagtgatattccaggcgaggctatggtaaagctctattgtcctaaatgcatggacgtctacacccccaaaagcagcaggcaccatcatacagacggggcttattttggcaccggattcccccacatgctgtttatggtacatcctgaatatcggccaaagcgaccagccaatcagttcgtaccacggctatacgggtttaagatccatcccatggcctatcagctgcagctccaggctgcgtccaactttaaatccccggttaagacaattcgctag

SEQ ID NO: 116723 - DNA, 908 bp, Artificial Sequence
  derived and/or modified sequence
ggaggaagcgaccaggtccggcacgaaggagggagaggtggcctgaggagcggaggggggatgtgtggattccggtgaaagggacctgacaatcgcccccaacccctgacgtgaagatgagcagctcagaggaggtgtcctggatttcctggttctgtgggctccgtggcaatgaattcttctgtgaagtggatgaagactacatccaggacaaatttaatcttactggactcaatgagcaggtccctcactatcgacaagctctagacatgatcttggacctggagcctgatgaagaactggaagacaaccccaaccagagtgacctgattgagcaggcagccgagatgctttatggattgatccacgcccgctacatccttaccaaccgtggcatcgcccagatgttggaaaagtaccagcaaggagactttggttactgtcctcgtgtgtactgtgagaaccagccaatgcttcccattggcctttcagacatcccaggtgaagccatggtgaagctctactgccccaagtgcatggatgtgtacacacccaagtcatcaagacaccatcacacggatggcgcctacttcggcactggtttccctcacatgctcttcatggtgcatcccgagtaccggcccaagagacctgccaaccagtttgtgcccaggctctacggtttcaagatccatccgatggcctaccagctgcagctccaagccgccagcaacttcaagagcccagtcaagacgattcgctgattccctcccccacctgtcctgcagtctttgacttttcctttcttttttgccaccctttcaggaaccctgtatggtttttagtttaaattaaaggagtcgttatcgtggtgggaatatgaaataaagtagaagaaaaggccatga

SEQ ID NO: 116724 - DNA, 936 bp, Artificial Sequence
  derived and/or modified sequence
tgtggattccggtgaaagggacctgacaatcgcccccaacccgtgagaaaaggaggagcccagttcttgcttgagaatgataaacttggaaacccttgggaaaggcgtgggggtcatgcagagacttgtattgctgacgtgaagatgagcagctcagaggaggtgtcctggatttcctggttctgtgggctccgtggcaatgaattcttctgtgaagtggatgaagactacatccaggacaaatttaatcttactggactcaatgagcaggtccctcactatcgacaagctctagacatgatcttggacctggagcctgatgaagaactggaagacaaccccaaccagagtgacctgattgagcaggcagccgagatgctttatggattgatccacgcccgctacatccttaccaaccgtggcatcgcccagatgttggaaaagtaccagcaaggagactttggttactgtcctcgtgtgtactgtgagaaccagccaatgcttcccattggcctttcagacatcccaggtgaagccatggtgaagctctactgccccaagtgcatggatgtgtacacacccaagtcatcaagacaccatcacacggatggcgcctacttcggcactggtttccctcacatgctcttcatggtgcatcccgagtaccggcccaagagacctgccaaccagtttgtgcccaggctctacggtttcaagatccatccgatggcctaccagctgcagctccaagccgccagcaacttcaagagcccagtcaagacgattcgctgattccctcccccacctgtcctgcagtctttgacttttcctttcttttttgccaccctttcaggaaccctgtatggtttttagtttaaattaaaggagtcgttatcgtggtgggaatatgaaataaagtagaagaaaaggccatga

SEQ ID NO: 116725 - DNA, 948 bp, Artificial Sequence
  derived and/or modified sequence
cttccccaccctccctaatttccactccccccaccccacttcgcctgccgcggtcgggtccgcggcctgcgctgtagcggtcgccgccgttccctggaagtagcaacttccctaccccaccccagtcctggtccccgtccagccgctgacgtgaagatgagcagctcagaggaggtgtcctggatttcctggttctgtgggctccgtggcaatgaattcttctgtgaagtggatgaagactacatccaggacaaatttaatcttactggactcaatgagcaggtccctcactatcgacaagctctagacatgatcttggacctggagcctgatgaagaactggaagacaaccccaaccagagtgacctgattgagcaggcagccgagatgctttatggattgatccacgcccgctacatccttaccaaccgtggcatcgcccagatgttggaaaagtaccagcaaggagactttggttactgtcctcgtgtgtactgtgagaaccagccaatgcttcccattggcctttcagacatcccaggtgaagccatggtgaagctctactgccccaagtgcatggatgtgtacacacccaagtcatcaagacaccatcacacggatggcgcctacttcggcactggtttccctcacatgctcttcatggtgcatcccgagtaccggcccaagagacctgccaaccagtttgtgcccaggctctacggtttcaagatccatccgatggcctaccagctgcagctccaagccgccagcaacttcaagagcccagtcaagacgattcgctgattccctcccccacctgtcctgcagtctttgacttttcctttcttttttgccaccctttcaggaaccctgtatggtttttagtttaaattaaaggagtcgttatcgtggtgggaatatgaaataaagtagaagaaaaggccatga

SEQ ID NO: 116726 - DNA, 908 bp, Artificial Sequence
  derived and/or modified sequence
ggaggaagcgaccaggtccggcacgaaggagggagaggtggcctgaggagcggaggggggatgtgtggattccggtgaaagggacctgacaatcgcccccaacccctgacgtgaagatgagcagctcagaggaggtgtcctggatttcctggttctgtgggctccgtggcaatgaattcttctgtgaagtggatgaagactacatccaggacaaatttaatcttactggactcaatgagcaggtccctcactatcgacaagctctagacatgatcttggacctggagcctgatgaagaactggaagacaaccccaaccagagtgacctgattgagcaggcagccgagatgctttatggattgatccacgcccgctacatccttaccaaccgtggcatcgcccagatgttggaaaagtaccagcaaggagactttggttactgtcctcgtgtgtactgtgagaaccagccaatgcttcccattggcctttcagacatcccaggtgaagccatggtgaagctctactgccccaagtgcatggatgtgtacacacccaagtcatcaagacaccatcacacggatggcgcctacttcggcactggtttccctcacatgctcttcatggtgcatcccgagtaccggcccaagagacctgccaaccagtttgtgcccaggctctacggtttcaagatccatccgatggcctaccagctgcagctccaagccgccagcaacttcaagagcccagtcaagacgattcgctgattccctcccccacctgtcctgcagtctttgacttttcctttcttttttgccaccctttcaggaaccctgtatggtttttagtttaaattaaaggagtcgttattgtggtgggaatatgaaataaagtagaagaaaaggccatga

SEQ ID NO: 116727 - DNA, 2487 bp, Artificial Sequence
  derived and/or modified sequence
cttcgcctgccgcggtcgggtccgcggcctgcgctgtagcggtcgccgccgttccctggaagtagcaacttccctaccccaccccagtcctggtccccgtccagccgctgacgtgaagatgagcagctcagaggaggtgtcctggatttcctggttctgtgggctccgtggcaatgaattcttctgtgaagtggatgaagactacatccaggacaaatttaatcttactggactcaatgagcaggtccctcactatcgacaagctctagacatgatcttggacctggagcctgatgaagaactggaagacaaccccaaccagagtgacctgattgagcaggcagccgagatgctttatggattgatccacgcccgctacatccttaccaaccgtggcatcgcccagatgttggaaaagtaccagcaaggagactttggttactgtcctcgtgtgtactgtgagaaccagccaatgcttcccattggcctttcagacatcccaggtgaagccatggtgaagctctactgccccaagtgcatggatgtgtacacacccaagtcatcaagacaccatcacacggatggcgcctacttcggcactggtttccctcacatgctcttcatggtgcatcccgagtaccggcccaagagacctgccaaccagtttgtgcccagttcctgttcccgacatccggacgtgccacttctgcctcgtagaagacccttctgtaggatgcatttcaggctcagagaagtgtaccatcagcagctcatccctgtgcatggtgatcaccatctattatgatgtcaaggttcgcttcatcgttcgaggctgtggacagtacatttcctaccgctgccaagaaaaacgcaacacctactttgcagagtactggtatcaggcccagtgctgtcagtacgattattgcaactcctggtcaagcccccaactccagagctctctgccggagccccatgacaggcccctggccctgcctctgtctgactcccagattcagtggttctaccaggccctgaacctctccctgcccctccccaatttccatgctgggacggagcctgatggcctggaccccatggtcacactgtccctgaacctgggcttgtcttttgctgagctgtgccgcatgtacttgttcctcaatagttcaggacttttggttcttccccaggctggactcttgacacctcacccttcctgaattccacagtgcaaatatctttctgtaacaccctcagcatcctgcactgccctctctgaaaacacccacattctttggtcactgtgatttcttaggcctccgtctgttgtaccactagcatctatatgacttttgtgtaattttctctcttgaactctggtgctgtttttttgtttgtttgagacaaagtctcgctctgtcacccagggtggagtgcagtggcatgatctctgctcactacaacctccacctcccgggttccagcgattctcctgcctcagcctcccgagtagctgggactacaggcgtgcaccaccacgcctggctaattttttgtatttttagtagagacggggtttcaccatgttggtcaggctggtctcgaactcctgacctcgtaatctgccctcctcgacctcccaaagtgccgggattacaggtgtgagccactgtgcctggctgagctctggtgctgttcttccccctagaaaagaatctctagtgtggattctgcccagacaggctgacctgagaaaggcacagtggttcctccattccttccccatcatctgagtgttccagtatcccccatccctctcaatccagtcacctgcctattgacatctagctctgtttcccctgtcttgtccatgtctctaagacccagtaccagactgaactagcagcaagaaggacgaggaggccgggcatggtggctcacgccggtaatcccagcactttgggaggccgaggtgggcggatcacttgagattgggagtttgagaccagcctggccaacatggtaaaacccgctctctattaaaaatagaaaaatcagctgggtgtggtggcacacctctgtaatcccagctactcaggaggctgagacaggagaatcacttgaacccgggaggcagaggttgcagtgagccgagatcgcgccactgcactccagcctgggtgacacagtgagactccgtctccaaaaaaaaggatgaggaatagaattctgtgcagatgtcctgacttggcaattttgtgtccctgcctcactgtctccaccaacccccgcctgtcctagtgttgttctgcctcctgtcctctcttgctctcttgtcagtctctggcttcctcggccccatttcacttcactgagtcctgacacccatctccctaggggcctgtgagaggagagggaagggtctgttctgctcagctccatgtcccccattttcctccacaataaactgggactgggctaaaa

SEQ ID NO: 116728 - DNA, 948 bp, Artificial Sequence
  derived and/or modified sequence
cttccccaccctccctaatttccactccccccaccccacttcgcctgccgcggtcgggtccgcggcctgcgctgtagcggtcgccgccgttccctggaagtagcaacttccctaccccaccccagtcctggtccccgtccagccgctgacgtgaagatgagcagctcagaggaggtgtcctggatttcctggttctgtgggctccgtggcaatgaattcttctgtgaagtggatgaagactacatccaggacaaatttaatcttactggactcaatgagcaggtccctcactatcgacaagctctagacatgatcttggacctggagcctgatgaagaactggaagacaaccccaaccagagtgacctgattgagcaggcagccgagatgctttatggattgatccacgcccgctacatccttaccaaccgtggcatcgcccagatgttggaaaagtaccagcaaggagactttggttactgtcctcgtgtgtactgtgagaaccagccaatgcttcccattggcctttcagacatcccaggtgaagccatggtgaagctctactgccccaagtgcatggatgtgtacacacccaagtcatcaagacaccatcacacggatggcgcctacttcggcactggtttccctcacatgctcttcatggtgcatcccgagtaccggcccaagagacctgccaaccagtttgtgcccaggctctacggtttcaagatccatccgatggcctaccagctgcagctccaagccgccagcaacttcaagagcccagtcaagacgattcgctgattccctcccccacctgtcctgcagtctttgacttttcctttcttttttgccaccctttcaggaaccctgtatggtttttagtttaaattaaaggagtcgttattgtggtgggaatatgaaataaagtagaagaaaaggccatga

SEQ ID NO: 116729 - DNA, 936 bp, Artificial Sequence
  derived and/or modified sequence
tgtggattccggtgaaagggacctgacaatcgcccccaacccgtgagaaaaggaggagcccggttcttgcttgagaatgataaacttggaaacccttgggaaaggcgtgggggtcatgcagagacttgtattgctgacgtgaagatgagcagctcagaggaggtgtcctggatttcctggttctgtgggctccgtggcaatgaattcttctgtgaagtggatgaagactacatccaggacaaatttaatcttactggactcaatgagcaggtccctcactatcgacaagctctagacatgatcttggacctggagcctgatgaagaactggaagacaaccccaaccagagtgacctgattgagcaggcagccgagatgctttatggattgatccacgcccgctacatccttaccaaccgtggcatcgcccagatgttggaaaagtaccagcaaggagactttggttactgtcctcgtgtgtactgtgagaaccagccaatgcttcccattggcctttcagacatcccaggtgaagccatggtgaagctctactgccccaagtgcatggatgtgtacacacccaagtcatcaagacaccatcacacggatggcgcctacttcggcactggtttccctcacatgctcttcatggtgcatcccgagtaccggcccaagagacctgccaaccagtttgtgcccaggctctacggtttcaagatccatccgatggcctaccagctgcagctccaagccgccagcaacttcaagagcccagtcaagacgattcgctgattccctcccccacctgtcctgcagtctttgacttttcctttcttttttgccaccctttcaggaaccctgtatggtttttagtttaaattaaaggagtcgttattgtggtgggaatatgaaataaagtagaagaaaaggccatga

SEQ ID NO: 116730 - DNA, 1061 bp, Artificial Sequence
  derived and/or modified sequence
ccccacaatgcccttcgccttcctcaacgtggcccccgctccaagcccattttctggagccaggaatccactctgtgggttaggaaaggccctcaggaggcggagggaaacctgtggaatgccgagaagccgtgtaatgaaataacgtcacgcctgcccctcaccattactctgaccagggttcgaaggtcacacttagagcctaaggggaaatggagaagtgcaaagggacgagcagaatggctggcaccacctcagctgacgtgaagatgagcagctcagaggaggtgtcctggatttcctggttctgtgggctccgtggcaatgaattcttctgtgaagtggatgaagactacatccaggacaaatttaatcttactggactcaatgagcaggtccctcactatcgacaagctctagacatgatcttggacctggagcctgatgaagaactggaagacaaccccaaccagagtgacctgattgagcaggcagccgagatgctttatggattgatccacgcccgctacatccttaccaaccgtggcatcgcccagatgttggaaaagtaccagcaaggagactttggttactgtcctcgtgtgtactgtgagaaccagccaatgcttcccattggcctttcagacatcccaggtgaagccatggtgaagctctactgccccaagtgcatggatgtgtacacacccaagtcatcaagacaccatcacacggatggcgcctacttcggcactggtttccctcacatgctcttcatggtgcatcccgagtaccggcccaagagacctgccaaccagtttgtgcccaggctctacggtttcaagatccatccgatggcctaccagctgcagctccaagccgccagcaacttcaagagcccagtcaagacgattcgctgattccctcccccacctgtcctgcagtctttgacttttcctttcttttttgccaccctttcaggaaccctgtatggtttttagtttaaattaaaggagtcgttattgtggtgggaatatgaaataaagtagaagaaaaggccatga

SEQ ID NO: 116731 - DNA, 1061 bp, Artificial Sequence
  derived and/or modified sequence
ccccacaatgcccttcgccttcctcaacgtggcccccgctccaagcccattttctggagccaggaatccactctgtgggttaggaaaggccctcaggaggcggagggaaacctgtggaatgccgagaagccgtgtaatgaaataacgtcacgcctgcccctcaccattactctgaccagggttcgaaggtcacacttagagcctaaggggaaatggagaagtgcaaagggacgagcagaatggctggcaccacctcagctgacgtgaagatgagcagctcagaggaggtgtcctggatttcctggttctgtgggctccgtggcaatgaattcttctgtgaagtggatgaagactacatccaggacaaatttaatcttactggactcaatgagcaggtccctcactatcgacaagctctagacatgatcttggacctggagcctgatgaagaactggaagacaaccccaaccagagtgacctgattgagcaggcagccgagatgctttatggattgatccacgcccgctacatccttaccaaccgtggcatcgcccagatgttggaaaagtaccagcaaggagactttggttactgtcctcgtgtgtactgtgagaaccagccaatgcttcccattggcctttcagacatcccaggtgaagccatggtgaagctctactgccccaagtgcatggatgtgtacacacccaagtcatcaagacaccatcacacggatggcgcctacttcggcactggtttccctcacatgctcttcatggtgcatcccgagtaccggcccaagagacctgccaaccagtttgtgcccaggctctacggtttcaagatccatccgatggcctaccagctgcagctccaagccgccagcaacttcaagagcccagtcaagacgattcgctgattccctcccccacctgtcctgcagtctttgtcttttcctttcttttttgccaccctttcaggaaccctgtatggtttttagtttaaattaaaggagtcgttatcgtggtgggaatatgaaataaagtagaagaaaaggccatga

SEQ ID NO: 116732 - DNA, 948 bp, Artificial Sequence
  derived and/or modified sequence
cttccccaccctccctaatttccactccccccaccccacttcgcctgccgcggtcgggtccgcggcctgcgctgtagcggtcgccgccgttccctggaagtagcaacttccctaccccaccccagtcctggtccccgtccagccgctgacgtgaagatgagcagctcagaggaggtgtcctggatttcctggttctgtgggctccgtggcaatgaattcttctgtgaagtggatgaagactacatccaggacaaatttaatcttactggactcaatgagcaggtccctcactatcgacaagctctagacatgatcttggacctggagcctgatgaagaactggaagacaaccccaaccagagtgacctgattgagcaggcagccgagatgctttatggattgatccacgcccgctacatccttaccaaccgtggcatcgcccagatgttggaaaagtaccagcaaggagactttggttactgtcctcgtgtgtactgtgagaaccagccaatgcttcccattggcctttcagacatcccaggtgaagccatggtgaagctctactgccccaagtgcatggatgtgtacacacccaagtcatcaagacaccatcacacggatggcgcctacttcggcactggtttccctcacatgctcttcatggtgcatcccgagtaccggcccaagagacctgccaaccagtttgtgcccaggctctacggtttcaagatccatccgatggcctaccagctgcagctccaagccgccagcaacttcaagagcccagtcaagacgattcgctgattccctcccccacctgtcctgcagtctttgtcttttcctttcttttttgccaccctttcaggaaccctgtatggtttttagtttaaattaaaggagtcgttatcgtggtgggaatatgaaataaagtagaagaaaaggccatga

SEQ ID NO: 116733 - DNA, 908 bp, Artificial Sequence
  derived and/or modified sequence
ggaggaagcgaccaggtccggcacgaaggagggagaggtggcctgaggagcggaggggggatgtgtggattccggtgaaagggacctgacaatcgcccccaacccctgacgtgaagatgagcagctcagaggaggtgtcctggatttcctggttctgtgggctccgtggcaatgaattcttctgtgaagtggatgaagactacatccaggacaaatttaatcttactggactcaatgagcaggtccctcactatcgacaagctctagacatgatcttggacctggagcctgatgaagaactggaagacaaccccaaccagagtgacctgattgagcaggcagccgagatgctttatggattgatccacgcccgctacatccttaccaaccgtggcatcgcccagatgttggaaaagtaccagcaaggagactttggttactgtcctcgtgtgtactgtgagaaccagccaatgcttcccattggcctttcagacatcccaggtgaagccatggtgaagctctactgccccaagtgcatggatgtgtacacacccaagtcatcaagacaccatcacacggatggcgcctacttcggcactggtttccctcacatgctcttcatggtgcatcccgagtaccggcccaagagacctgccaaccagtttgtgcccaggctctacggtttcaagatccatccgatggcctaccagctgcagctccaagccgccagcaacttcaagagcccagtcaagacgattcgctgattccctcccccacctgtcctgcagtctttgtcttttcctttcttttttgccaccctttcaggaaccctgtatggtttttagtttaaattaaaggagtcgttatcgtggtgggaatatgaaataaagtagaagaaaaggccatga

SEQ ID NO: 116734 - DNA, 936 bp, Artificial Sequence
  derived and/or modified sequence
tgtggattccggtgaaagggacctgacaatcgcccccaacccgtgagaaaaggaggagcccagttcttgcttgagaatgataaacttggaaacccttgggaaaggcgtgggggtcatgcagagacttgtattgctgacgtgaagatgagcagctcagaggaggtgtcctggatttcctggttctgtgggctccgtggcaatgaattcttctgtgaagtggatgaagactacatccaggacaaatttaatcttactggactcaatgagcaggtccctcactatcgacaagctctagacatgatcttggacctggagcctgatgaagaactggaagacaaccccaaccagagtgacctgattgagcaggcagccgagatgctttatggattgatccacgcccgctacatccttaccaaccgtggcatcgcccagatgttggaaaagtaccagcaaggagactttggttactgtcctcgtgtgtactgtgagaaccagccaatgcttcccattggcctttcagacatcccaggtgaagccatggtgaagctctactgccccaagtgcatggatgtgtacacacccaagtcatcaagacaccatcacacggatggcgcctacttcggcactggtttccctcacatgctcttcatggtgcatcccgagtaccggcccaagagacctgccaaccagtttgtgcccaggctctacggtttcaagatccatccgatggcctaccagctgcagctccaagccgccagcaacttcaagagcccagtcaagacgattcgctgattccctcccccacctgtcctgcagtctttgtcttttcctttcttttttgccaccctttcaggaaccctgtatggtttttagtttaaattaaaggagtcgttatcgtggtgggaatatgaaataaagtagaagaaaaggccatga

SEQ ID NO: 116735 - DNA, 936 bp, Artificial Sequence
  derived and/or modified sequence
tgtggattccggtgaaagggacctgacaatcgcccccaacccgtgagaaaaggaggagcccggttcttgcttgagaatgataaacttggaaacccttgggaaaggcgtgggggtcatgcagagacttgtattgctgacgtgaagatgagcagctcagaggaggtgtcctggatttcctggttctgtgggctccgtggcaatgaattcttctgtgaagtggatgaagactacatccaggacaaatttaatcttactggactcaatgagcaggtccctcactatcgacaagctctagacatgatcttggacctggagcctgatgaagaactggaagacaaccccaaccagagtgacctgattgagcaggcagccgagatgctttatggattgatccacgcccgctacatccttaccaaccgtggcatcgcccagatgttggaaaagtaccagcaaggagactttggttactgtcctcgtgtgtactgtgagaaccagccaatgcttcccattggcctttcagacatcccaggtgaagccatggtgaagctctactgccccaagtgcatggatgtgtacacacccaagtcatcaagacaccatcacacggatggcgcctacttcggcactggtttccctcacatgctcttcatggtgcatcccgagtaccggcccaagagacctgccaaccagtttgtgcccaggctctacggtttcaagatccatccgatggcctaccagctgcagctccaagccgccagcaacttcaagagcccagtcaagacgattcgctgattccctcccccacctgtcctgcagtctttgacttttcctttcttttttgccaccctttcaggaaccctgtatggtttttagtttaaattaaaggagtcgttatcgtggtgggaatatgaaataaagtagaagaaaaggccatga

SEQ ID NO: 116736 - DNA, 648 bp, Artificial Sequence
  derived and/or modified sequence
atgagcagcagcgaggaggtgagctggatcagctggttctgcggcctgagaggcaacgagttcttctgcgaggtggacgaggactacatccaggacaagttcaacctgaccggcctgaacgagcaggtgccccactacagacaggccctggacatgatcctggacctggagcccgacgaggagctggaggacaaccccaaccagagcgacctgatcgagcaggccgccgagatgctgtacggcctgatccacgccagatacatcctgaccaacagaggcatcgcccagatgctggagaagtaccagcagggcgacttcggctactgccccagagtgtactgcgagaaccagcccatgctgcccatcggcctgagcgacatccccggcgaggccatggtgaagctgtactgccccaagtgcatggacgtgtacacccccaagagcagcagacaccaccacaccgacggcgcctacttcggcaccggcttcccccacatgctgttcatggtgcaccccgagtacagacccaagagacccgccaaccagttcgtgcccagactgtacggcttcaagatccaccccatggcctaccagctgcagctgcaggccgccagcaacttcaagagccccgtgaagaccatcagatag

SEQ ID NO: 116737 - protein, 141 aa, Artificial Sequence
  derived and/or modified sequence
MAWPLCTLLLLLATQAVALAWSPQEEDRIIEGGIYDADLNDERVQRALHFVISEYNKATEDEYYRRLLRVLRAREQIVGGVNYFFDIEVGRTICTKSQPNLDTCAFHEQPELQKKQLCSFQIYEVPWEDRMSLVNSRCQEA

SEQ ID NO: 116738 - DNA, 426 bp, Artificial Sequence
  derived and/or modified sequence
atggcttggcccctctgcacactgctgttactactggccactcaggccgtggccctggcctggtctccgcaggaggaagatagaatcatcgaggggggtatctacgatgccgatctcaacgacgagagagtccaacgtgccctgcacttcgtgatttccgaatataataaagctacggaggatgaatactatagacggttactccgggtcctccgggcacgggagcagatcgtcggaggtgtgaattattttttcgacatcgaagtgggacgcactatctgcactaaatcacagccaaatctcgatacctgcgcatttcatgaacagcccgaacttcaaaagaaacaactatgctcgtttcagatctatgaagtgccatgggaagatcgaatgagccttgtgaatagcaggtgccaggaagcctag

SEQ ID NO: 116739 - DNA, 426 bp, Artificial Sequence
  derived and/or modified sequence
atggcctggcccctgtgcaccctgctgctgctgctggccacccaggccgtggccctggcctggagcccccaggaggaggaccgcatcatcgagggcggcatctatgatgctgacctgaatgatgagcgggtgcagagggccctgcacttcgtcatcagcgagtacaacaaggccacagaagatgagtactacagaaggctgctgcgggtgctgcgggcccgggagcagatcgtgggcggcgtgaactacttctttgatattgaggtgggccgcaccatctgcaccaagagccagcccaacctggacacctgtgccttccacgagcagcctgagctgcagaagaagcagctgtgcagcttccagatctatgaggtgccctgggaggacaggatgagcctggtgaacagccgctgccaggaggcctag

SEQ ID NO: 116740 - DNA, 426 bp, Artificial Sequence
  derived and/or modified sequence
atggcctggcccctgtgcaccctgctgctgctgctggccacccaggccgtggccctcgcttggagcccccaggaagaggatcgaatcatcgaaggagggatatatgacgctgacctgaatgacgagagggtgcagcgggccctccacttcgttatctccgaatataacaaggccaccgaggatgaatactacagacgtctgctgcgcgtccttcgcgccagggagcagatcgtcgggggcgtcaactacttttttgacattgaggtcgggcgcacgatttgcaccaaatcccagcccaatctcgacacatgtgccttccacgagcaacccgaactccagaagaagcaactgtgttcttttcaaatctacgaagtgccgtgggaggatcggatgtctttagttaacagtcgatgtcaggaagcctag

SEQ ID NO: 116741 - DNA, 426 bp, Artificial Sequence
  derived and/or modified sequence
atggcgtggccactttgtactctgttgctgcttttagccacccaagccgtagcgctagcttggagcccccaggaggaagatcggattatcgaaggtggtatctacgatgctgacctcaacgatgagagagttcaacgggcacttcacttcgtcatcagcgagtataacaaggccacagaagacgagtattaccggcgtctcctccgcgtgctgagggccagggaacaaattgtcggcggagttaattacttctttgacattgaggtcgggagaactatttgcaccaaatctcaacccaatctggacacctgcgcctttcatgagcagcccgaacttcaaaagaaacaactatgcagctttcagatatacgaagtcccttgggaggatagaatgagcctcgtcaattcaaggtgtcaggaggcttag

SEQ ID NO: 116742 - DNA, 748 bp, Artificial Sequence
  derived and/or modified sequence
gggatccccgcctcaggctctcaacctcctctcctgcagctccagctctgtgctctgcctccgaggagaccatggcctggcccctgtgcaccctgctgctcctgctggccacccaggctgtggccctggcctggagcccccaggaggaggacaggataatcgagggtggcatctatgatgcagacctcaatgatgagcgggtacagcgtgcccttcactttgtcatcagcgagtataacaaggccactgaagatgagtactacagacgcctgctgcgggtgctacgagccagggagcagatcgtgggcggggtgaattacttcttcgacatagaggtgggccgaaccatatgtaccaagtcccagcccaacttggacacctgtgccttccatgaacagccagaactgcagaagaaacagttgtgctctttccagatctacgaagttccctgggaggacagaatgtccctggtgaattccaggtgtcaagaagcctagggatctgtgccagggagtcacactgaccacctcctactcccaccccttgtagtgctcccacccctggactggtggcccccaccctgtgggaggtctccccatgcacctgcagcaggagaagacagagaaggctgcaggaggcctttgttgctcagcaggggactctgccctccctccttccttttgcttctcatagccctggtacatggtacacacacccccacctcctgcaattaaacagtagcatcacc

SEQ ID NO: 116743 - DNA, 426 bp, Artificial Sequence
  derived and/or modified sequence
atggcctggcccctgtgcaccctgctgctgctgctggccacccaggccgtggccctggcctggagcccccaggaggaggacagaatcatcgagggcggcatctacgacgccgacctgaacgacgagagagtgcagagagccctgcacttcgtgatcagcgagtacaacaaggccaccgaggacgagtactacagaagactgctgagagtgctgagagccagagagcagatcgtgggcggcgtgaactacttcttcgacatcgaggtgggcagaaccatctgcaccaagagccagcccaacctggacacctgcgccttccacgagcagcccgagctgcagaagaagcagctgtgcagcttccagatctacgaggtgccctgggaggacagaatgagcctggtgaacagcagatgccaggaggcctag

SEQ ID NO: 116744 - protein, 149 aa, Artificial Sequence
  derived and/or modified sequence
MARSNLPLALGLALVAFCLLALPRDARARPQERMVGELRDLSPDDPQVQKAAQAAVASYNMGSNSIYYFRDTHIIKAQSQLVAGIKYFLTMEMGSTDCRKTRVTGDHVDLTTCPLAAGAQQEKLRCDFEVLVVPWQNSSQLLKHNCVQM

SEQ ID NO: 116745 - DNA, 450 bp, Artificial Sequence
  derived and/or modified sequence
atggccagaagcaacctgcccctggccctgggcctggccctggtggccttctgcctgctggccctgcccagagacgccagagccagaccccaggagagaatggtgggcgagctgagagacctgagccccgacgacccccaggtgcagaaggccgcccaggccgccgtggccagctacaacatgggcagcaacagcatctactacttcagagacacccacatcatcaaggcccagagccagctggtggccggcatcaagtacttcctgaccatggagatgggcagcaccgactgcagaaagaccagagtgaccggcgaccacgtggacctgaccacctgccccctggccgccggcgcccagcaggagaagctgagatgcgacttcgaggtgctggtggtgccctggcagaacagcagccagctgctgaagcacaactgcgtgcagatgtag

SEQ ID NO: 116746 - DNA, 759 bp, Artificial Sequence
  derived and/or modified sequence
cgtcttggcacgcgggtgcgcgccgccccctcggcctcctgggctccctgaacctcgcaggaccccggcaacttcgagccccgccccagctccaggccgcgggggcgcatcgcgggcgtcgggcggggcggcccagcgggtaaaagctgcgcggccgcaagctcggcactcacggctctgagggctccgacggcactgacggccatggcgcgttcgaacctcccgctggcgctgggcctggccctggtcgcattctgcctcctggcgctgccacgcgacgcccgggcccggccgcaggagcgcatggtcggagaactccgggacctgtcgcccgacgacccgcaggtgcagaaggcggcgcaggcggccgtggccagctacaacatgggcagcaacagcatctactacttccgagacacgcacatcatcaaggcgcagagccagctggtggccggcatcaagtacttcctgacgatggagatggggagcacagactgccgcaagaccagggtcactggagaccacgtcgacctcaccacttgccccctggcagcaggggcgcagcaggagaagctgcgctgtgactttgaggtccttgtggttccctggcagaactcctctcagctcctaaagcacaactgtgtgcagatgtgataagtccccgagggcgaaggccattgggtttggggccatggtggagggcacttcaggtccgtgggccgtatctgtcacaataaatggccagtgctgcttcttgca

SEQ ID NO: 116747 - DNA, 450 bp, Artificial Sequence
  derived and/or modified sequence
atggccaggtcaaatcttccactcgccctgggactggccttagtggcgttttgcttgcttgcgctgccaagagatgcccgggcacgcccccaagagaggatggtcggcgagctcagggacctgtcccctgatgacccacaggtgcaaaaggccgcacaggcagcagttgcaagctataatatgggaagtaactccatctattactttcgagatactcacataataaaagcccaatctcaactcgtcgccgggattaagtattttttgacaatggagatgggttcaaccgactgtcgtaaaactcgcgtgaccggtgatcacgtggacttgacaacatgccctctcgctgcaggggcacagcaggaaaagctgaggtgtgattttgaagtgctggtggtgccctggcaaaacagtagccagctgttgaagcataattgcgtgcagatgtag

SEQ ID NO: 116748 - DNA, 450 bp, Artificial Sequence
  derived and/or modified sequence
atggcccggagcaacctgcccctggccctgggcctggccctggtggccttctgcctgctggccctgcccagagatgcccgggcccggccccaggagaggatggtgggggagctgcgggacctgagcccagatgacccccaggtgcagaaggccgcccaggccgctgtggccagctacaacatgggcagcaacagcatctactacttccgggacacccacatcatcaaggcccagagccagctggtggccggcatcaagtacttcctgaccatggagatgggcagcacagactgcaggaagaccagggtgactggagaccacgtggacctgaccacctgccccctggccgccggggcccagcaggagaagctgcgctgtgactttgaggtgctggtggtgccctggcagaacagcagccagctgctgaagcacaactgtgtgcagatgtag

SEQ ID NO: 116749 - DNA, 450 bp, Artificial Sequence
  derived and/or modified sequence
atggcccggagcaacctgcccctggccctgggcctggccctggtggccttctgtctgttggccctccctagagatgctcgagcccggccacaggagagaatggtgggggaacttagggatctgtctccagatgatccccaagtgcagaaggccgcccaggctgccgtagctagctacaatatggggtcaaatagcatttactatttcagagatactcacattatcaaagcccagtcccagctggtcgcgggaattaaatattttttaactatggagatgggatctaccgactgtcggaaaacccgggtaacaggagatcatgtggacctaactacttgccccctggcagctggtgcccagcaggagaagctcagatgcgattttgaggtgctggtagtcccctggcagaattcgtcccagctgctaaagcacaactgcgtccaaatgtag

SEQ ID NO: 116750 - DNA, 450 bp, Artificial Sequence
  derived and/or modified sequence
atggctagatctaatctgccactggcgctcggcctggctttggtggctttttgcctgcttgcgctgcccagagacgcgcgtgctaggccacaggagagaatggtgggagagttgcgtgatctcagcccggatgacccacaagtgcagaaagctgcacaggcagcagttgcttcatataatatggggagcaattccatttattatttccgcgacactcacatcattaaggcacagtcccaactggtcgccggaatcaagtatttcttaaccatggagatgggcagtacagattgcagaaaaactcgggtcaccggggaccacgttgacttaactacatgccccctggctgcaggtgcgcagcaggagaagctccgttgcgatttcgaagtattggttgtcccctggcaaaattcatctcagttacttaaacataactgcgtgcagatgtag

SEQ ID NO: 116751 - protein, 431 aa, Artificial Sequence
  derived and/or modified sequence
MYRTKVGLKDRQQLYKLIISQLLYDGYISIANGLINEIKPQSVCAPSEQLLHLIKLGMENDDTAVQYAIGRSDTVAPGTGIDLEFDADVQTMSPEASEYETCYVTSHKGPCRVATYSRDGQLIATGSADASIKILDTERMLAKSAMPIEVMMNETAQQNMENHPVIRTLYDHVDEVTCLAFHPTEQILASGSRDYTLKLFDYSKPSAKRAFKYIQEAEMLRSISFHPSGDFILVGTQHPTLRLYDINTFQCFVSCNPQDQHTDAICSVNYNSSANMYVTGSKDGCIKLWDGVSNRCITTFEKAHDGAEVCSAIFSKNSKYILSSGKDSVAKLWEISTGRTLVRYTGAGLSGRQVHRTQAVFNHTEDYVLLPDERTISLCCWDSRTAERRNLLSLGHNNIVRCIVHSPTNPGFMTCSDDFRARFWYRRSTTD

SEQ ID NO: 116752 - protein, 345 aa, Artificial Sequence
  derived and/or modified sequence
MYRTKVGLKDRQQLYKLIISQLLYDGYISIANGLINEIKPQSVCAPSEQLLHLIKLGMENDDTAVQYAIGRSDTVAPGTGIDLEFDADVQTMSPEASEYETCYVTSHKGPCRVATYSRDGQLIATGSADASIKILDTERMLAKSAMPIEVMMNETAQQNMENHPVIRTLYDHVDEVTCLAFHPTEQILASGSRDYTLKLFDYSKPSAKRAFKYIQEAEMLRSISFHPSGDFILVGTQHPTLRLYDINTFQCFVSCNPQDQHTDAICSVNYNSSANMYVTGSKDGCIKLWDGVSNRCITTFEKAHDGAEVCSAIFSKNSKYILSSGKDSVAKLWEISTGRTLVRYT

SEQ ID NO: 116753 - protein, 418 aa, Artificial Sequence
  derived and/or modified sequence
MYRLIISQLLYDGYISIANGLINEIKPQSVCAPSEQLLHLIKLGMENDDTAVQYAIGRSDTVAPGTGIDLEFDADVQTMSPEASEYETCYVTSHKGPCRVATYSRDGQLIATGSADASIKILDTERMLAKSAMPIEVMMNETAQQNMENHPVIRTLYDHVDEVTCLAFHPTEQILASGSRDYTLKLFDYSKPSAKRAFKYIQEAEMLRSISFHPSGDFILVGTQHPTLRLYDINTFQCFVSCNPQDQHTDAICSVNYNSSANMYVTGSKDGCIKLWDGVSNRCITTFEKAHDGAEVCSAIFSKNSKYILSSGKDSVAKLWEISTGRTLVRYTGAGLSGRQVHRTQAVFNHTEDYVLLPDERTISLCCWDSRTAERRNLLSLGHNNIVRCIVHSPTNPGFMTCSDDFRARFWYRRSTTD

SEQ ID NO: 116754 - protein, 142 aa, Artificial Sequence
  derived and/or modified sequence
MYRTKVGLKDRQQLYKLIISQLLYDGYISIANGLINEIKPQSVCAPSEQLLHLIKLGMENDDTAVQYAIGRSDTVAPGTGIDLEFDADVQTMSPEASEYETCYVTSHKGPCRVATYSRDGQLIATGSADASIKILDTERMLA

SEQ ID NO: 116755 - DNA, 1038 bp, Artificial Sequence
  derived and/or modified sequence
atgtacagaaccaaagtaggcctgaaggacaggcagcagctgtataagcttataatctcccagctgctgtacgatgggtacatttccatcgccaacgggcttatcaacgaaatcaagccccaatcagtttgtgccccaagcgagcaacttttacacctcataaagctcggcatggaaaatgatgacacagctgtccagtacgcgatcggacgcagcgatactgtggcgcctggaacgggcatcgatctcgagtttgacgcagacgtccagactatgtctcccgaagcatcggaatatgaaacttgttatgtgacttcgcacaaggggccttgccgggtggccacgtattccagagacggacagctcatcgctacagggtccgccgacgctagcattaaaattctggacacagagcgtatgttggcaaagagtgccatgcctattgaagtgatgatgaacgagacagcacagcagaatatggagaaccaccctgtgattcgcactctatacgaccacgttgacgaggtgacttgtctagcttttcatccaacggaacagatcctcgccagtggctcccgagactacacactgaagttgttcgattacagtaagccttctgctaaaagggcctttaagtatattcaggaagcggagatgctaaggtcaatttcctttcaccccagtggagatttcatactcgtaggcacccagcatcccactttacgcctgtatgatattaataccttccagtgcttcgtgtcttgtaatcctcaagatcagcacacggatgcaatctgcagtgtaaactacaattcaagcgctaacatgtatgtgaccggtagcaaggacggttgtatcaaactttgggatggcgtttctaatcgttgtatcacgactttcgagaaggcgcatgatggggctgaagtgtgttccgccattttttctaagaacagtaagtacattctcagctccgggaaggatagtgtggcgaagttgtgggaaattagtactgggagaacactcgtaaggtacacttag

SEQ ID NO: 116756 - DNA, 1257 bp, Artificial Sequence
  derived and/or modified sequence
atgtacaggttaatcatttcccagctgctgtacgatggatatatctctatcgcgaatgggcttataaacgagattaagccacagtcagtctgcgccccgtctgaacagttgctgcatcttatcaaactcgggatggaaaatgacgataccgcagtgcagtacgccattgggcgcagcgacacggtggccccaggcacaggcattgacctggagttcgatgcagatgttcagactatgagccccgaggccagcgaatacgagacctgttatgtgaccagccataaagggccttgtcgcgtggcaacatactctcgagatgggcagcttatagcgacaggatcagctgacgcaagcattaagattctagacacagagcgcatgttggccaagagtgccatgccaatcgaagttatgatgaacgagaccgcccagcagaacatggagaatcaccctgtgattcgaactctgtacgatcatgtggacgaagtgacctgcctcgccttccaccccaccgagcagatcctggcttcaggctcccgtgactatacgttgaagcttttcgactactccaagccctccgcaaaaagggcttttaaatacatacaggaagccgaaatgttgagatccatctcatttcacccttcaggagactttattctagtcgggactcaacacccaacactcagactgtacgatataaacacgttccagtgctttgtaagttgcaaccctcaggatcagcatacagatgccatctgtagtgtgaactacaacagttccgctaatatgtacgttacaggcagcaaggatgggtgcatcaagctgtgggatggggtatccaaccgctgtattactacctttgaaaaagctcatgacggtgccgaggtgtgcagcgccatctttagtaaaaatagtaagtatatcctgtcatccggcaaggatagcgttgctaaactgtgggaaatatctaccggcaggacacttgtgcgatacaccggggctgggctttcaggacgccaagtccaccgaactcaagctgtgtttaatcatacagaggactacgttctgctccctgatgagaggaccatatctttgtgctgttgggattcacggacggcggagcgccgcaacctcttatctctggggcataacaacattgttcgatgtatcgtgcatagtcctaccaatcctggtttcatgacatgcagcgacgactttagggccagattctggtatagacggagtacaacagactag

SEQ ID NO: 116757 - DNA, 429 bp, Artificial Sequence
  derived and/or modified sequence
atgtaccggacaaaggttggccttaaagaccggcagcagctctacaaactgatcatcagccagctgctgtacgatggatacatttctatcgcgaacgggctcatcaacgaaattaaacctcagtccgtgtgtgcccccagcgaacagctccttcatctgataaagctcggcatggagaatgacgacactgctgtccagtatgccatcggaagatctgataccgtcgctcccggtactggtatcgatctggagttcgacgctgacgtgcaaacaatgtctcctgaggcttctgagtatgagacttgttatgtgaccagccacaaaggcccttgtagagttgccacttatagtagagacggccagctcatcgccacaggctccgccgatgcatctattaagattctcgataccgagaggatgttggcctag

SEQ ID NO: 116758 - DNA, 1038 bp, Artificial Sequence
  derived and/or modified sequence
atgtacaggacgaaggtcggcctgaaggatcgtcaacagctgtataaactcatcatctcccaactcttgtacgacggctacatttcgatcgcaaacggccttatcaatgagataaaaccccagagcgtttgcgctccaagcgagcagctcctgcacctgattaaactcggtatggagaacgatgatactgctgtccagtacgccattggcaggtcagatacagtggcccccgggaccggtatagatcttgaattcgacgccgacgtacagactatgtcaccagaagccagtgaatatgagacctgctacgttacctcccacaaaggaccttgccgtgtcgccacatattccagggacgggcagcttatcgctaccggctctgccgacgctagcatcaagatcctggacactgagcgaatgttggccaaatccgctatgcccatcgaggtgatgatgaacgagaccgctcagcagaacatggagaatcaccctgtgataagaacgttgtatgaccacgttgatgaggtgacttgcctggcattccatcccactgagcagatacttgcgtccgggtcaagggattatacccttaaactattcgactattctaaaccgagtgcgaagcgggcattcaagtatattcaggaagcagagatgctcagatcgattagctttcatccctcaggcgattttatattggttggcacccagcatcctaccttgagactctacgatattaacaccttccagtgctttgtgtcctgcaatccccaggaccaacacaccgatgctatctgctcagtgaactataactctagtgcaaatatgtacgtgactgggtccaaggacggttgtattaagttgtgggacggagtgtccaacaggtgtatcacaaccttcgagaaggctcacgatggcgctgaggtctgcagtgcaatctttagcaagaattcaaaatatatcctaagctccgggaaagacagcgttgcgaagctgtgggagatttctacaggacgtaccctggtgaggtacacctag

SEQ ID NO: 116759 - DNA, 1038 bp, Artificial Sequence
  derived and/or modified sequence
atgtaccgcaccaaggtgggcctgaaggaccggcagcagctgtacaagctgatcatcagccagctgctgtatgatggctacatcagcatcgccaacggcctcatcaatgagatcaagccccagagcgtgtgtgcccccagcgagcagctgctgcacctgatcaagctgggcatggagaatgatgacacagctgtgcagtatgccatcggccgcagtgacacagtggcccctggcactggaattgacctggagtttgatgctgatgtgcagaccatgagccctgaggcctctgaatatgagacctgctacgtgaccagccacaagggcccctgccgggtggccacctacagcagagatggccagctgattgccactggatctgcagatgccagcatcaagatcctggacacagagaggatgctggccaagagcgccatgcccatcgaggtgatgatgaatgaaacagcccagcagaacatggagaaccaccctgtgatccgcaccctgtatgaccacgtggatgaggtgacctgcctggccttccaccccacagagcagatcctggccagcggcagccgggactacaccctgaagctgtttgactacagcaagcccagcgccaagagggccttcaagtacatccaggaggccgagatgctgcggagcatctccttccaccccagcggggacttcatcctggtgggcacccagcaccccaccctgcggctgtatgacatcaacaccttccagtgctttgtgtcctgcaacccccaggaccagcacacagatgccatctgcagcgtgaactacaacagcagcgccaacatgtatgtgacaggcagcaaggatggctgcatcaagctgtgggatggagtgagcaaccgctgcatcaccacctttgagaaggcccatgatggagctgaggtgtgcagcgccatcttcagcaagaacagcaagtacatcctgagcagcggcaaggacagcgtggccaagctgtgggagatcagcactggaagaaccctggtgcgctacacctag

SEQ ID NO: 116760 - DNA, 1257 bp, Artificial Sequence
  derived and/or modified sequence
atgtaccgcctcatcatcagccagctgctgtatgatggctacatcagcatcgccaacggcctcatcaatgagatcaagccccagagcgtgtgtgcccccagcgagcagctgctgcacctgatcaagctgggcatggagaatgatgacacagctgtgcagtatgccatcggccgcagtgacacagtggcccctggcaccggcatcgacctggagtttgatgctgatgtgcagaccatgagccctgaggcctctgaatatgagacctgctacgtgaccagccacaagggcccctgccgggtggccacctacagcagagatggccagctgattgccaccggcagcgcagatgccagcatcaagatcctggacacagagaggatgctggccaagagcgccatgcccatcgaggtgatgatgaatgaaacagcccagcagaacatggagaaccaccctgtgatccgcaccctgtatgaccacgtggatgaggtgacctgcctggccttccaccccacagagcagatcctggccagcggcagccgggactacaccctgaagctgtttgactacagcaagcccagcgccaagagggccttcaagtacatccaggaggccgagatgctgcggagcatctccttccaccccagcggggacttcatcctggtgggcacccagcaccccaccctgcggctgtatgacatcaacaccttccagtgctttgtgtcctgcaacccccaggaccagcacacagatgccatctgcagcgtgaactacaacagcagcgccaacatgtatgtgacaggcagcaaggatggctgcatcaagctgtgggatggagtgagcaaccgctgcatcaccacctttgagaaggcccatgatggagctgaggtgtgcagcgccatcttcagcaagaacagcaagtacatcctgagcagcggcaaggacagcgtggccaagctgtgggagatcagcacaggccgcaccctggtgcgctacaccggggccggcctgagcggccggcaggtgcacaggacccaggccgtgttcaaccacacagaggactatgtgctgctgcctgatgagaggaccatcagcctgtgctgctgggacagcaggacagctgagaggaggaacctgctgagcctgggccacaacaacatcgtgcgctgcatcgtgcacagccccaccaaccctggcttcatgacctgcagtgatgacttccgggcccgcttctggtacagaagaagcaccacagactag

SEQ ID NO: 116761 - DNA, 429 bp, Artificial Sequence
  derived and/or modified sequence
atgtaccgcaccaaggtgggcctgaaggaccggcagcagctgtacaagctgatcatcagccagctgctgtatgatggctacatcagcatcgccaacggcctcatcaatgagatcaagccccagagcgtgtgtgcccccagcgagcagctgctgcacctgatcaagctgggcatggagaatgatgacacagctgtgcagtatgccatcggccgcagtgacacagtggcccctggcactggaattgacctggagtttgatgctgatgtgcagaccatgagccctgaggcctctgaatatgagacctgctacgtgaccagccacaagggcccctgccgggtggccacctacagcagagatggccagctgattgccactggatctgcagatgccagcatcaagatcctggacacagagaggatgctggcctag

SEQ ID NO: 116762 - DNA, 1038 bp, Artificial Sequence
  derived and/or modified sequence
atgtaccggaccaaggtgggcctgaaggaccggcagcagctgtacaaactgatcattagtcagctgctctacgacggctatattagcattgcaaatggcctcatcaatgaaatcaagccacagtcagtatgcgcacccagtgagcagctccttcatctgattaaactcggcatggagaacgatgacacggcagtccaatacgccatcggtcggagcgacaccgtcgccccaggaacagggatcgatctggagtttgatgccgacgtgcagactatgtctcccgaagcttcagagtatgaaacttgttatgtcaccagtcacaagggcccatgcagggttgctacatacagccgtgacgggcaattgattgccacggggtccgcagatgcgagtattaagatcctggacactgaaagaatgctggctaaaagcgcaatgcccatagaggtgatgatgaatgagacggctcagcaaaatatggaaaaccacccagtcattaggactctgtacgatcacgtggatgaagtgacatgcctcgcctttcatcccaccgagcagattttggcctccggatctcgcgattacacactgaaattgttcgattatagtaaacccagcgcaaagcgcgccttcaagtatattcaagaggccgagatgttgagatcaatcagttttcatccttctggggacttcatactcgtggggacacaacacccgacactaaggctttacgatatcaatacttttcagtgtttcgtctcatgcaaccctcaggaccaacacactgatgccatctgcagtgtgaactacaatagcagcgcaaacatgtatgtcacaggttcaaaggacggatgtataaaactgtgggatggagtgtcaaatcgatgtattacgacattcgagaaagctcatgacggggccgaggtgtgtagcgctattttctctaaaaactcgaaatatatcctcagtagcggaaaggacagcgtagcaaagctttgggaaatctctaccggcaggaccttggtaagatacacctag

SEQ ID NO: 116763 - DNA, 1257 bp, Artificial Sequence
  derived and/or modified sequence
atgtaccggctgatcatcagccagctgctgtacgacggctacatctctattgccaatggcctgataaacgaaatcaagcctcaatccgtgtgtgcgccgagcgagcagctgctccatttgatcaaattggggatggaaaacgacgacactgcggtgcagtatgcgatcggcaggtccgataccgttgcacctgggacaggtatcgatctggagtttgacgccgacgtacagactatgtccccggaagcctcggagtatgagacttgttatgtgacctcacacaagggtccatgtagagtggccacatattctagggatgggcagctaatagccactggctctgcagatgcgtctatcaaaattttggatactgagaggatgctcgcaaaatcagcaatgcctatcgaagtgatgatgaatgaaaccgcacagcaaaacatggagaaccatcccgtgatcagaactttgtacgatcacgtcgatgaagtgacatgtctcgcttttcacccgacagagcagatactagcttctggctcgagggactacacacttaagctgtttgactattctaaaccatcagcgaaacgagcattcaaatacatacaggaggcagaaatgctccgcagtatctcgttccacccaagcggtgactttattctggtcggaacccaacacccaactcttcgcttgtatgatatcaacacattccagtgttttgtttcttgtaatccccaagaccagcacacggacgccatatgctctgtcaattataattcaagcgctaatatgtacgtcaccggttccaaggacgggtgtatcaaactatgggatggcgtgagcaaccggtgtattactacgttcgaaaaagcccacgacggggcagaggtctgttcagcaatctttagcaaaaactccaaatacatactgtcttcagggaaggattccgtggcgaaactgtgggaaatttcaactggcagaaccctggtgcgatacactggcgccgggctctcgggtcggcaggtccatcgaacacaggccgtctttaaccacaccgaagactacgtgctgctccccgatgagagaacaatatccctgtgctgttgggatagtagaacagccgagcgaaggaatctgctgtccctgggacataacaatattgttcggtgtatcgtgcattcacctaccaatcctggcttcatgacttgcagcgatgacttcagagcccggttttggtacaggcggagcactacagactag

SEQ ID NO: 116764 - DNA, 429 bp, Artificial Sequence
  derived and/or modified sequence
atgtaccggaccaaggtgggcctgaaggaccggcagcagctgtacaaactgatcatttcacagctattgtacgacggctacatcagtatcgccaacggcctgattaatgagatcaagccccagagcgtgtgcgcgccttctgagcagctgctgcacctgatcaagctaggcatggaaaacgatgatactgcagttcaatacgcaattggacgctccgacaccgtggccccaggcaccggcatcgatcttgagttcgacgccgacgtacagaccatgagccctgaagccagcgaatacgaaacatgttatgttacttctcataagggtccatgtcgagtggccacgtattccagagacgggcagctcatcgcgacggggagtgccgatgcttcaatcaaaattctggacaccgagcgcatgctagcctag

SEQ ID NO: 116765 - DNA, 1038 bp, Artificial Sequence
  derived and/or modified sequence
atgtaccggaccaaggtgggcctgaaggaccggcagcagctgtacaagctcatcatctctcagctcctgtatgatgggtacattagtatagcaaacgggctgattaacgaaattaagccccagagcgtatgtgcccctagcgaacagcttttacacttgatcaagctcgggatggaaaacgatgacacagctgtgcaatatgcgattggccggagcgataccgtcgcacccggtactggcatcgatcttgagttcgacgcggacgtccagactatgtctccagaggcttctgaatatgagacctgctacgtaacaagccacaagggcccatgcagggtggcaacctactcccgtgatggccagctaatcgccaccgggtccgccgatgctagcattaaaatcctggataccgagcggatgttagccaagagcgccatgcccatcgaggttatgatgaacgagaccgctcagcagaatatggagaatcatcctgtgattaggaccctgtacgatcatgtcgacgaagtgacatgcctggcctttcaccccactgaacagatcctcgctagcgggtccagggattatactcttaaactgtttgactattctaagccaagcgccaagagagccttcaagtacattcaagaggccgaaatgctgagaagcatttcatttcacccatctggcgacttcatcctggtcggcacacagcacccgacccttagactgtacgatatcaacacattccagtgcttcgtgagctgcaatccgcaggatcagcacacagatgccatttgcagcgtgaactacaactcctcagccaacatgtatgtgacaggttccaaagacggctgtatcaagttgtgggatggggtgagcaacaggtgtataacaaccttcgaaaaggcacatgatggtgctgaggtgtgtagcgctatcttctccaagaactcaaaatatatcctgtcatccggtaaagattcagtcgcaaagctctgggaaatcagtacgggtcggaccttggtgcgttacacctag

SEQ ID NO: 116766 - DNA, 1038 bp, Artificial Sequence
  derived and/or modified sequence
atgtaccggactaaggttgggctcaaggatcgccagcagctctataaactcattatctctcagctgctctacgacggatacattagtatcgccaatgggctcataaacgaaataaaaccacagagtgtgtgtgccccatcagagcagctgctgcatctgattaaactgggcatggaaaacgatgacacggccgtgcagtatgcaatcggccgatcagatacagtggcccctgggactgggatcgacttggaattcgacgccgatgtgcagactatgtctcccgaagcttcagagtacgaaacctgctatgtaacttcacataaaggaccgtgccgagtggcaacctattccagggacggacagctgattgcaactgggagtgctgacgcttccatcaaaatattagatactgaaaggatgctggcgaagtcagccatgcctattgaagtaatgatgaatgaaacggcacagcaaaatatggagaaccaccctgttatacgcaccttgtacgaccacgtggatgaagtcacctgcctcgcttttcatcctacagaacagattctggccagcggttcccgggactatacactcaagttgttcgactatagcaagcctagcgcgaagcgagccttcaaatatattcaggaggccgagatgctgaggtctatttcgtttcacccaagcggggacttcatactggttgggactcagcatcctaccctccgcctctatgatatcaatactttccagtgttttgtgagttgcaacccacaggatcagcacacagatgccatatgctcagtcaattacaattctagtgccaatatgtacgtgacgggttcaaaagacgggtgtattaagctttgggacggagtgagcaaccgttgtatcacaaccttcgagaaagcccatgacggagccgaggtgtgctccgctatatttagcaaaaactcaaagtacatcttgagtagtggcaaagatagtgttgctaaactgtgggaaattagtaccgggcgtaccctggtgcggtatacttag

SEQ ID NO: 116767 - DNA, 1257 bp, Artificial Sequence
  derived and/or modified sequence
atgtatcggctgatcataagtcaactactgtatgacgggtacatctctatcgccaatggcctgatcaacgagattaagccacagagcgtgtgtgctcccagcgaacagctactccatctgataaaattgggaatggagaacgatgacactgccgtccaatacgccatcggcaggagcgatacagtggcgccaggcaccggcatcgatctggagttcgacgctgatgtacagacaatgagccctgaggcttccgagtatgagacttgctatgtgactagccacaaagggccatgtcgggtggcaacttacagcagagacggacagctgatcgctactggcagcgcggacgcgtctatcaaaatcttggacaccgagaggatgctagccaaatccgcgatgccaattgaggtgatgatgaatgagaccgctcagcagaacatggagaaccacccagtgattcgtaccctttatgaccatgtggatgaggtcacctgtttggcgtttcatcctacagaacaaattttagcatccgggagcagagactacacgcttaaactgttcgactactctaagccaagtgctaagcgggcatttaagtacatccaggaggccgaaatgttgagaagcatcagttttcatccctcaggcgattttatccttgttggcacccagcacccgaccctgcgactctatgacatcaatacctttcagtgttttgtttcatgcaatcctcaggaccaacacacagatgccatctgctctgtgaactacaatagctccgcgaacatgtacgtaacaggcagcaaagatggttgtatcaagttatgggacggagttagcaatcggtgtattacgactttcgagaaagcccatgacggagcggaagtatgttctgccatcttctcaaagaactcgaaatacattcttagcagcgggaaagattcagttgcgaagttatgggagatcagcacaggaagaacactggttcgctatacaggcgctgggctgtccggcagacaggtacaccggacacaggcggtgtttaatcatacggaggattacgtccttctccctgatgaacggaccatctcactctgttgttgggattctcggacagccgagagaaggaacctcttgagccttgggcacaacaacattgtgcggtgcatcgtccacagtccaacaaatcccggatttatgacctgctctgatgactttcgagctaggttctggtataggcgttccactacagattag

SEQ ID NO: 116768 - DNA, 429 bp, Artificial Sequence
  derived and/or modified sequence
atgtatcggaccaaggttgggctgaaggaccgtcagcagctgtacaaactgatcatttcccagctactgtatgatggatacatttcaatcgccaatggcctaatcaatgaaatcaaaccgcagtctgtgtgtgcccctagcgagcagcttctgcatttaatcaaactcgggatggagaacgatgatacagcggtacagtacgccatcggccgaagcgatacagtggctccaggcactggcatcgaccttgaatttgatgcagatgtccaaaccatgagtccagaagccagtgagtatgagacctgttatgtcacatcccacaaaggaccctgcagagtcgccacatattccagggacggtcaattgattgcaactggctccgccgacgccagcattaagatcctcgataccgagaggatgttggcctag

SEQ ID NO: 116769 - DNA, 1038 bp, Artificial Sequence
  derived and/or modified sequence
atgtatcgtacaaaggtggggttgaaggataggcagcagctctataagctcatcatatctcagcttctgtacgatggttacataagtatagctaatggcctgattaacgagatcaagccacaatcagtatgcgccccttctgaacagttgctccacctcattaagcttgggatggagaacgatgacaccgctgtgcagtacgcaattggcaggagtgacaccgtcgctccagggactggtattgatttagagttcgacgctgatgtacagacaatgtctcctgaagcatcagagtacgagacgtgttatgtcacatcacataaaggaccctgcagggtggcaacatacagccgggatggccaattaattgcaaccggatccgcggacgcctccataaagatcctggacacagaacggatgctggccaagtccgccatgcctattgaagtcatgatgaatgagaccgctcagcagaacatggagaaccacccagtcatccgcacgctgtacgaccatgtggatgaagtgacttgcttagcattccatccgactgagcagatcctcgcttccggctctcgcgattacacccttaagctgtttgattacagtaaaccgtcagccaagagggcgttcaagtacatccaagaggcggagatgctgagatccatcagtttccacccttctggagactttatactcgtgggcacacagcaccccaccctgagactctacgatatcaacacattccagtgctttgtatcatgtaatcctcaggaccagcacaccgatgcaatctgcagcgtgaattataacagttcagctaatatgtacgtaacaggttccaaggatggctgtattaagctgtgggacggggtgtctaaccgctgtataactacattcgaaaaggcgcacgacggcgcagaagtgtgtagtgccatttttagtaaaaactccaaatacatcctgtcctctggcaaggactctgttgccaagctgtgggagattagcaccgggagaactcttgtgagatatacttag

SEQ ID NO: 116770 - DNA, 2383 bp, Artificial Sequence
  derived and/or modified sequence
aacggccagccagacctgtggcagtcccagccccagggtgctctccgcggtcggccatttatcggtgaagcaacagccccttgacgtcaagcttgacgcattggagataaagtccaaggaggtgaactaacctttgaacgtgccagtaagtaagatggcgagaaaagcaagagagagtgggaccgatcgatagcgcagcggtcggcttggcgccctttcagcgtgcgcagtgaacgtgcgctcggagcggtagattgggcaggattcgcgcctccatttttccaggagagagcgggataccaagagaaccggaccagctgctggcagggaaactgtcttccttttctccaagatgtacagaaccaaagtgggcttgaaggaccgccagcagctctacaagctgatcattagccagctgctatatgacggctacatcagcatcgccaatggcctcatcaatgaaatcaagcctcagtctgtgtgtgcaccctcggagcagctcctgcatctcatcaaactcggaatggaaaacgatgacaccgcagttcagtatgcaattggtcgttcagatactgttgcccctggcacagggattgacctggaatttgatgcagatgttcagactatgtccccagaggcttctgagtacgaaacatgctatgtcacatcacataaaggaccatgccgtgtagctacctatagtagagatggacagttaatagctactgggtctgctgatgcttcgataaagatacttgacacagagaggatgttggccaaaagtgccatgccaatagaggtcatgatgaatgagaccgcacaacaaaatatggaaaaccacccagtgattcgaactctttatgaccatgtggatgaagtcacgtgccttgctttccacccaacagaacagatcctggcttctggttcaagggattatactcttaaattatttgattattccaaaccatcagcaaaaagagccttcaaatacattcaggaagctgaaatgttacgttccatctcttttcatccttctggagactttatacttgtcggaactcagcatcctactcttcgcctttatgatatcaacacctttcaatgttttgtctcttgcaatcctcaagatcaacacaccgatgctatatgttccgttaattacaattctagtgccaatatgtacgtaactggaagcaaggacggctgcatcaaattatgggatggtgtttcaaatcgatgcatcacaacttttgagaaagcacatgacggtgctgaagtttgttctgccattttttccaaaaattctaaatacattctctcaagtggaaaagactctgtagctaaactttgggaaatatcaacgggacgaacactggtcagatacacgggcgcgggtttaagtggacgccaggtgcaccggacacaggctgtgtttaaccacaccgaggactatgtgttgctgcccgacgagaggacgatcagtctttgctgctgggactcgaggacagccgagcggagaaacctgctgtcgttggggcacaacaatattgtacgctgcatagtgcactcccccaccaaccccgggttcatgacgtgcagcgatgacttcagagcgcggttttggtaccggagatcgaccactgactgagccaccctctccgtagggttctttctcgaggactctaccctcctcccccacgtcctgtctcagctgcagtcgtaagtccgtgcaccatccttgacgttttgctgccacctctgtccacattcttcttggatttgtataaaagaatctttttttaccttgatgtagaatcatggtggaaaaagttggaaacacagatctgtgcagttctacattcactgattattacagtgtgattttcatcggttttgtaagtacaggacttgccgtttcttttgatctcttgattgaaggaggatagggcattaaagtgcttttgacatgaggaattttcatttggttcttctgtcaactttcttgcttattctgctgaaccctctgtgtatttcccttccaggtatatttgaacagataagcaggcatgcagctctgagactcctgagttttatgccattatcaaaagcattttcaagaatccctcaattctatcctgaaatgatgttattctgataataaagctcagatctgcaactttattgttatatatttttcacttctgtaaaattaatggccagtttttcctgacaatttataggaacagtatctttcaacatactccctacattatccttcaatatctgcaatacttgtctttagtaactgtatttctggtaagattatgatttcatgagaaacaattgaaaatatatccgatctaattaaattaggtcagcctgc

SEQ ID NO: 116771 - DNA, 1236 bp, Artificial Sequence
  derived and/or modified sequence
aagaacccggaagtggtggagccaacggccagccagacctgtggcagtcccagccccagggtgctctccgcggtcggccatttatcggtgaagcaacagccccttgacgtcaagcttgacgcattggagataaagtccaaggaggtgaactaacctttgaacgtgccactggcagggaaactgtcttccttttctccaagatgtacagaaccaaagtgggcttgaaggaccgccagcagctctacaagctgatcattagccagctgctatatgacggctacatcagcatcgccaatggcctcatcaatgaaatcaagcctcagtctgtgtgtgcaccctcggagcagctcctgcatctcatcaaactcggaatggaaaacgatgacaccgcagttcagtatgcaattggtcgttcagatactgttgcccctggcacagggattgacctggaatttgatgcagatgttcagactatgtccccagaggcttctgagtacgaaacatgctatgtcacatcacataaaggaccatgccgtgtagctacctatagtagagatggacagttaatagctactgggtctgctgatgcttcgataaagatacttgacacagagaggatgttggccaaaagtgccatgccaatagaggtcatgatgaatgagaccgcacaacaaaatatggaaaaccacccagtgattcgaactctttatgaccatgtggatgaagtcacgtgccttgctttccacccaacagaacagatcctggcttctggttcaagggattatactcttaaattatttgattattccaaaccatcagcaaaaagagccttcaaatacattcaggaagctgaaatgttacgttccatctcttttcatccttctggagactttatacttgtcggaactcagcatcctactcttcgcctttatgatatcaacacctttcaatgttttgtctcttgcaatcctcaagatcaacacaccgatgctatatgttccgttaattacaattctagtgccaatatgtacgtaactggaagcaaggacggctgcatcaaattatgggatggtgtttcaaatcgatgcatcacaacttttgagaaagcacatgacggtgctgaagtttgttctgccattttttccaaaaattctaaatacattctctcaagtggaaaagactctgtagctaaactttgggaaatatcaacgggacgaacactggtcagatacacgg

SEQ ID NO: 116772 - DNA, 1768 bp, Artificial Sequence
  derived and/or modified sequence
agattgggcaggattcgcgcctccatttttccaggagagagcgggataccaagagaaccggaccagctgctggcagggaaactgtcttccttttctccaagatgtacaggctgatcattagccagctgctatatgacggctacatcagcatcgccaatggcctcatcaatgaaatcaagcctcagtctgtgtgtgcaccctcggagcagctcctgcatctcatcaaactcggaatggaaaacgatgacaccgcagttcagtatgcaattggtcgttcagatactgttgcccctggcacagggattgacctggaatttgatgcagatgttcagactatgtccccagaggcttctgagtacgaaacatgctatgtcacatcacataaaggaccatgccgtgtagctacctatagtagagatggacagttaatagctactgggtctgctgatgcttcgataaagatacttgacacagagaggatgttggccaaaagtgccatgccaatagaggtcatgatgaatgagaccgcacaacaaaatatggaaaaccacccagtgattcgaactctttatgaccatgtggatgaagtcacgtgccttgctttccacccaacagaacagatcctggcttctggttcaagggattatactcttaaattatttgattattccaaaccatcagcaaaaagagccttcaaatacattcaggaagctgaaatgttacgttccatctcttttcatccttctggagactttatacttgtcggaactcagcatcctactcttcgcctttatgatatcaacacctttcaatgttttgtctcttgcaatcctcaagatcaacacaccgatgctatatgttccgttaattacaattctagtgccaatatgtacgtaactggaagcaaggacggctgcatcaaattatgggatggtgtttcaaatcgatgcatcacaacttttgagaaagcacatgacggtgctgaagtttgttctgccattttttccaaaaattctaaatacattctctcaagtggaaaagactctgtagctaaactttgggaaatatcaacgggacgaacactggtcagatacacgggcgcgggtttaagtggacgccaggtgcaccggacacaggctgtgtttaaccacaccgaggactatgtgttgctgcccgacgagaggacgatcagtctttgctgctgggactcgaggacagccgagcggagaaacctgctgtcgttggggcacaacaatattgtacgctgcatagtgcactcccccaccaaccccgggttcatgacgtgcagcgatgacttcagagcgcggttttggtaccggagatcgaccactgactgagccaccctctccgtagggttctttctcgaggactctaccctcctcccccacgtcctgtctcagctgcagtcgtaagtccgtgcaccatccttgacgttttgctgccacctctgtccacattcttcttggatttgtataaaagaatctttttttaccttgatgtagaatcatggtggaaaaagttggaaacacagatctgtgcagttctacattcactgattattacagtgtgattttcatcggttttgtaagtacaggacttgccgtttcttttgatctcttgattgaaggaggatagggcattaaagtgcttttgacatgaggaattttcatttggttcttctgtcaactttcttgcttattctgctgaaccctctgtgtatttcccttccaggtatatttgaacagat

SEQ ID NO: 116773 - DNA, 554 bp, Artificial Sequence
  derived and/or modified sequence
gtggcagtcccagccccagggtgctctccgcggtcggccatttatcggtgaagcaacagccccttgacgtcaagcttgacgcattggagataaagtccaaggaggtgaactaacctttgaacgtgccaatgtacagaaccaaagtgggcttgaaggaccgccagcagctctacaagctgatcattagccagctgctatatgacggctacatcagcatcgccaatggcctcatcaatgaaatcaagcctcagtctgtgtgtgcaccctcggagcagctcctgcatctcatcaaactcggaatggaaaacgatgacaccgcagttcagtatgcaattggtcgttcagatactgttgcccctggcacagggattgacctggaatttgatgcagatgttcagactatgtccccagaggcttctgagtacgaaacatgctatgtcacatcacataaaggaccatgccgtgtagctacctatagtagagatggacagttaatagctactgggtctgctgatgcttcgataaagatacttgacacagagaggatgttggcc

SEQ ID NO: 116774 - DNA, 1233 bp, Artificial Sequence
  derived and/or modified sequence
ggcaggattcgcgcctccatttttccaggagagagcgggataccaagagaaccggaccagctggtactgggacacggggagagtagctggtgcggtcggctggggcatttagagaaaaccacagaaacgactggggcgagactggaagagtcgagagttagcaagctggcagggaaactgtcttccttttctccaagatgtacagaaccaaagtgggcttgaaggaccgccagcagctctacaagctgatcattagccagctgctatatgacggctacatcagcatcgccaatggcctcatcaatgaaatcaagcctcagtctgtgtgtgcaccctcggagcagctcctgcatctcatcaaactcggaatggaaaacgatgacaccgcagttcagtatgcaattggtcgttcagatactgttgcccctggcacagggattgacctggaatttgatgcagatgttcagactatgtccccagaggcttctgagtacgaaacatgctatgtcacatcacataaaggaccatgccgtgtagctacctatagtagagatggacagttaatagctactgggtctgctgatgcttcgataaagatacttgacacagagaggatgttggccaaaagtgccatgccaatagaggtcatgatgaatgagaccgcacaacaaaatatggaaaaccacccagtgattcgaactctttatgaccatgtggatgaagtcacgtgccttgctttccacccaacagaacagatcctggcttctggttcaagggattatactcttaaattatttgattattccaaaccatcagcaaaaagagccttcaaatacattcaggaagctgaaatgttacgttccatctcttttcatccttctggagactttatacttgtcggaactcagcatcctactcttcgcctttatgatatcaacacctttcaatgttttgtctcttgcaatcctcaagatcaacacaccgatgctatatgttccgttaattacaattctagtgccaatatgtacgtaactggaagcaaggacggctgcatcaaattatgggatggtgtttcaaatcgatgcatcacaacttttgagaaagcacatgacggtgctgaagtttgttctgccattttttccaaaaattctaaatacattctctcaagtggaaaagactctgtagctaaactttgggaaatatcaacgggacgaacactggtcagatacacgg

SEQ ID NO: 116775 - DNA, 1038 bp, Artificial Sequence
  derived and/or modified sequence
atgtacagaaccaaggtgggcctgaaggacagacagcagctgtacaagctgatcatcagccagctgctgtacgacggctacatcagcatcgccaacggcctgatcaacgagatcaagccccagagcgtgtgcgcccccagcgagcagctgctgcacctgatcaagctgggcatggagaacgacgacaccgccgtgcagtacgccatcggcagaagcgacaccgtggcccccggcaccggcatcgacctggagttcgacgccgacgtgcagaccatgagccccgaggccagcgagtacgagacctgctacgtgaccagccacaagggcccctgcagagtggccacctacagcagagacggccagctgatcgccaccggcagcgccgacgccagcatcaagatcctggacaccgagagaatgctggccaagagcgccatgcccatcgaggtgatgatgaacgagaccgcccagcagaacatggagaaccaccccgtgatcagaaccctgtacgaccacgtggacgaggtgacctgcctggccttccaccccaccgagcagatcctggccagcggcagcagagactacaccctgaagctgttcgactacagcaagcccagcgccaagagagccttcaagtacatccaggaggccgagatgctgagaagcatcagcttccaccccagcggcgacttcatcctggtgggcacccagcaccccaccctgagactgtacgacatcaacaccttccagtgcttcgtgagctgcaacccccaggaccagcacaccgacgccatctgcagcgtgaactacaacagcagcgccaacatgtacgtgaccggcagcaaggacggctgcatcaagctgtgggacggcgtgagcaacagatgcatcaccaccttcgagaaggcccacgacggcgccgaggtgtgcagcgccatcttcagcaagaacagcaagtacatcctgagcagcggcaaggacagcgtggccaagctgtgggagatcagcaccggcagaaccctggtgagatacacctag

SEQ ID NO: 116776 - DNA, 1257 bp, Artificial Sequence
  derived and/or modified sequence
atgtacagactgatcatcagccagctgctgtacgacggctacatcagcatcgccaacggcctgatcaacgagatcaagccccagagcgtgtgcgcccccagcgagcagctgctgcacctgatcaagctgggcatggagaacgacgacaccgccgtgcagtacgccatcggcagaagcgacaccgtggcccccggcaccggcatcgacctggagttcgacgccgacgtgcagaccatgagccccgaggccagcgagtacgagacctgctacgtgaccagccacaagggcccctgcagagtggccacctacagcagagacggccagctgatcgccaccggcagcgccgacgccagcatcaagatcctggacaccgagagaatgctggccaagagcgccatgcccatcgaggtgatgatgaacgagaccgcccagcagaacatggagaaccaccccgtgatcagaaccctgtacgaccacgtggacgaggtgacctgcctggccttccaccccaccgagcagatcctggccagcggcagcagagactacaccctgaagctgttcgactacagcaagcccagcgccaagagagccttcaagtacatccaggaggccgagatgctgagaagcatcagcttccaccccagcggcgacttcatcctggtgggcacccagcaccccaccctgagactgtacgacatcaacaccttccagtgcttcgtgagctgcaacccccaggaccagcacaccgacgccatctgcagcgtgaactacaacagcagcgccaacatgtacgtgaccggcagcaaggacggctgcatcaagctgtgggacggcgtgagcaacagatgcatcaccaccttcgagaaggcccacgacggcgccgaggtgtgcagcgccatcttcagcaagaacagcaagtacatcctgagcagcggcaaggacagcgtggccaagctgtgggagatcagcaccggcagaaccctggtgagatacaccggcgccggcctgagcggcagacaggtgcacagaacccaggccgtgttcaaccacaccgaggactacgtgctgctgcccgacgagagaaccatcagcctgtgctgctgggacagcagaaccgccgagagaagaaacctgctgagcctgggccacaacaacatcgtgagatgcatcgtgcacagccccaccaaccccggcttcatgacctgcagcgacgacttcagagccagattctggtacagaagaagcaccaccgactag

SEQ ID NO: 116777 - DNA, 429 bp, Artificial Sequence
  derived and/or modified sequence
atgtacagaaccaaggtgggcctgaaggacagacagcagctgtacaagctgatcatcagccagctgctgtacgacggctacatcagcatcgccaacggcctgatcaacgagatcaagccccagagcgtgtgcgcccccagcgagcagctgctgcacctgatcaagctgggcatggagaacgacgacaccgccgtgcagtacgccatcggcagaagcgacaccgtggcccccggcaccggcatcgacctggagttcgacgccgacgtgcagaccatgagccccgaggccagcgagtacgagacctgctacgtgaccagccacaagggcccctgcagagtggccacctacagcagagacggccagctgatcgccaccggcagcgccgacgccagcatcaagatcctggacaccgagagaatgctggcctag

SEQ ID NO: 116778 - DNA, 1296 bp, Artificial Sequence
  derived and/or modified sequence
atgtacagaaccaaggtgggcctgaaggacagacagcagctgtacaagctgatcatcagccagctgctgtacgacggctacatcagcatcgccaacggcctgatcaacgagatcaagccccagagcgtgtgcgcccccagcgagcagctgctgcacctgatcaagctgggcatggagaacgacgacaccgccgtgcagtacgccatcggcagaagcgacaccgtggcccccggcaccggcatcgacctggagttcgacgccgacgtgcagaccatgagccccgaggccagcgagtacgagacctgctacgtgaccagccacaagggcccctgcagagtggccacctacagcagagacggccagctgatcgccaccggcagcgccgacgccagcatcaagatcctggacaccgagagaatgctggccaagagcgccatgcccatcgaggtgatgatgaacgagaccgcccagcagaacatggagaaccaccccgtgatcagaaccctgtacgaccacgtggacgaggtgacctgcctggccttccaccccaccgagcagatcctggccagcggcagcagagactacaccctgaagctgttcgactacagcaagcccagcgccaagagagccttcaagtacatccaggaggccgagatgctgagaagcatcagcttccaccccagcggcgacttcatcctggtgggcacccagcaccccaccctgagactgtacgacatcaacaccttccagtgcttcgtgagctgcaacccccaggaccagcacaccgacgccatctgcagcgtgaactacaacagcagcgccaacatgtacgtgaccggcagcaaggacggctgcatcaagctgtgggacggcgtgagcaacagatgcatcaccaccttcgagaaggcccacgacggcgccgaggtgtgcagcgccatcttcagcaagaacagcaagtacatcctgagcagcggcaaggacagcgtggccaagctgtgggagatcagcaccggcagaaccctggtgagatacaccggcgccggcctgagcggcagacaggtgcacagaacccaggccgtgttcaaccacaccgaggactacgtgctgctgcccgacgagagaaccatcagcctgtgctgctgggacagcagaaccgccgagagaagaaacctgctgagcctgggccacaacaacatcgtgagatgcatcgtgcacagccccaccaaccccggcttcatgacctgcagcgacgacttcagagccagattctggtacagaagaagcaccaccgactag

SEQ ID NO: 116779 - DNA, 1296 bp, Artificial Sequence
  derived and/or modified sequence
atgtaccgcaccaaagtcgggttgaaggatagacaacagttatacaagctcatcatcagccagctgctgtatgacggttatatctctatagctaatggccttatcaatgaaatcaagccacagtccgtttgcgctccgtcagaacagttactgcacctcatcaaactgggcatggaaaatgacgataccgccgtacagtacgcaatcggccgatcagacacagtcgcacccgggactgggatagacctggaatttgacgcagatgtgcagacaatgagccccgaagcttccgagtacgagacctgctatgttacatcacacaaagggccatgtcgcgtggccacatactcacgggatggccaactgattgccacagggagcgccgacgcgagtattaagattctagacacagaacgcatgctcgccaaatccgccatgcctattgaagtgatgatgaacgagaccgcacagcagaatatggaaaatcacccagttatccggactctttatgatcatgtcgacgaggtcacctgcctcgccttccaccccactgagcaaattctggcatccggcagcagagattacactctgaagctgttcgactactccaagccatcggcaaagcgggcctttaaatacatccaagaggctgaaatgctccggtccatatcattccacccatccggcgacttcattctagttggaactcagcaccccacccttcgcctgtatgatatcaataccttccagtgtttcgtgtcgtgtaatccacaagatcagcacacagacgcaatttgtagtgtcaactacaactcatcagcaaacatgtacgtgaccggttcaaaagacggttgtatcaagctctgggatggcgtgtcaaatcggtgcattactaccttcgagaaagcacatgacggagcagaggtctgttccgccattttcagcaagaactccaagtacatcctttctagcggaaaagattccgtggccaagctgtgggaaatatcaacaggcaggacgctagtgcgatataccggggctgggctcagcggccggcaggtacatagaacacaggcggtctttaatcacacagaggattatgtgctactgccagatgaacgtaccattagtttatgctgctgggactctcgaacagcggagcgaagaaacctgctgtccctcgggcataataacattgtgagatgtatagttcactcaccgacaaatcccggctttatgacctgttcagacgatttcagggctcgcttttggtacaggaggtcaaccacagactag

SEQ ID NO: 116780 - DNA, 1296 bp, Artificial Sequence
  derived and/or modified sequence
atgtaccgcaccaaggtgggcctgaaggaccggcagcagctgtacaagctgatcatcagccagctgctgtatgatggctacatcagcatcgccaacggcctcatcaatgagatcaagccccagagcgtgtgtgcccccagcgagcagctgctgcacctgatcaagctgggcatggagaatgatgacacagctgtgcagtatgccatcggccgcagtgacacagtggcccctggcactggaattgacctggagtttgatgctgatgtgcagaccatgagccctgaggcctctgaatatgagacctgctacgtgaccagccacaagggcccctgccgggtggccacctacagcagagatggccagctgattgccactggatctgcagatgccagcatcaagatcctggacacagagaggatgctggccaagagcgccatgcccatcgaggtgatgatgaatgaaacagcccagcagaacatggagaaccaccctgtgatccgcaccctgtatgaccacgtggatgaggtgacctgcctggccttccaccccacagagcagatcctggccagcggcagccgggactacaccctgaagctgtttgactacagcaagcccagcgccaagagggccttcaagtacatccaggaggccgagatgctgcggagcatctccttccaccccagcggggacttcatcctggtgggcacccagcaccccaccctgcggctgtatgacatcaacaccttccagtgctttgtgtcctgcaacccccaggaccagcacacagatgccatctgcagcgtgaactacaacagcagcgccaacatgtatgtgacaggcagcaaggatggctgcatcaagctgtgggatggagtgagcaaccgctgcatcaccacctttgagaaggcccatgatggagctgaggtgtgcagcgccatcttcagcaagaacagcaagtacatcctgagcagcggcaaggacagcgtggccaagctgtgggagatcagcactggaagaaccctggtgcgctacacaggagctggcctgagcggccggcaggtgcacaggacccaggccgtgttcaaccacacagaagattatgtgctgctgcctgatgagaggaccatcagcctgtgctgctgggacagcaggacagctgagaggaggaacctgctgagcctgggccacaacaacatcgtgcgctgcatcgtgcacagccccaccaaccctggcttcatgacctgcagtgatgacttccgggcccgcttctggtaccgccgcagcaccacagactag

SEQ ID NO: 116781 - DNA, 1296 bp, Artificial Sequence
  derived and/or modified sequence
atgtaccggaccaaggtgggcctgaaggaccggcagcagctgtacaagctgatcattagccaattgctgtatgatgggtacatcagcattgcaaacgggcttatcaatgagattaaaccgcagtccgtttgcgccccaagcgagcagctcctgcacctgattaaactaggcatggaaaacgatgacacagccgttcagtacgcaattggacgatcagacactgtcgccccgggtacgggtatcgatcttgagtttgacgcggatgtacagacgatgagcccggaagcctccgaatatgaaacatgttatgtgacgtcccataagggcccttgccgggtcgctacctattccagagacggtcaactgattgcgacagggtcagccgacgcttctatcaaaattctggatacagaaagaatgcttgccaagagtgccatgccaatagaggtcatgatgaacgagaccgcccagcagaatatggagaatcaccccgtgatccgcactttatacgaccacgtggatgaggtgacttgtctggcctttcaccccaccgagcaaattctagcctctggttctagggactacacgctcaagctctttgactacagcaagcctagcgccaaacgggcttttaagtacattcaggaggccgaaatgctccgcagcatttcttttcacccgagcggggactttattctcgtgggcactcagcatcccactcttcggctttatgatatcaatactttccagtgcttcgtttcttgcaacccccaagaccagcacaccgatgcaatttgttctgtgaattataactcaagcgctaatatgtatgtgaccgggagtaaggacggatgcatcaaactgtgggatggggtgtccaaccggtgtattacaacctttgagaaggcacatgatggggctgaagtctgtagtgctatcttctccaaaaactctaagtacatcctctcgtccggtaaggatagtgtcgctaaattatgggaaatctctaccgggcggacactggtcaggtacaccggggccggcctgtccggaaggcaagtgcataggacccaggctgtgtttaatcatactgaggactatgtgctgttaccagatgagcggaccatttccttgtgttgttgggacagtcgcacggccgaaaggcggaacctgctgtcactgggtcataataatatcgtgcgctgtattgtgcacagtcctacaaacccaggatttatgacttgttctgacgatttcagggcacggttctggtaccgtagaagcacaactgattag

SEQ ID NO: 116782 - DNA, 1296 bp, Artificial Sequence
  derived and/or modified sequence
atgtacagaacgaaggtgggccttaaggatcgccagcagctctacaagcttattatctcccagcttctgtatgatggttacatctcaattgctaatgggctgatcaatgaaatcaaaccccagtcagtttgcgcgccatcggagcagctgctgcacctgatcaagctcgggatggaaaacgatgataccgctgtccagtacgcaatcggacggtccgataccgtcgccccaggaactggtatcgacttggaattcgatgcggacgttcagactatgtctccggaggcgtccgagtacgaaacctgctacgtgacctcgcataagggcccttgccgggtggcgacctacagtcgcgacggccagttgatcgcaaccgggtcagccgatgcttcaataaaaattctcgacaccgagcggatgttagccaaaagcgcaatgcctattgaagtgatgatgaatgagacagcccaacagaatatggagaatcaccctgtgatccggaccctgtatgaccacgtcgacgaggtgacctgtttggctttccacccgaccgaacaaatccttgcgagtggctcaagggactatacactgaagctcttcgattatagtaagccatctgccaaaagagctttcaagtacatacaggaagcggaaatgctgaggtcaatcagtttccatccctctggagactttattctggtgggcactcagcatcctactctgcggctctacgatataaacaccttccagtgttttgtgtcctgtaatcctcaggatcaacatacagatgctatttgttctgtgaactacaactcaagtgccaacatgtatgtgaccggctcaaaagatggatgtatcaagttatgggacggagtgagcaacagatgcatcacgacattcgaaaaagcccacgacggggcagaggtgtgtagcgctattttctccaaaaactctaaatatatcttatccagtggaaaggactccgttgccaaactgtgggagatttcaaccggtaggactttggtgagatatacaggtgccggactgagtggacggcaagttcaccggacccaggcagtattcaaccatacagaagactatgttctgttacccgatgaacgaaccattagtctgtgttgttgggactcaagaaccgccgagaggcgcaacctgctaagcctgggccataataacatagtcaggtgcatagtccacagccccaccaatcccggttttatgacttgtagtgatgacttccgggcacgattttggtatcgtagatcaactaccgactag

SEQ ID NO: 116783 - protein, 577 aa, Artificial Sequence
  derived and/or modified sequence
MAGLTVRDPAVDRSLRSVFVGNIPYEATEEQLKDIFSEVGPVVSFRLVYDRETGKPKGYGFCEYQDQETALSAMRNLNGREFSGRALRVDNAASEKNKEELKSLGTGAPVIESPYGETISPEDAPESISKAVASLPPEQMFELMKQMKLCVQNSPQEARNMLLQNPQLAYALLQAQVVMRIVDPEIALKILHRQTNIPTLIAGNPQPVHGAGPGSGSNVSMNQQNPQAPQAQSLGGMHVNGAPPLMQASMQGGVPAPGQMPAAVTGPGPGSLAPGGGMQAQVGMPGSGPVSMERGQVPMQDPRAAMQRGSLPANVPTPRGLLGDAPNDPRGGTLLSVTGEVEPRGYLGPPHQGPPMHHVPGHESRGPPPHELRGGPLPEPRPLMAEPRGPMLDQRGPPLDGRGGRDPRGIDARGMEARAMEARGLDARGLEARAMEARAMEARAMEARAMEARAMEVRGMEARGMDTRGPVPGPRGPIPSGMQGPSPINMGAVVPQGSRQVPVMQGTGMQGASIQGGSQPGGFSPGQNQVTPQDHEKAALIMQVLQLTADQIAMLPPEQRQSILILKEQIQKSTGAP

SEQ ID NO: 116784 - protein, 553 aa, Artificial Sequence
  derived and/or modified sequence
MAGLTVRDPAVDRSLRSVFVGNIPYEATEEQLKDIFSEVGPVVSFRLVYDRETGKPKGYGFCEYQDQETALSAMRNLNGREFSGRALRVDNAASEKNKEELKSLGTGAPVIESPYGETISPEDAPESISKAVASLPPEQMFELMKQMKLCVQNSPQEARNMLLQNPQLAYALLQAQVVMRIVDPEIALKILHRQTNIPTLIAGNPQAQSLGGMHVNGAPPLMQASMQGGVPAPGQMPAAVTGPGPGSLAPGGGMQAQVGMPGSGPVSMERGQVPMQDPRAAMQRGSLPANVPTPRGLLGDAPNDPRGGTLLSVTGEVEPRGYLGPPHQGPPMHHVPGHESRGPPPHELRGGPLPEPRPLMAEPRGPMLDQRGPPLDGRGGRDPRGIDARGMEARAMEARGLDARGLEARAMEARAMEARAMEARAMEARAMEVRGMEARGMDTRGPVPGPRGPIPSGMQGPSPINMGAVVPQGSRQVPVMQGTGMQGASIQGGSQPGGFSPGQNQVTPQDHEKAALIMQVLQLTADQIAMLPPEQRQSILILKEQIQKSTGAP

SEQ ID NO: 116785 - protein, 225 aa, Artificial Sequence
  derived and/or modified sequence
MSKEIFPFCRVGNIPYEATEEQLKDIFSEVGPVVSFRLVYDRETGKPKGYGFCEYQDQETALSAMRNLNGREFSGRALRVDNAASEKNKEELKSLGTGAPVIESPYGETISPEDAPESISKAVASLPPEQMFELMKQMKLCVQNSPQEARNMLLQNPQLAYALLQAQVVMRIVDPEIALKILHRQTNIPTLIAGNPQPVHGAGPGSGSNVSMNQQNPQAPQAQSL

SEQ ID NO: 116786 - DNA, 1734 bp, Artificial Sequence
  derived and/or modified sequence
atggctggcctgaccgtcagggatcccgctgtcgatcggtccttacgctccgtgttcgtcgggaatatcccgtatgaggcaacggaagaacagctgaaggacatttttagcgaagttggacccgtagtgtctttccggcttgtctacgatagagagaccggcaagcctaagggctatggtttctgcgaataccaggaccaggagaccgctttatccgctatgaggaacctcaacggtcgcgaattctctgggagagcactacgtgtggacaatgctgctagcgagaagaacaaagaggaactcaaaagcctcggtacaggggccccggtcattgagagcccttacggggaaaccatttccccagaagacgccccagagagcatcagcaaggcggtcgcctcccttccacctgagcagatgttcgagcttatgaagcagatgaaactgtgcgtgcaaaactctccccaggaggccagaaatatgttgcttcagaatcctcagctcgcctacgcgctgctgcaggcccaggttgtgatgaggatcgtggaccctgagattgcactgaagattctgcacaggcagactaatatcccaacactcattgccggcaatccccagccagtccacggcgccggacctgggtccggcagtaacgtgtctatgaatcagcagaaccctcaggcccctcaggctcagtccctaggtggaatgcacgtgaatggggcaccaccgctcatgcaagccagtatgcaaggaggcgtgccagcccctggccaaatgcccgcagcagtcactgggcctggccccgggagcctcgccccagggggaggcatgcaagcacaggtgggtatgcccggatccggtccagtcagtatggagcgagggcaggtgccaatgcaggatccaagggctgctatgcaacggggctctctgcctgccaatgtgccaactcctcgaggactgctcggggatgccccaaacgatccccgcggcggaactttactcagtgttaccggggaggttgaaccgcggggctatctgggccctccccaccagggtcctccaatgcatcacgtgcccggtcatgaatcccgaggcccacctccacacgagctcaggggaggacctctgcctgagcctcgaccactgatggccgagccccgtggccccatgcttgatcaaagggggcccccccttgatgggagaggcggcagggatccccggggcatcgacgcaaggggcatggaggcccgcgcaatggaggccagaggactggacgcaagaggattggaggcacgggccatggaggcacgcgcaatggaagcacgagccatggaagctagagctatggaagctcgggcgatggaggtccgcgggatggaagctagaggtatggacacaagggggcccgtccctgggccgaggggtcccatcccctctgggatgcagggccccagtcccatcaacatgggcgccgtggtgccgcaaggatcacgtcaagtgcctgtcatgcaaggcaccggaatgcaaggtgcttccatccagggaggcagtcaacctggcgggttcagccccggccaaaatcaagtcacaccccaggaccacgagaaagcagccctcatcatgcaggtgctgcagctcacggcggaccagatcgccatgctgccccccgagcagaggcaatcaatccttatcctgaaggagcaaatccagaaaagcactggcgcaccttag

SEQ ID NO: 116787 - DNA, 1662 bp, Artificial Sequence
  derived and/or modified sequence
atggccggacttaccgtgcgtgatcctgccgttgataggtctctccgaagcgtctttgttgggaacattccttatgaggctacagaggaacaactcaaggacatatttagtgaggtggggcccgttgtatctttcaggctggtttatgacagggaaacggggaagcctaagggctacggcttctgcgagtatcaggaccaagaaaccgcactgtcagctatgaggaatctgaacggccgggagttctctgggagggccttaagggtggataatgccgcatccgaaaagaacaaggaggagcttaagtcactggggacaggggctcctgtaattgaatcaccctacggcgaaaccattagccccgaagacgcccccgaatctatctcaaaagccgtggccagtctaccacctgagcagatgtttgagctcatgaaacaaatgaaactctgcgttcagaactcgcctcaggaggcccgaaatatgctcctgcagaatccgcaactggcctacgccttgttacaggcgcaggtcgtgatgcgcatcgtggatcccgaaattgcactgaaaattctgcacagacagacaaatatacccacgctgatcgccgggaacccccaagcgcagtctttaggcggaatgcacgtgaatggtgcccctcctttgatgcaagctagcatgcagggcggtgttccggcaccaggtcaaatgccagccgccgtgaccggaccgggtcctggctccctggcccctggcgggggaatgcaagcacaagtcggaatgcccgggtccggacccgtcagcatggagcgagggcaagtgccgatgcaggatccgagagctgccatgcagagggggtctctcccagcgaatgtgccgacccctcggggcctactgggggatgcacctaatgatccacgcggcggaacgttactaagtgtcactggcgaggtggagccccggggctatctcggaccccctcaccaaggccctccaatgcaccacgttcccggtcacgagtcacggggccccccaccacacgaactccgtgggggacctttacccgagccacgtccactgatggccgaacctaggggtcctatgctggaccagcgcggtcccccccttgatggccggggcggcagagatccccgtgggatagacgcccggggaatggaggcaagggcgatggaggcaaggggactggatgcaagaggactagaagcacgagccatggaggcccgggctatggaagccagggctatggaggcacgcgcgatggaggcacgagctatggaagttcggggaatggaggctcgaggtatggacacccgaggaccagtgccagggcctagaggccccattccttcgggtatgcagggaccgtctcctatcaacatgggcgcggtagttccccaggggagccgacaggtgccagtcatgcagggaactggaatgcagggtgcctctatccagggaggctcccagccaggcggcttctcacctgggcagaatcaggtcaccccgcaggatcacgaaaaggctgccctgatcatgcaggttctacagttaaccgccgatcagattgctatgcttcctccagagcagaggcagagcatcctgattctaaaggaacaaatccagaagagtaccggcgcgccttag

SEQ ID NO: 116788 - DNA, 1734 bp, Artificial Sequence
  derived and/or modified sequence
atggccggcctgactgtgcgggaccctgctgtggacaggagcctgcggtctgtgtttgtgggcaacatcccctatgaggccacagaggagcagctgaaggacatcttcagcgaggtgggccctgtggtgtccttccggctggtgtatgaccgggagaccgggaagcccaagggctacggcttctgtgagtaccaggaccaggagacagccctgagcgccatgaggaacctgaatggccgggagttcagcggccgggccctgcgggtggacaatgctgccagcgagaagaacaaggaggagctgaagagcctgggcaccggggcccctgtgattgagagcccctatggagagaccatcagcccagaagatgcccctgagagcatcagcaaggctgtggccagcctgcccccagagcagatgtttgagctgatgaagcagatgaagctgtgtgtgcagaacagcccccaggaggccaggaacatgctgctgcagaacccccagctggcctatgccctgctgcaggcccaggtggtgatgagaattgtggaccctgagatcgccctgaagatcctgcaccggcagaccaacatccccaccctgattgctggcaacccccagcctgtgcatggagctggccctggcagcggcagcaatgtgtccatgaaccagcagaacccccaggccccccaggcccagagcctgggcggcatgcacgtgaatggagccccacccctgatgcaggcctccatgcagggcggcgtgcctgcccctggccagatgcctgctgctgtgactggacctggccctggcagcctggcccctgggggcggcatgcaggcccaggtgggcatgcctggcagcggccctgtgtccatggagcggggccaggtgcccatgcaggacccccgggccgccatgcagaggggcagcctgcctgccaacgtgcccaccccccggggcctgctgggagatgccccaaatgacccccggggcggcaccctgctgtctgtgactggagaggtggagccccggggctacctgggccccccccaccagggcccccccatgcaccacgtgcccggccacgagagccggggccccccacctcatgagctgcggggcggccccctgcctgagccccggcccctgatggccgagccccggggccccatgctggaccagaggggcccccccctggatggccggggcggccgggacccccggggcattgatgcccggggcatggaggcccgggccatggaggcccggggcctggatgcccggggcctggaggcccgggccatggaggcccgggccatggaggcccgggccatggaggcccgggccatggaggcccgggccatggaggtgcggggcatggaggcccggggcatggacacccggggccctgtgcccggcccccggggccccatccccagcggcatgcagggccccagccccatcaacatgggcgctgtggtgccccagggcagccggcaggtgcctgtgatgcagggcaccggcatgcagggcgccagcatccagggcggcagccagcccggcggcttcagccctggccagaaccaggtgaccccccaggaccacgagaaggccgccctgatcatgcaggtgctgcagctgacagctgaccagatcgccatgctgcccccagagcagaggcagagcatcctgatcctgaaggagcagatccagaagagcactggagccccctag

SEQ ID NO: 116789 - DNA, 1662 bp, Artificial Sequence
  derived and/or modified sequence
atggccggcctgactgtgcgggaccctgctgtggacaggagcctgcggtctgtgtttgtgggcaacatcccctatgaggccacagaggagcagctgaaggacatcttcagcgaggtgggccctgtggtgtccttccggctggtgtatgaccgggagaccgggaagcccaagggctacggcttctgtgagtaccaggaccaggagacagccctgagcgccatgaggaacctgaatggccgggagttcagcggccgggccctgcgggtggacaatgctgccagcgagaagaacaaggaggagctgaagagcctgggcaccggggcccctgtgattgagagcccctatggagagaccatcagcccagaagatgcccctgagagcatcagcaaggctgtggccagcctgcccccagagcagatgtttgagctgatgaagcagatgaagctgtgtgtgcagaacagcccccaggaggccaggaacatgctgctgcagaacccccagctggcctatgccctgctgcaggcccaggtggtgatgagaattgtggaccctgagatcgccctgaagatcctgcaccggcagaccaacatccccaccctgattgctggcaacccccaggcccagagcctgggcggcatgcacgtgaatggagccccacccctgatgcaggcctccatgcagggcggcgtgcctgcccctggccagatgcctgctgctgtgactggacctggccctggcagcctggcccctgggggcggcatgcaggcccaggtgggcatgcctggcagcggccctgtgtccatggagcggggccaggtgcccatgcaggacccccgggccgccatgcagaggggcagcctgcctgccaacgtgcccaccccccggggcctgctgggagatgccccaaatgacccccggggcggcaccctgctgtctgtgactggagaggtggagccccggggctacctgggccccccccaccagggcccccccatgcaccacgtgcccggccacgagagccggggccccccacctcatgagctgcggggcggccccctgcctgagccccggcccctgatggccgagccccggggccccatgctggaccagaggggcccccccctggatggccggggcggccgggacccccggggcattgatgcccggggcatggaggcccgggccatggaggcccggggcctggatgcccggggcctggaggcccgggccatggaggcccgggccatggaggcccgggccatggaggcccgggccatggaggcccgggccatggaggtgcggggcatggaggcccggggcatggacacccggggccctgtgcccggcccccggggccccatccccagcggcatgcagggccccagccccatcaacatgggcgctgtggtgccccagggcagccggcaggtgcctgtgatgcagggcaccggcatgcagggcgccagcatccagggcggcagccagcccggcggcttcagccctggccagaaccaggtgaccccccaggaccacgagaaggccgccctgatcatgcaggtgctgcagctgacagctgaccagatcgccatgctgcccccagagcagaggcagagcatcctgatcctgaaggagcagatccagaagagcactggagccccctag

SEQ ID NO: 116790 - DNA, 1734 bp, Artificial Sequence
  derived and/or modified sequence
atggccggcctgaccgtgcgggaccccgccgtggaccggagcctgaggtccgtgttcgttggcaacatcccctacgaggcaacagaagagcagctcaaggatattttttctgaggtcggcccagtcgtgtcttttcgcctcgtatacgatagggagacggggaagcccaagggatatgggttttgtgagtatcaggatcaggagacagcgctgagtgcgatgagaaacctcaatggacgcgagtttagtggccgagcgctgagggtcgacaacgcggccagtgagaaaaataaagaagaactgaagagcttaggcaccggtgccccggtcatagaatccccttacggagagacaatctcgcccgaagacgcgccagagagcattagcaaagccgtggcatcattgccacccgagcagatgttcgagttgatgaagcagatgaagttgtgcgtccagaatagcccacaggaagcaagaaacatgctcctacagaacccccaactggcttatgccctgctgcaggcacaagttgtgatgcggatcgtggatccagagatcgcacttaagattctgcatagacagaccaacattccaaccctgatcgctggtaatcctcagcccgtgcacggcgcaggtcccggaagcggtagtaatgtatctatgaaccagcagaaccctcaagctccgcaagcccagagtctgggcggtatgcatgtgaacggcgctccaccccttatgcaggcaagcatgcagggcggagtccctgcacccggccagatgccggctgctgtgaccggtcccgggcccggtagtctggccccaggaggcgggatgcaagctcaggtaggcatgcccggaagcggtcctgtctccatggaacgaggacaggtgcctatgcaggatcctagagcagcaatgcaaagaggttccctcccagccaatgttcccacccctagggggctgcttggcgatgcacctaacgacccaagaggagggactctgttaagtgttaccggcgaggtggagccccgaggttacctgggcccaccccatcagggacccccaatgcaccacgtaccagggcacgagagccgcggacctccgcctcacgagctgaggggtggccccttgcccgaaccaagaccactgatggctgagcccaggggaccaatgttggatcagaggggtccccccctcgacggacggggaggccgcgacccacgtggtatcgatgcacgaggaatggaggctagagccatggaagcgcggggactggacgcacgagggctagaagcccgtgccatggaagctcgcgctatggaggcccgggccatggaggcccgagccatggaagcaagggccatggaagttcggggtatggaggcgagaggcatggacactaggggccccgttcccggaccccgtggccccattccaagcggtatgcaagggcccagccctattaacatgggggccgtggtgccccaagggagcagacaggtacccgtgatgcagggaacgggcatgcagggagcttcaatccagggggggagtcagcctggaggatttagtcccggacagaatcaggtgacacctcaagaccatgagaaagcagcattgattatgcaggtgctgcagttaaccgccgatcagatcgcaatgctacccccagagcaaaggcaatctattttaatcctcaaggagcagatacaaaaatctacaggggccccgtag

SEQ ID NO: 116791 - DNA, 1662 bp, Artificial Sequence
  derived and/or modified sequence
atggccggcctgaccgtgcgggaccccgccgtggaccggagcctgcgcagcgtgttcgtgggcaacatcccctatgaggctacggaggaacaactcaaggatatttttagcgaggtgggaccagttgtcagctttcggttagtctacgatagggagactggcaaacctaaagggtacggcttttgtgagtatcaggatcaggagaccgcactgagcgccatgagaaatctgaatggcagagagttcagcggccgagccctgagagttgacaatgccgcttctgagaaaaacaaggaggaactgaaatcgctcggcactggagcccccgtgatagaaagcccatacggggagacaattagccccgaagatgcacccgagtctatttctaaagccgtcgccagcctgcctcccgagcagatgttcgaactgatgaagcagatgaaattgtgtgtacagaacagcccccaagaggcacgaaacatgttattgcagaatccccagctggcctatgccttgcttcaagcccaggtggtgatgcggattgtggatccagaaatagccctgaagatcctgcatcgtcagactaatataccaactctgatcgccggcaatccccaggcacagtcgctgggaggaatgcatgttaatggcgcccccccactgatgcaggccagcatgcagggcggagtgcctgccccaggacagatgcctgccgccgtcacaggtccgggcccaggcagcctcgcacccggaggcgggatgcaggcccaggtggggatgcctgggagcggtcctgtgagcatggagagaggacaggtcccaatgcaggatccgagggcagcaatgcagcgcggctcactacccgctaacgtccctaccccgaggggacttctcggcgacgctccaaatgatcccagaggaggaactctgctgagcgttacaggcgaggttgaaccaagaggttatctggggccaccacaccagggtccccctatgcaccacgtgcctggtcacgagagtagaggcccaccaccccacgagcttcgcggcgggcctctcccagagcccagacccctgatggccgagccgcgggggccgatgctcgaccagcgcgggcctccactggatggccgcgggggtagagacccccggggcattgatgccagggggatggaggcccgggccatggaggcaagaggcctcgacgcccgaggcctggaggctcgcgccatggaagccagagcgatggaggctcgcgccatggaggcccgcgcaatggaagcacgggctatggaagtgcgaggaatggaggcccgcgggatggacacccgaggccccgtgcccggaccacgggggccaatcccgtccggcatgcaaggaccatcccccatcaatatgggcgcagttgtgccccagggaagtcgccaggtgcccgtgatgcagggaactggcatgcagggggccagcattcagggggggtcacagccaggtggtttcagtcccgggcaaaatcaagtgacccctcaggatcatgaaaaagctgcactaattatgcaagttcttcagctcaccgcagatcagatcgctatgcttcctcctgaacaaagacagagcatcctgatcttgaaagagcagattcagaaatccaccggcgccccatag

SEQ ID NO: 116792 - DNA, 1734 bp, Artificial Sequence
  derived and/or modified sequence
atggccggtctgactgtccgagatcctgcggtggatcgcagcctgcgatccgtgtttgtggggaatatcccctatgaggctaccgaggaacagctcaaagacatattttcggaagtcggtccagttgtctccttccgtcttgtatacgatcgggaaaccggtaagcccaagggctatggattctgtgagtatcaggatcaggaaaccgccctatccgcaatgaggaatctgaatggcagagagttcagcggaagggccctgcgggtggacaacgcggcatccgagaagaacaaggaagagctcaaatccttggggacgggggctcccgtaatcgagagcccctatggcgagactatttcacccgaggatgccccagagtctatttccaaagcagtggcctccttgccacccgagcagatgtttgaactaatgaagcagatgaaactgtgcgtgcaaaacagtcctcaggaggctcgaaacatgttgctccagaatccacagctcgcctacgccctgctgcaggcgcaagttgtgatgcgcattgtggatcccgagattgccctgaagattctccataggcagacaaacatcccaacactgattgctggaaacccccagcctgtccacggagcgggacccggaagtggctccaatgtcagcatgaatcagcagaatccacaggccccacaggctcagtcattaggcggaatgcatgtcaacggtgccccacccttaatgcaggcttcaatgcagggcggtgtcccagcccctggccagatgcccgcagctgttacaggacctgggccaggttccctcgcgccaggaggcggaatgcaggcccaggtgggcatgccgggttcaggacctgtgagcatggaaaggggccaggtgccgatgcaagaccctcgcgctgccatgcaacgagggagcctccctgcaaatgtgcccacaccaagggggctccttggggacgccccaaatgacccgcgagggggaacactacttagcgttacaggtgaagtcgagccgcgaggatatttgggcccacctcaccaagggcctcctatgcatcatgtgccgggacacgaaagtcgaggcccaccacctcatgagctgaggggcggtcccttgcctgagccaaggccactgatggccgagccccgaggtccgatgctggatcagcggggacctcctctcgatggtcgaggcggaagagatcccaggggaatagatgccagaggcatggaggccagggctatggaggcccgaggcctggatgctagaggactcgaagcgcgagccatggaggcccgtgctatggaggccagagccatggaggctagggctatggaggccagggctatggaggtccggggtatggaagcacggggtatggacactagagggccagtccctgggcctcgcggtcctataccaagcggcatgcaggggccatctcccattaatatgggcgctgtcgtgccccaggggtctaggcaggtgcccgttatgcaggggactggtatgcagggcgctagcatccaggggggatcccaacctggagggttttctccgggtcagaaccaagtcactccacaggatcacgagaaggctgccctgatcatgcaggtgctgcagctcaccgccgaccagatcgccatgctgcctcccgaacagagacagtcaatcctgatactcaaggagcaaatccagaagagtacaggagccccttag

SEQ ID NO: 116793 - DNA, 1662 bp, Artificial Sequence
  derived and/or modified sequence
atggctggtctcacagtccgagatccggcagtcgaccgctccttgagatcagtgttcgtcggtaatatcccctacgaggccactgaggagcagttgaaagacatattctccgaagtgggacctgtggtttccttcaggctggtctacgaccgtgaaaccggaaaacctaagggatacggattctgtgagtaccaggaccaggagaccgccctatcagccatgcggaacctgaacggcagagaattctccggcagggctctaagggttgataacgcagccagcgagaagaacaaggaggagctgaaatccctggggactggagcccctgtgatcgaaagcccttatggggaaactatttcacctgaggacgccccagagtcaatttccaaagctgttgccagcctgccccctgaacaaatgtttgagcttatgaaacaaatgaaactgtgcgtccagaattctccgcaagaggcaaggaacatgctgctgcagaacccccagctggcatatgcattgctgcaggctcaggtagttatgcgcatcgtggacccagagattgctctgaaaattctacacagacaaaccaacatccctaccttgatcgcgggtaatccgcaggcccagagcttagggggaatgcacgtaaacggcgctccacccttgatgcaggcttccatgcaggggggtgtccctgcccctgggcagatgcccgctgcagtgactggccctggaccaggatctctggcgccagggggaggcatgcaggcccaagttggaatgccaggttcaggtcccgtctccatggaacgcggacaggttcccatgcaggatcctcgggctgctatgcagcggggatctttgcctgcaaatgtcccaactccacgaggcctgctgggggacgcaccgaacgacccacggggaggtaccctgctgtctgtcacaggagaggtcgaaccacgaggctaccttggcccaccacaccagggtccacctatgcaccacgttcctggtcatgagtcccgcggacctccccctcatgaactgagagggggacccctgccagagccacggccactgatggccgagcccagggggcctatgttggaccagcggggtcctccactcgatgggaggggtgggagagatcccaggggcattgatgccaggggcatggaggcaagagctatggaggccagagggttggatgccaggggtttagaagcaagggccatggaagccagggccatggaagctcgcgcaatggaagctagggcaatggaggctagagccatggaagtgaggggcatggaggctagaggaatggacacgcgcggaccagtgcctggccctagaggaccaatcccctcaggcatgcagggacccagccccatcaacatgggtgcggtggtgccccaggggtccaggcaggttccagttatgcaggggactggcatgcagggcgcttcaattcaaggagggtcacagcctggaggtttttcgcctggccaaaatcaggtgacccctcaggaccacgagaaagcagcactgataatgcaggtcctccagctgacggccgatcagattgccatgttaccgcctgagcaacggcaaagcatactcattctgaaggaacaaatccagaagtccaccggcgcaccatag

SEQ ID NO: 116794 - DNA, 1958 bp, Artificial Sequence
  derived and/or modified sequence
ccgactcaacagagctatggcgggtttgactgtgagagacccagcggtggatcgttctctacgttctgtgttcgtggggaacattccttatgaagctactgaagagcagttgaaggacatcttttctgaggttggacctgttgttagtttcagattggtatacgatagagagacaggaaagccaaagggttatggcttctgtgaataccaagaccaagagacagcacttagtgccatgcggaacctgaatgggcgcgaattcagtgggagagcacttcgagtggacaatgctgccagtgaaaagaacaaagaagagctgaagagccttggcactggtgcccctgtcattgagtcaccttatggagagaccatcagtcctgaggatgcccctgagtccattagcaaagcagttgccagccttccaccagagcagatgtttgagctgatgaaacaaatgaagctctgtgtccagaatagtccccaggaggcacggaacatgttacttcagaaccctcaactggcttatgctttgctgcaagcacaggtagtgatgagaattgtggatccggaaattgccctgaaaattctgcatcgccagacaaatatcccaacgctgattgcaggcaaccctcagccagtccatggtgctgggcctggctcaggatccaatgtgtcaatgaaccagcagaatcctcaggcccctcaggcccagtctttgggtggaatgcatgtcaatggcgcacctcctctgatgcaagcttctatgcagggtggagttccagcaccagggcaaatgccagctgctgtcacaggacctggccctggttccttagctcctggaggaggaatgcaggctcaggttggaatgccaggaagtggaccagtgtccatggaacgggggcaagtgccgatgcaagaccccagagcagctatgcagcggggatccttgcctgcgaatgtcccaacccctcgaggcttgttaggagatgctccgaatgatccacggggaggcactttactttctgtaactggagaggtagagcctagaggttacttgggaccacctcatcagggtccacccatgcaccatgtccctggccatgagagccgaggaccacccccacatgaactgaggggagggccattacccgagcccagacctctaatggcagaaccaagaggacccatgctagatcagaggggtccacccttggatggcagaggtggaagggatccccgaggaatagatgcacgagggatggaggcccgagccatggaggcaagagggttagatgccagaggattagaggcccgtgcaatggaggcccgtgcgatggaagctcgtgcaatggaggcccgagcgatggaggcccgtgcaatggaagtccgagggatggaggccagaggcatggataccagaggcccagtgcctggccccagaggacctatacctagtggaatgcagggtcccagtccaattaacatgggggcggttgtcccccagggatccagacaggtcccagtcatgcagggaacaggaatgcaaggagcaagtatacagggtggaagccagcctggcggctttagtcccgggcagaaccaagtcactccacaggatcatgagaaggctgctttgattatgcaggttctacaactgactgcagaccagattgccatgttgcctcctgagcaaaggcagagtatcctgattttaaaggaacaaatacagaaatccactggagcaccttgataggttttcaaaaatacctggcaagaaatctggaaattctataattttgttgaaatattgaaaaaagatgacctgcatcctaacccttgaatgactcaaatcagtgccaggtggaggactcccatcaccttctctcagaacaaaatcacttcattttattgtcttagtttgtatattttctgtgacttgaaataaactttgaacacaa

SEQ ID NO: 116795 - DNA, 2454 bp, Artificial Sequence
  derived and/or modified sequence
agagctatggcgggtttgactgtgagagacccagcggtggatcgttctctacgttctgtgttcgtggggaacattccttatgaagctactgaagagcagttgaaggacatcttttctgaggttggacctgttgttagtttcagattggtatacgatagagagacaggaaagccaaagggttatggcttctgtgaataccaagaccaagagacagcacttagtgccatgcggaacctgaatgggcgcgaattcagtgggagagcacttcgagtggacaatgctgccagtgaaaagaacaaagaagagctgaagagccttggcactggtgcccctgtcattgagtcaccttatggagagaccatcagtcctgaggatgcccctgagtccattagcaaagcagttgccagccttccaccagagcagatgtttgagctgatgaaacaaatgaagctctgtgtccagaatagtccccaggaggcacggaacatgttacttcagaaccctcaactggcttatgctttgctgcaagcacaggtagtgatgagaattgtggatccggaaattgccctgaaaattctgcatcgccagacaaatatcccaacgctgattgcaggcaaccctcaggcccagtctttgggtggaatgcatgtcaatggcgcacctcctctgatgcaagcttctatgcagggtggagttccagcaccagggcaaatgccagctgctgtcacaggacctggccctggttccttagctcctggaggaggaatgcaggctcaggttggaatgccaggaagtggaccagtgtccatggaacgggggcaagtgccgatgcaagaccccagagcagctatgcagcggggatccttgcctgcgaatgtcccaacccctcgaggcttgttaggagatgctccgaatgatccacggggaggcactttactttctgtaactggagaggtagagcctagaggttacttgggaccacctcatcagggtccacccatgcaccatgtccctggccatgagagccgaggaccacccccacatgaactgaggggagggccattacccgagcccagacctctaatggcagaaccaagaggacccatgctagatcagaggggtccacccttggatggcagaggtggaagggatccccgaggaatagatgcacgagggatggaggcccgagccatggaggcaagagggttagatgccagaggattagaggcccgtgcaatggaggcccgtgcgatggaagctcgtgcaatggaggcccgagcgatggaggcccgtgcaatggaagtccgagggatggaggccagaggcatggataccagaggcccagtgcctggccccagaggacctatacctagtggaatgcagggtcccagtccaattaacatgggggcggttgtcccccagggatccagacaggtcccagtcatgcagggaacaggaatgcaaggagcaagtatacagggtggaagccagcctggcggctttagtcccgggcagaaccaagtcactccacaggatcatgagaaggctgctttgattatgcaggttctacaactgactgcagaccagattgccatgttgcctcctgagcaaaggcagagtatcctgattttaaaggaacaaatacagaaatccactggagcaccttgataggttttcaaaaatacctggcaagaaatctggaaattctataattttgttgaaatattgaaaaaagatgacctgcatcctaacccttgaatgactcaaatcagtgccaggtggaggactcccatcaccttctctcagaacaaaatcacttcattttattgtcttagtttgtatattttctgtgacttgaaataaactttgaacacaattttagtacactgcaaattgatacacatgacctttttgcttttaaaaagcttaacactaagggtgaaaccttagatgtgttttctacccttactgcagtattgtactttaacatattgccatagttttgtttttaagttaaccacttattcttcttgatgatatttgagaatttctcagaagcaatgttttctggaacttggtttttgtttagtttgcttccagtaagaattattataaggctttgccctctgaaaatattctagcacttcggagtcttctaggagaaaatatcacatgcttagagctataaaatggtcagaaggctaacagagcaaagagcctagcacagctgtgtgtttagtttagaaaaatccaaatatcaaaatgcatttgtttcaatagcaggtctgaacatgtataattcagagttaagacaaaaattgttttagcactggtttgagtgtgtcagcaacacaagagactgttgacatttacttgtgtgttcttaaacttatcagtctaggcagtcaactttgaaagtttaaaaagccactgatttttcacatgctcaagatg

SEQ ID NO: 116796 - DNA, 1734 bp, Artificial Sequence
  derived and/or modified sequence
atggccggcctgaccgtgagagaccccgccgtggacagaagcctgagaagcgtgttcgtgggcaacatcccctacgaggccaccgaggagcagctgaaggacatcttcagcgaggtgggccccgtggtgagcttcagactggtgtacgacagagagaccggcaagcccaagggctacggcttctgcgagtaccaggaccaggagaccgccctgagcgccatgagaaacctgaacggcagagagttcagcggcagagccctgagagtggacaacgccgccagcgagaagaacaaggaggagctgaagagcctgggcaccggcgcccccgtgatcgagagcccctacggcgagaccatcagccccgaggacgcccccgagagcatcagcaaggccgtggccagcctgccccccgagcagatgttcgagctgatgaagcagatgaagctgtgcgtgcagaacagcccccaggaggccagaaacatgctgctgcagaacccccagctggcctacgccctgctgcaggcccaggtggtgatgagaatcgtggaccccgagatcgccctgaagatcctgcacagacagaccaacatccccaccctgatcgccggcaacccccagcccgtgcacggcgccggccccggcagcggcagcaacgtgagcatgaaccagcagaacccccaggccccccaggcccagagcctgggcggcatgcacgtgaacggcgccccccccctgatgcaggccagcatgcagggcggcgtgcccgcccccggccagatgcccgccgccgtgaccggccccggccccggcagcctggcccccggcggcggcatgcaggcccaggtgggcatgcccggcagcggccccgtgagcatggagagaggccaggtgcccatgcaggaccccagagccgccatgcagagaggcagcctgcccgccaacgtgcccacccccagaggcctgctgggcgacgcccccaacgaccccagaggcggcaccctgctgagcgtgaccggcgaggtggagcccagaggctacctgggccccccccaccagggcccccccatgcaccacgtgcccggccacgagagcagaggcccccccccccacgagctgagaggcggccccctgcccgagcccagacccctgatggccgagcccagaggccccatgctggaccagagaggcccccccctggacggcagaggcggcagagaccccagaggcatcgacgccagaggcatggaggccagagccatggaggccagaggcctggacgccagaggcctggaggccagagccatggaggccagagccatggaggccagagccatggaggccagagccatggaggccagagccatggaggtgagaggcatggaggccagaggcatggacaccagaggccccgtgcccggccccagaggccccatccccagcggcatgcagggccccagccccatcaacatgggcgccgtggtgccccagggcagcagacaggtgcccgtgatgcagggcaccggcatgcagggcgccagcatccagggcggcagccagcccggcggcttcagccccggccagaaccaggtgaccccccaggaccacgagaaggccgccctgatcatgcaggtgctgcagctgaccgccgaccagatcgccatgctgccccccgagcagagacagagcatcctgatcctgaaggagcagatccagaagagcaccggcgccccctag

SEQ ID NO: 116797 - DNA, 1662 bp, Artificial Sequence
  derived and/or modified sequence
atggccggcctgaccgtgagagaccccgccgtggacagaagcctgagaagcgtgttcgtgggcaacatcccctacgaggccaccgaggagcagctgaaggacatcttcagcgaggtgggccccgtggtgagcttcagactggtgtacgacagagagaccggcaagcccaagggctacggcttctgcgagtaccaggaccaggagaccgccctgagcgccatgagaaacctgaacggcagagagttcagcggcagagccctgagagtggacaacgccgccagcgagaagaacaaggaggagctgaagagcctgggcaccggcgcccccgtgatcgagagcccctacggcgagaccatcagccccgaggacgcccccgagagcatcagcaaggccgtggccagcctgccccccgagcagatgttcgagctgatgaagcagatgaagctgtgcgtgcagaacagcccccaggaggccagaaacatgctgctgcagaacccccagctggcctacgccctgctgcaggcccaggtggtgatgagaatcgtggaccccgagatcgccctgaagatcctgcacagacagaccaacatccccaccctgatcgccggcaacccccaggcccagagcctgggcggcatgcacgtgaacggcgccccccccctgatgcaggccagcatgcagggcggcgtgcccgcccccggccagatgcccgccgccgtgaccggccccggccccggcagcctggcccccggcggcggcatgcaggcccaggtgggcatgcccggcagcggccccgtgagcatggagagaggccaggtgcccatgcaggaccccagagccgccatgcagagaggcagcctgcccgccaacgtgcccacccccagaggcctgctgggcgacgcccccaacgaccccagaggcggcaccctgctgagcgtgaccggcgaggtggagcccagaggctacctgggccccccccaccagggcccccccatgcaccacgtgcccggccacgagagcagaggcccccccccccacgagctgagaggcggccccctgcccgagcccagacccctgatggccgagcccagaggccccatgctggaccagagaggcccccccctggacggcagaggcggcagagaccccagaggcatcgacgccagaggcatggaggccagagccatggaggccagaggcctggacgccagaggcctggaggccagagccatggaggccagagccatggaggccagagccatggaggccagagccatggaggccagagccatggaggtgagaggcatggaggccagaggcatggacaccagaggccccgtgcccggccccagaggccccatccccagcggcatgcagggccccagccccatcaacatgggcgccgtggtgccccagggcagcagacaggtgcccgtgatgcagggcaccggcatgcagggcgccagcatccagggcggcagccagcccggcggcttcagccccggccagaaccaggtgaccccccaggaccacgagaaggccgccctgatcatgcaggtgctgcagctgaccgccgaccagatcgccatgctgccccccgagcagagacagagcatcctgatcctgaaggagcagatccagaagagcaccggcgccccctag

SEQ ID NO: 116798 - protein, 440 aa, Artificial Sequence
  derived and/or modified sequence
MGSSHLLNKGLPLGVRPPIMNGPLHPRPLVALLDGRDCTVEMPILKDVATVAFCDAQSTQEIHEKVLNEAVGALMYHTITLTREDLEKFKALRIIVRIGSGFDNIDIKSAGDLGIAVCNVPAASVEETADSTLCHILNLYRRATWLHQALREGTRVQSVEQIREVASGAARIRGETLGIIGLGRVGQAVALRAKAFGFNVLFYDPYLSDGVERALGLQRVSTLQDLLFHSDCVTLHCGLNEHNHHLINDFTVKQMRQGAFLVNTARGGLVDEKALAQALKEGRIRGAALDVHESEPFSFSQGPLKDAPNLICTPHAAWYSEQASIEMREEAAREIRRAITGRIPDSLKNCVNKDHLTAATHWASMDPAVVHPELNGAAYRYPPGVVGVAPTGIPAAVEGIVPSAMSLSHGLPPVAHPPHAPSPGQTVKPEADRDHASDQL

SEQ ID NO: 116799 - DNA, 1323 bp, Artificial Sequence
  derived and/or modified sequence
atgggcagcagccacctgctgaacaagggcctgcccctgggcgtgagaccccccatcatgaacggccccctgcaccccagacccctggtggccctgctggacggcagagactgcaccgtggagatgcccatcctgaaggacgtggccaccgtggccttctgcgacgcccagagcacccaggagatccacgagaaggtgctgaacgaggccgtgggcgccctgatgtaccacaccatcaccctgaccagagaggacctggagaagttcaaggccctgagaatcatcgtgagaatcggcagcggcttcgacaacatcgacatcaagagcgccggcgacctgggcatcgccgtgtgcaacgtgcccgccgccagcgtggaggagaccgccgacagcaccctgtgccacatcctgaacctgtacagaagagccacctggctgcaccaggccctgagagagggcaccagagtgcagagcgtggagcagatcagagaggtggccagcggcgccgccagaatcagaggcgagaccctgggcatcatcggcctgggcagagtgggccaggccgtggccctgagagccaaggccttcggcttcaacgtgctgttctacgacccctacctgagcgacggcgtggagagagccctgggcctgcagagagtgagcaccctgcaggacctgctgttccacagcgactgcgtgaccctgcactgcggcctgaacgagcacaaccaccacctgatcaacgacttcaccgtgaagcagatgagacagggcgccttcctggtgaacaccgccagaggcggcctggtggacgagaaggccctggcccaggccctgaaggagggcagaatcagaggcgccgccctggacgtgcacgagagcgagcccttcagcttcagccagggccccctgaaggacgcccccaacctgatctgcaccccccacgccgcctggtacagcgagcaggccagcatcgagatgagagaggaggccgccagagagatcagaagagccatcaccggcagaatccccgacagcctgaagaactgcgtgaacaaggaccacctgaccgccgccacccactgggccagcatggaccccgccgtggtgcaccccgagctgaacggcgccgcctacagatacccccccggcgtggtgggcgtggcccccaccggcatccccgccgccgtggagggcatcgtgcccagcgccatgagcctgagccacggcctgccccccgtggcccaccccccccacgcccccagccccggccagaccgtgaagcccgaggccgacagagaccacgccagcgaccagctgtag

SEQ ID NO: 116800 - DNA, 2297 bp, Artificial Sequence
  derived and/or modified sequence
tgtccccgcccgcgcggtcgtcggagcgcggctcagcggcgcggcggagactcggcacggcggcggccaggcgcaggcgggcgggcggagcagcggacggcgccgaggccgccccacgcgccgggctcgcggcggcgcagcgcgccggagtggtcggggcccgcggccgctcgcgcctctcgatgggcagctcgcacttgctcaacaagggcctgccgcttggcgtccgacctccgatcatgaacgggcccctgcacccgcggcccctggtggcattgctggatggccgggactgcacagtggagatgcccatcctgaaggacgtggccactgtggccttctgcgacgcgcagtccacgcaggagatccatgagaaggtcctgaacgaggctgtgggggccctgatgtaccacaccatcactctcaccagggaggacctggagaagttcaaagccctccgcatcatcgtccggattggcagtggttttgacaacatcgacatcaagtcggccggggatttaggcattgccgtctgcaacgtgcccgcggcgtctgtggaggagacggccgactcgacgctgtgccacatcctgaacctgtaccggcgggccacctggctgcaccaggcgctgcgggagggcacacgagtccagagcgtcgagcagatccgcgaggtggcgtccggcgctgccaggatccgcggggagaccttgggcatcatcggacttggtcgcgtggggcaggcagtggcgctgcgggccaaggccttcggcttcaacgtgctcttctacgacccttacttgtcggatggcgtggagcgggcgctggggctgcagcgtgtcagcaccctgcaggacctgctcttccacagcgactgcgtgaccctgcactgcggcctcaacgagcacaaccaccacctcatcaacgacttcaccgtcaagcagatgagacaaggggccttcctggtgaacacagcccggggtggcctggtggatgagaaggcgctggcccaggccctgaaggagggccggatccgcggcgcggccctggatgtgcacgagtcggaacccttcagctttagccagggccctctgaaggatgcacccaacctcatctgcaccccccatgctgcatggtacagcgagcaggcatccatcgagatgcgagaggaggcggcacgggagatccgcagagccatcacaggccggatcccagacagcctgaagaactgtgtcaacaaggaccatctgacagccgccacccactgggccagcatggaccccgccgtcgtgcaccctgagctcaatggggctgcctataggtaccctccgggcgtggtgggcgtggcccccactggcatcccagctgctgtggaaggtatcgtccccagcgccatgtccctgtcccacggcctgccccctgtggcccacccgccccacgccccttctcctggccaaaccgtcaagcccgaggcggatagagaccacgccagtgaccagttgtagcccgggaggagctctccagcctcggcgcctgggcagagggcccggaaaccctcggaccagagtgtgtggaggaggcatctgtgtggtggccctggcactgcagagactggtccgggctgtcaggaggcgggagggggcagcgctgggcctcgtgtcgcttgtcgtcgtccgtcctgtgggcgctctgccctgtgtccttcgcgttcctcgttaagcagaagaagtcagtagttattctcccatgaacgttcttgtctgtgtacagtttttagaacattacaaaggatctgtttgcttagctgtcaacaaaaagaaaacctgaaggagcatttggaagtcaatttgaggtttttttttttgttttttttttttttgtatgttggaacgtgccccagaatgaggcagttggcaaacttctcaggacaatgaatccttcccgtttttctttttatgccacacagtgcattgttttttctacctgcttgtcttatttttagaataatttagaaaaacaaaacaaaggctgtttttcctaattttggcatgaacccccccttgttccaaatgaagacggcatcacgaagcagctccaaaaggaaaagcttgggcggtgcccagcgtgcccgctgcccatcgacgtctgtcctggggacgtggagggtggcagcgtccccgcctgcaccagtgccgtcctgctgatgtggtaggctagcaatattttggttaaaatcatgtttgtgactgtaaccatttgtatgaattattttaaagaaataaaaatcctggaaagag

SEQ ID NO: 116801 - DNA, 1323 bp, Artificial Sequence
  derived and/or modified sequence
atgggatcaagccacctgctgaataagggactgccacttggggttcggccacccattatgaatggcccactgcatcccagaccactggtggcccttcttgacggaagagactgcactgtggagatgcccatactgaaggatgttgcaacggttgcattttgcgacgcacagtccactcaggagattcatgaaaaggtgctgaatgaagctgttggggctctcatgtaccatactatcacattgactcgggaggatctggagaaattcaaggccctgcgaattattgtgaggatcggctccggcttcgataatatcgacattaagtcagctggcgatctgggcattgccgtatgtaacgtaccagctgctagcgtggaggaaaccgctgattcaaccctctgccacatcctgaacctataccgacgggcaacctggctacaccaggcccttagggaaggaacacgcgtgcagtctgtggaacaaatccgagaggtggcctccggcgccgctaggatacgtggtgaaaccctcggcatcatcggcctgggacgtgtgggccaggctgtcgcgctcagggctaaggcgtttgggttcaacgttttattctacgatccttatctgagcgatggggtagagagggcactggggctgcagagggtttctacacttcaagatttgctcttccatagcgactgtgtaacacttcattgtgggcttaacgaacacaatcaccatttaatcaatgactttactgtcaagcaaatgagacagggggccttcttagttaacactgccaggggtggtctggtggatgaaaaggcactggcacaggcactcaaggagggccgaatccgtggtgccgctctggacgtccatgaatctgaacccttttccttttcacaaggtccactgaaagacgctcccaatctgatctgtacgccgcacgcggcatggtactccgagcaagccagcattgagatgcgggaggaggccgctcgagaaatcagacgcgccatcactgggaggattcctgactccttgaaaaactgcgtcaataaagaccaccttactgccgccactcattgggcttccatggatcccgcagtagtgcatccagagttaaatggcgctgcctacagataccctccaggggttgtgggagttgccccaactgggatccccgcggccgtggaggggattgtaccgtccgctatgtcactgagccacggattgccacccgtcgcacaccccccacacgcaccatctcctggtcagacggtgaaaccggaggctgatcgcgatcatgcttctgatcagttatag

SEQ ID NO: 116802 - DNA, 1323 bp, Artificial Sequence
  derived and/or modified sequence
atgggcagcagccacctgctgaacaagggcctgcccctgggcgtgcggccccccatcatgaatggccccctgcacccccggcccctggtggccctgctggatggccgggactgcaccgtggagatgcccatcctgaaggatgtggccaccgtggccttctgtgatgcccagagcacccaggagatccacgagaaggtgctgaatgaggccgtgggcgccctgatgtaccacaccatcaccctgacccgggaggacctggagaagttcaaggccctgcgcatcatcgtgcgcatcggcagcggctttgacaacatcgacatcaagtctgctggggacctgggcattgctgtgtgcaatgtgcctgctgcctctgtggaggagacagctgacagcaccctgtgccacatcctgaacctgtacagaagagccacctggctgcaccaggccctgcgggagggcaccagggtgcagagcgtggagcagatccgggaggtggccagcggggccgcccgcatccggggggagaccctgggcatcatcggcctgggccgggtgggccaggccgtggccctgcgggccaaggccttcggcttcaacgtgctcttctatgacccctacctgagtgatggagtggagcgggccctgggcctgcagagggtgtccaccctgcaggacctgctcttccacagcgactgtgtgaccctgcactgcggcctgaatgagcacaaccaccacctgatcaatgacttcaccgtgaagcagatgaggcagggcgccttcctggtgaacacagcccggggcggcctggtggatgagaaggccctggcccaggccctgaaggagggccgcatcagaggagctgccctggatgtgcatgagagcgagcccttctccttcagccagggccccctgaaggatgcccccaacctgatctgcacccctcatgctgcctggtacagcgagcaggccagcattgagatgagggaggaggccgcccgggagatccggcgggccatcaccggccgcatcccagacagcctgaagaactgtgtgaacaaggaccacctgacagctgccacccactgggcctccatggaccctgctgtggtgcaccctgagctgaatggagctgcctaccgctacccacctggggtggtgggcgtggcccccaccggcatcccagctgctgtggagggcatcgtgcccagcgccatgagcctgagccacggcctgccccctgtggcccacccccctcatgcccccagccctggccagacagtgaagccagaggccgaccgggaccacgccagtgaccagctgtag

SEQ ID NO: 116803 - DNA, 1323 bp, Artificial Sequence
  derived and/or modified sequence
atgggcagcagccacctgctgaacaagggcctgcccctgggcgtgcggcccccgattatgaacggccccctccatcccagacctctggtggccctcttagatggcagagattgcaccgtagaaatgccgatattgaaggacgtggcaactgtggccttctgcgacgcccaaagtacccaggagatccacgaaaaagtgctcaacgaggccgttggtgccctaatgtaccacaccatcactctcacacgggaggatctggaaaaattcaaggctctccgcatcatagtccgtattgggtccgggtttgataatatcgatataaaaagtgcgggagacctggggatcgccgtgtgcaacgttcccgcagctagtgtagaagaaaccgcagatagcacgctttgccatatccttaatctctacagacgagccacctggctgcaccaggctctcagagaggggactcgagtgcaatctgttgagcagatcagggaggtggcctcaggcgcagcccgtatcaggggcgaaacactgggtattatcgggttgggtagagttggccaggcagtggcgttacgcgccaaggcctttgggttcaacgttttgttttacgacccatacctttccgacggggtcgagagagcactgggcctacagagagtctcaacactccaagacctcctctttcatagtgattgtgtgacactgcactgtggactcaatgaacacaatcaccatctaatcaacgacttcacagtgaagcagatgcgacaaggagcatttctcgtcaatacagctagaggcggcctcgttgacgagaaagcgctagcccaggccctgaaggaggggcgtatacggggagctgcactcgatgtgcatgagtcagagcctttcagctttagccagggaccgttgaaagacgctcctaatctcatctgtacaccccatgcagcatggtattccgagcaagcctccatcgagatgagggaagaagccgctcgggagattagaagggccatcaccgggaggatcccggactctctgaaaaactgcgtcaacaaagaccaccttactgccgccacccattgggcatcaatggatcctgctgtggtgcacccagaactcaacggcgctgcgtacagatatccccccggagttgtcggtgttgcgcccacgggcattcctgccgccgtcgagggcatagtgccttcagccatgtccctgtcacacggcctccccccggtggctcaccctcctcacgcaccaagtcccggccagaccgttaagcccgaggccgaccgcgaccatgccagtgatcaattgtag

SEQ ID NO: 116804 - DNA, 1323 bp, Artificial Sequence
  derived and/or modified sequence
atgggaagctctcatcttttaaacaagggcctgccactcggggtgaggcccccaataatgaacggcccattgcacccacgaccactggtggccctgctggacggcagagactgtacagtggagatgcccattctgaaagacgtcgctactgtggcattctgcgacgcgcaatctacgcaagagattcacgagaaagtcctaaatgaagctgtcggcgctttgatgtatcacaccatcaccttgactcgtgaggatttggaaaaattcaaagcgctgcgtatcattgtccgcatcggtagcggttttgataatatcgatattaaatctgcgggtgacttaggcatagctgtttgtaacgtacccgctgcttcagtcgaagagacggctgacagtacactctgccatattctcaatctgtacaggcgcgctacctggcttcaccaggccctccgagaaggcacccgggtgcagagcgttgagcagatcagagaagtggctagcggtgctgctaggatccggggtgaaacactcggcatcatcggactaggtcgcgtgggccaggcggtggccctgcgggctaaagcctttggctttaacgttttattttacgatccctacttgtctgacggcgtggagagagcgcttggcctccagcgcgtgagcacgcttcaagatctactgtttcactctgactgcgtgactttgcactgcggcctgaatgaacacaaccaccacttgatcaatgattttaccgtgaagcagatgcggcaaggagcttttctcgtcaacactgccagaggaggcctcgtggatgagaaggccttagctcaagccctaaaggagggtcgcatccggggagctgctctggacgttcatgagtccgagcctttttccttttctcaggggcctctcaaagatgccccaaatctgatctgcactccccacgccgcatggtactccgagcaggccagtatcgaaatgcgcgaagaagcagctcgtgaaattagacgagcaatcaccggtagaattcccgatagccttaagaattgtgtaaataaagaccacctcaccgctgcaacccattgggcatctatggaccccgctgtggttcacccagagttgaacggtgcggcataccggtatccccctggggtggtgggcgtcgctccaaccggcattcctgccgcagtggaggggatagtgcctagcgcgatgtctctgtcccacggcctgcccccagtggcccaccctccccacgcccctagccccggacaaacagttaaaccagaggcagacagggaccacgctagtgaccaattatag

SEQ ID NO: 116805 - protein, 201 aa, Artificial Sequence
  derived and/or modified sequence
MSRREGSLEDPQTDSSVSLLPHLEAKIRQTHSLAHLLTKYAEQLLQEYVQLQGDPFGLPSFSPPRLPVAGLSAPAPSHAGLPVHERLRLDAAALAALPPLLDAVCRRQAELNPRAPRLLRRLEDAARQARALGAAVEALLAALGAANRGPRAEPPAATASAASATGVFPAKVLGLRVCGLYREWLSRTEGDLGQLLPGGSA

SEQ ID NO: 116806 - DNA, 606 bp, Artificial Sequence
  derived and/or modified sequence
atgagcagaagagagggcagcctggaggacccccagaccgacagcagcgtgagcctgctgccccacctggaggccaagatcagacagacccacagcctggcccacctgctgaccaagtacgccgagcagctgctgcaggagtacgtgcagctgcagggcgaccccttcggcctgcccagcttcagcccccccagactgcccgtggccggcctgagcgcccccgcccccagccacgccggcctgcccgtgcacgagagactgagactggacgccgccgccctggccgccctgccccccctgctggacgccgtgtgcagaagacaggccgagctgaaccccagagcccccagactgctgagaagactggaggacgccgccagacaggccagagccctgggcgccgccgtggaggccctgctggccgccctgggcgccgccaacagaggccccagagccgagccccccgccgccaccgccagcgccgccagcgccaccggcgtgttccccgccaaggtgctgggcctgagagtgtgcggcctgtacagagagtggctgagcagaaccgagggcgacctgggccagctgctgcccggcggcagcgcctag

SEQ ID NO: 116807 - DNA, 606 bp, Artificial Sequence
  derived and/or modified sequence
atgagccggcgggaggggtccctggaagatccacagacggacagctctgtgagcctgttgccccacctggaggctaaaatccgccaaacccacagcctagcccacctcctcactaagtatgccgagcagcttctccaagagtacgtccagctgcagggcgatccctttgggttaccaagtttctccccaccaagattgccagtggccggtctctcagcacctgccccgagtcacgccggactgcccgtacatgagcggctgagactcgacgccgcggccctcgccgcacttccaccacttctggacgccgtgtgcaggcggcaagctgagctgaaccccagagctcctaggctgttgcgtagattggaagacgccgctcggcaggccagggctcttggcgccgcggtcgaggctctgctcgccgctctgggcgccgctaataggggtccccgtgctgagccacccgccgccaccgcatctgccgctagcgccacaggtgtgttccccgccaaggtcctggggctgcgggtatgtggcctgtacagagaatggctcagccgtaccgagggtgatctgggtcagcttctgccaggagggtcagcctag

SEQ ID NO: 116808 - DNA, 1664 bp, Artificial Sequence
  derived and/or modified sequence
ggggcgtgaagggagccgggatcagccaggggccagcatgagccggagggagggaagtctggaagacccccagactgattcctcagtctcacttcttccccacttggaggccaagatccgtcagacacacagccttgcgcacctcctcaccaaatacgctgagcagctgctccaggaatatgtgcagctccagggagaccccttcgggctgcccagcttctcgccgccgcggctgccggtggccggcctgagcgccccggctccgagccacgcggggctgccagtgcacgagcggctgcggctggacgcggcggcgctggccgcgctgcccccgctgctggacgcagtgtgtcgccgccaggccgagctgaacccgcgcgcgccgcgcctgctgcgccgcctggaggacgcggcgcgccaggcccgggccctgggcgccgccgtggaggccttgctggccgcgctgggcgccgccaaccgcgggccccgggccgagccccccgccgccaccgcctcagccgcctccgccaccggggtcttccccgccaaggtgctggggctccgcgtttgcggcctctaccgcgagtggctgagccgcaccgagggcgacctgggccagctgctgcccgggggctcggcctgagcgccgcggggcagctcgccccgcctcctcccgctgggttccgtctctccttccgcttctttgtctttctctgccgctgtcggtgtctgtctgtctgctcttagctgtctccattgcctcggccttctttgctttttgtgggggagaggggaggggacgggcagggtctctgtcgcccaggctggggtgcagtggcgcgatcccagcactgcagcctcaacctcctgggctcaagccatccttccgcctcagcttccccagcagctgggactacaggcacgcgccaccacagccggctaattttttatttaattttttgtagagacgaggtttcgccatgttgcccaggctggtcttgaactccggggctcaagcgatcctcccgcttcagcctccctaagtgctgggattgcaggcgtgagccactttcccagcctctctttgctttgcctgccccgttctcttaactcttggaccctcctcgtctgcatggtaactccgtctgagtctaccattttcttgctctccctccttccttgggcctgcctcagttccctttggcctccccctttacccagctcttggggtgtctctgttttttccatccccacttcctgccttctcgtggccctgtgtgagcacatgtgtacatctcagccttatctcaaggaggtgacaccttctctccttgtccccatctggctgtctctctgtgcttccctggccaggggcgtgcctgctggtcctatggggggaaggctactctgcatctcagccaccttcctcaggctcactccacctacatccccagtctgccacaccccatccctttgggcctcagccctgtccctttgatgtcctcctttccttcagcccctctgccctgtccctgcacacctccactgcctcccagcagatctgtggagacaaaacaagcaacaccttaaaagagttttatttctgaaaataaattaattttttgtaaataaaatgtttaaaaataaaaaagaaactaaagtta

SEQ ID NO: 116809 - DNA, 606 bp, Artificial Sequence
  derived and/or modified sequence
atgagcagaagagagggcagcctggaggacccccagacagacagctctgtgtccctgctgccccacctggaggccaagatccggcagacccacagcctggcccacctgctgaccaagtatgcagagcagctgctgcaggagtatgtgcagctgcagggcgaccccttcggcctgcccagcttcagccccccccggctgcctgtggccggcctgagcgccccagcccccagccatgctggcctgcctgtgcatgagcggctgcggctggatgctgctgccctggccgccctgccccccctgctggatgctgtgtgccggcggcaggccgagctgaacccccgggccccccggctgctgcggcggctggaggatgctgcccggcaggcccgggccctgggcgctgctgtggaggccctgctggccgccctgggcgccgccaacagaggccccagggctgagcccccagctgccacagccagcgctgccagcgccactggagtcttccctgccaaggtgctgggcctgcgggtgtgtggcctgtaccgggagtggctgagcaggacagaaggagacctgggccagctgctgcccggcggcagcgcctag

SEQ ID NO: 116810 - DNA, 606 bp, Artificial Sequence
  derived and/or modified sequence
atgagccggcgggagggcagcctggaggacccccagaccgacagcagcgtgtcccttcttcctcatttagaggctaaaatacgccagacccactccctcgcccatctcctaaccaagtatgccgagcaacttttacaggagtacgtgcagctgcagggtgacccctttgggctcccctcattctctccacctagattgcccgttgcaggactctccgccccagcaccatcccatgccggcctgcccgtacatgagcgcctgcggttagacgctgctgcactcgccgccctcccacccctgctcgatgctgtctgcagacgacaagcagagcttaatcctcgagccccaagacttcttcggaggctcgaggacgcagctcgccaggctcgagccttgggtgccgccgtggaggcactcctggctgccttgggggccgcaaaccgaggccctcgggctgagccacctgccgctactgcctcagccgcctctgctaccggggtgttccctgctaaagtcttagggctgcgagtgtgcggactatatcgggagtggttaagcagaaccgaaggagaccttggacagttgctgccgggtgggtccgcgtag

SEQ ID NO: 116811 - DNA, 606 bp, Artificial Sequence
  derived and/or modified sequence
atgtcgagacgggaaggaagcctggaggatcctcagactgacagctcagtgtctctcctgccacacctcgaagctaaaattcgtcagacccactctctggcccacctcttgacaaaatacgcggagcagctgttacaggaatacgtgcagcttcagggggaccctttcggactgccatctttttcccctcctagactgccagttgccggactgtctgcccctgccccttctcatgcaggtctgccagtgcacgagaggctccggttggatgcagccgcacttgctgccctgccccctctactggacgccgtctgcagaaggcaggccgagctaaaccctagggcacctcgtctacttcggagactggaagacgccgctaggcaggcgagggcgctgggtgccgctgtcgaagcactgctggccgcattgggagctgccaatcgcggaccaagagctgaacccccagctgccaccgccagtgccgcttctgctacgggcgtattcccagccaaagttctggggctgcgtgtctgtgggctgtacagggaatggctgtctcgcactgagggagacttgggccagctgctgcccggagggagcgcatag

SEQ ID NO: 116812 - DNA, 603 bp, Artificial Sequence
  derived and/or modified sequence
atgtcaagacgggaaggctctttggaggatccacagaccgattccagcgtgagcctcctgccccatctcgaggcaaagatacgccagacgcattcacttgcgcacctcctgacaaaatatgccgagcagctactgcaggagtatgtgcagctacagggcgatccatttggactgccttctttctcccctcctagattaccggtcgctggtctgtctgcaccagctcctagtcacgccgggctgcccgttcatgagcgactgcgattggacgctgcggcgctggccgcactgccccccctgctggatgccgtctgcaggcggcaggctgaactgaacccaagagctccaaggttactgagacgactggaggacgccgcgaggcaggcaagggcactgggcgcagccgtcgaagcgctcctggcagcactgggtgccgctaacagaggaccaagggcggagcctccagcggccaccgcgagcgccgcctctgccactggtgtctttccagctaaagtgctgggcctccgagtgtgcgggttgtacagagaatggctcagcagaactgagggggacctgggacagctgctcccaggcggttccgct

SEQ ID NO: 116813 - DNA, 603 bp, Artificial Sequence
  derived and/or modified sequence
atgtctcggcgcgagggctcgctcgaagatccccaaacggactcatcggtgagcctcctcccgcatctggaggccaaaatcagacagacccattcactggctcatctcctcaccaagtacgccgaacaattgctgcaagagtacgtgcagttgcaaggagatccgttcggacttccatcattcagcccccctaggttgcccgtggcgggactgtcagcaccagccccatcccacgccggcctcccagtccatgaaagactgcgcctcgatgcggccgctctggccgcgctccctcctttgctggacgcagtctgccggagacaggccgaactcaatccgcgcgcccctcggctgcttcggagacttgaagatgccgccagacaggcgagagctctgggagccgcagtggaagccctgcttgcagcacttggagccgcaaataggggacctcgcgcagaacccccggcagcgaccgcttctgcagcttccgccacgggtgtttttccagcgaaggtgctgggactgcgggtgtgcggtctgtaccgagaatggctgtcgcggaccgaaggtgatctggggcagctgctgccgggaggctccgcc

SEQ ID NO: 116814 - DNA, 603 bp, Artificial Sequence
  derived and/or modified sequence
atgtcacgacgggagggctcactagaggatcctcagaccgactcctccgtctctctgctcccgcatctggaagctaaaattcggcaaacacatagcctggctcacctgttgactaagtatgctgaacagctcctgcaagagtacgtacagttgcagggggaccccttcggacttccgtctttttcgcctcccaggctgccggttgctggattatcagcccccgctccttcgcatgccggcctgcccgttcatgaacggctgcgtctggatgccgcagccctcgccgccctcccccctctcctcgatgctgtctgtcggagacaagcagaactcaaccctagagctcctcggttgttgagaagactggaggacgcagctcgccaggcccgtgcattgggagcagccgtggaggcactcttggccgctttgggagcggcaaatcgtgggcccagggctgagccgcccgccgctacagcctcagcggctagcgccacgggcgtgttccctgcgaaggtgcttgggctgcgagtgtgcggtctgtatcgcgagtggctgtcccggacggaaggagatctcggacagctacttcctggcgggtctgca

SEQ ID NO: 116815 - DNA, 603 bp, Artificial Sequence
  derived and/or modified sequence
atgtcccgccgcgaaggatcgctcgaagatccgcagaccgatagctcggtttcgctgttgccccatctcgaagcaaagattcggcagactcactcgctggcacatctcctgactaagtacgcagaacagcttctgcaagagtacgtgcaactgcaaggtgacccattcggactgccgtcattcagcccgccgcgcctgcctgtggcggggttgagcgctccagctcctagccatgcaggtctgccggtccacgaacggctcagactggatgccgcagcgctggccgcgctgccaccactgctggacgcggtgtgccggcgccaggcggagcttaacccacgggccccgcggctcctcagaaggctcgaggacgcggccaggcaggccagagccctgggcgccgccgtcgaagctctcctcgcggccctcggggccgccaaccgggggccaagggctgaaccgcccgccgctacggcctccgcagctagcgcaactggagtttttccggccaaggtgcttggacttagagtctgtggcctctatcgcgaatggctgtcacggaccgagggcgacctgggacagctgctgccaggtggatccgcc

SEQ ID NO: 116816 - DNA, 603 bp, Artificial Sequence
  derived and/or modified sequence
atgtcccggcgcgaaggatcgctcgaagatccacaaactgactcatccgtgtcactgctgcctcacctcgaggcgaagatccgccaaacccactcactggcgcatttgcttaccaaatatgcagaacagttgctgcaggaatacgtgcaactccaaggggacccgttcggactgccttcgttcagcccgccgaggctcccggtcgcgggactctccgccccggcgccatcccatgcaggactcccggtccacgaaagactccgcctcgatgccgcggccctggccgcgttgccgccattgctcgacgcggtctgccgccgtcaggccgagctgaaccctcgtgcgccgcgactgctgaggcggttggaggacgccgctcggcaggcccgggctttgggcgccgccgtcgaagccctgctggcggccctcggcgccgccaacagaggaccaagggccgaaccgccggctgctactgctagcgcagcatcggcgactggagtgtttcccgcgaaggtgttgggattgcgcgtgtgtggattgtacagagaatggctgtcacgcaccgaaggggacttgggacaactgctgccaggaggctcggca

SEQ ID NO: 116817 - DNA, 603 bp, Artificial Sequence
  derived and/or modified sequence
atgagtaggagggagggaagtctggaagatccccagacagacagctcggtctctctgcttccccacttggaggctaagataagacagacccatagccttgctcatctacttaccaagtatgccgagcagttgctacaggagtatgtccagctccagggagatccgttcgggttacccagcttcagcccccccagattgccagtggctggattgagcgcccctgccccgtcccatgccggccttccagtgcacgagcggttacgtctggatgctgccgctcttgctgccctacccccactcctagacgcagtgtgcagacgacaggctgaactgaatccgcgagcgcctcgattactgcggagattggaggacgctgcaaggcaagcccgagcgctaggggccgccgtggaagccttgctggccgcccttggggccgccaacagggggcccagagccgagccccctgccgcaactgcttccgcagcctccgcaaccggggtatttcctgccaaggtgctgggactgcgtgtttgtgggttatatcgggagtggctatcaaggacagaaggagacctcggacagttgctgcccggcggcagtgct

SEQ ID NO: 116818 - DNA, 603 bp, Artificial Sequence
  derived and/or modified sequence
atgagtaggagagagggttccttggaagatccacagacggacagctccgtcagtctattaccacacctcgaggccaaaattcgacagactcatagcctggcccacctcctcactaaatatgctgagcagctgctgcaagaatatgtgcagcttcaaggagaccccttcggattaccaagtttcagtcctccaagactcccagtcgctgggctttcggctcccgctcccagccatgctggacttcccgtgcacgaaagactccgtttggatgctgctgcactggccgcacttccacccctgctcgatgcggtttgcaggagacaggccgaacttaaccctagggctcccagactcttgcggcgtttggaggatgccgctaggcaggccagagccctgggcgcagcagttgaggcgctgttggctgccctgggggctgctaatcgagggcctagggctgaacccccggccgccaccgcctccgccgcaagtgccacaggggtctttccggccaaagtgctggggctgagagtatgcgggctatatagggaatggctgtccaggactgagggtgatctgggtcagctcctgccgggtggatcagct

SEQ ID NO: 116819 - DNA, 603 bp, Artificial Sequence
  derived and/or modified sequence
atgagccgacgtgaagggtcgttggaggaccctcaaaccgactcgagcgtgtcactcctcccgcatcttgaagctaagatcaggcaaacccacagcctcgcccatttgctcactaagtacgctgaacaactgctccaagaatacgtgcagctgcagggagatcctttcggccttccttcgttctcgccaccacggcttcccgtggcagggctttcagcacctgcccccagtcatgctggactgccagtccacgaacggctgcgtctggacgccgcagcactggcagcgttgccgcccctgctcgatgcggtgtgccggcggcaagccgaattgaacccgcgcgctccccgcttgctgcggcgacttgaagatgccgcaagacaggcccgagcgttgggagctgccgtggaggcactcttggcggcactgggagcagcaaacaggggtccacgggcagaacctccggccgccaccgcgtctgcggcttcggcaactggagtgtttccagcgaaagtgcttggactcagagtttgcggcctgtacagagagtggctgtcgcgcacggagggtgacctgggacagctcctgccaggtggatccgca

SEQ ID NO: 116820 - DNA, 603 bp, Artificial Sequence
  derived and/or modified sequence
atgtcgcgcagggagggtagcctcgaagatcctcagaccgactcatcagtgtccctcctgccgcatttggaggccaagatccggcagacccactctctggcccacctcttgacgaagtacgccgaacagttgctgcaggaatacgtgcaactgcaaggcgacccattcggactgccgtccttctcgccgccgcgcctgcctgtcgccggtctttcggccccagcgccttcgcacgctggtctgccagtccacgagcgccttcgactggatgctgccgcgctggcggccctcccaccactgttggacgcagtgtgccggaggcaggccgaactcaatccgcgcgccccccggttgctgagacggcttgaggatgcggcccgacaggccagagcccttggcgcagccgtggaagcactcctggcagcactgggagcggcgaaccgcggaccccgcgccgaaccgccggcagctactgcctcagcggctagcgctaccggtgtgtttccagctaaggtgctgggcctgcgtgtttgcggcttgtaccgcgagtggctgagcagaactgagggtgaccttggacaactcctgccgggtggatcggcc

SEQ ID NO: 116821 - DNA, 603 bp, Artificial Sequence
  derived and/or modified sequence
atgtctcggagagaaggatctctcgaagatcctcagactgattcatcagtctcgctgcttcctcacctcgaggccaagatcagacaaacgcatagccttgcgcatcttcttactaaatacgccgagcaattgttgcaggaatacgtgcaactgcagggcgacccctttggactcccatccttctcaccccctcgtctgccggtggcaggcctttccgcacccgccccatcgcacgcaggactccccgtccatgagagacttcgccttgatgcggcagcacttgcagcactgccgccacttcttgacgcagtgtgtcgtagacaagctgaactgaaccctagggcacctaggctgctcagaaggctggaagatgctgcacgacaagcaagagcccttggtgctgcagtggaagcgctccttgcagcgctgggagccgcaaaccgcggcccacgggcagaaccacctgcggcgaccgcaagcgcagccagcgccaccggcgtgttcccagcgaaggtcctgggccttcgagtgtgtgggctgtatagggaatggctctcgagaactgaaggtgatctgggccaacttctgcccggcgggtcggcc

SEQ ID NO: 116822 - DNA, 603 bp, Artificial Sequence
  derived and/or modified sequence
atgtcgcgacgtgaaggttcgttagaagatccgcaaacggattcgtcggtatcgttattaccgcatctagaagcgaaaatacgtcaaacgcattcgttagcgcatttattaacgaaatatgcggaacaactattacaagaatatgttcaattacaaggtgatccgtttggtttaccgtcgttttcgccgccgcgtttaccggtagcgggtctatcggcgccggcgccgtcgcatgcgggtctaccggtacatgaacgtctacgattagatgcggcggcgctagcggcgctaccgccgttattagatgcggtatgtcgtcgacaagcggaattaaatccgcgagcgccgcgtttattacgacgactagaagatgcggcgcgtcaagcgcgtgcgctaggtgcggcggtagaagcgttactagcggcgctaggtgcggcgaatcgtggtccgcgtgcggaaccgccggcggcgacggcgtcggcggcgtcggcgacgggtgtatttccggcgaaagttttaggtttacgtgtttgtggtttatatcgagaatggttatcgcgaacggaaggtgatttaggtcaactattaccgggtggttcggcg

SEQ ID NO: 116823 - DNA, 603 bp, Artificial Sequence
  derived and/or modified sequence
atgtcacgccgtgagggtagtctggaggacccccagaccgattccagtgtgtcccttctgcctcatctggaagccaaaatcagacagacacacagcctggcccacttgttgacaaaatacgccgagcaactgttgcaggagtacgtgcagcttcaaggcgacccctttggcctgcccagtttttcacccccccgtctcccagtcgctggcctctccgctccagctccctcacatgccggccttcctgtgcacgagcgcctgaggttggacgcagctgctttggctgctcttccccctctgctcgacgccgtgtgtcgtaggcaagctgagttgaatccaagggctccaagactgcttaggcgccttgaggacgctgccaggcaggcccgtgccttgggagcagcagttgaagccttgctggctgctctgggcgctgcaaaccgtggcccacgcgctgaacctcctgccgctactgccagcgcagccagcgctactggtgtgttcccagcaaaggtgctcggcctgagggtctgtggactgtacagggaatggctttctcgcacagagggagatctgggtcaactgttgcccggcggcagtgcc

SEQ ID NO: 116824 - DNA, 603 bp, Artificial Sequence
  derived and/or modified sequence
atgagcaggcgagaaggctcactggaggatccccagaccgatagctcagtgtctttgcttccacatctggaggcgaagattagacaaacccatagtcttgcacatttgctgactaagtacgcggaacaactgctgcaggaatacgtgcaactccaaggtgatccgtttggtctgccatcctttagcccacctagactgcccgtggcaggtttgtctgcaccggcaccctcccacgctggactgcctgttcacgagcggcttaggttggacgccgccgccttggccgcgcttccgccccttttggacgcagtgtgtcgtcggcaagcggaacttaatccgagggcaccaaggctccttcgccggctcgaagatgcagctcggcaggcacgcgcactgggggcagcagtcgaagcgttgctcgccgcactcggggcagccaaccgcggaccaagggccgagcctcctgcggccaccgcatcggctgcctccgccaccggagtgttccccgctaaagtgcttggcctgagagtctgcggactgtaccgggagtggctctcgcgcactgaaggtgacctcggccagcttctgcctggagggtcggcg

SEQ ID NO: 116825 - DNA, 603 bp, Artificial Sequence
  derived and/or modified sequence
atgtcccgtagagagggcagcctggaggacccgcagacggattcctctgtctccctgctgccacacctggaggcaaagatcagacagacgcactcactggcgcacctgctcaccaaatacgcagagcagctccttcaggagtatgttcagctgcagggcgatccattcggcctaccatcctttagcccgccacggctaccagtggcaggcctgtcagctccagctcctagccatgcgggtttgcctgtacacgaaaggctgcgcctggacgcggctgccctggctgcgcttccccccctgcttgatgctgtttgcagaagacaggccgaattaaacccaagggcgccaaggctgcttcgaagactcgaagatgcagcacgacaggccagagcactaggggccgctgtggaggctttgttggcggccctgggagccgctaaccggggccctcgggccgagccaccggcagccaccgccagcgcggccagtgctactggtgtattcccagcaaaagtactcgggctgagagtatgcggcctataccgagagtggctgagcagaaccgaaggggatctgggtcagctgctgccgggaggtagtgca

SEQ ID NO: 116826 - DNA, 603 bp, Artificial Sequence
  derived and/or modified sequence
atgtctcggagggaggggtcgctcgaggacccgcaaaccgactcatcggtgtcgctgctgccacatctggaggcaaagatcagacagacgcactcccttgcccatctgttgactaagtacgccgagcagctgctgcaggagtacgtgcagttgcagggcgaccctttcggactgccttccttcagccccccaaggctgccggtggcaggattgtcagcaccagctccgagtcacgccggactccctgtgcacgagagattgcggctcgatgcggctgccttggctgccctgccaccactcctggatgccgtgtgccggcgccaagctgagctgaacccgagagcaccacgcctgctccgccggcttgaggatgccgcgcgccaagccagagccctgggcgctgctgtggaagccctccttgcggccctcggggccgccaacagaggaccgagagcagaaccgccagcggccaccgcgagcgcggcctcggccaccggagtctttccggcgaaggtgctgggtctgagagtgtgtggcttgtaccgagagtggctctctcgcaccgagggggacctcggccagctgcttcccggcggcagcgcc

SEQ ID NO: 116827 - DNA, 603 bp, Artificial Sequence
  derived and/or modified sequence
atgtccagacgtgagggatcgcttgaagatccacagaccgatagcagcgtgagcttgctcccccacctggaagcaaaaatcagacaaacccattcactcgcccatctgctcaccaaatacgcagaacaattgttgcaggaatacgtccagctccaaggtgacccgtttggactgcctagtttttcccctcctcgcctccccgtggcaggtctttcggcaccggcaccatcgcatgctggtctgcctgtgcacgaaagattgcggcttgatgcagcagcactcgccgcacttcctccgttgctcgacgccgtctgcagaaggcaggcggagctgaacccacgtgccccgagacttcttcggcgactcgaggatgcggcaagacaggcacgtgctctgggtgcagcggtggaggccctgctggcagcactgggggccgccaatcgtggaccacgggcggaacctcctgcggcaacggcaagcgcagcctcagctactggcgtttttcctgccaaggtccttggcctgagagtgtgtggcctgtaccgggaatggctcagccgtactgaaggagatctgggacaacttctgccgggcggttcagca

SEQ ID NO: 116828 - DNA, 603 bp, Artificial Sequence
  derived and/or modified sequence
atgtcaagaagggagggctctttagaagacccacagaccgattcatccgtatctctgctcccacatctcgaagccaagatcaggcagacgcattctctggcccatcttttaacaaaatatgctgagcaactgttgcaggagtacgtgcagctccagggcgatccctttggcctcccctcctttagtcctccaagactgcccgtggcaggcctatcagctcctgcgccctcacacgccggccttccggtgcacgagagacttaggcttgacgcagctgccctggccgctttgcccccactgttggatgcagtgtgtaggcgtcaagcggagctgaacccccgagctcccagactccttcggcgcctggaagatgccgcgagacaagccagagctctcggtgccgccgtggaggcgcttcttgccgccttgggagctgccaacaggggcccgagagcagaaccccccgcagccactgcgtcggccgcctcagcaactggggtgtttccggccaaagtccttggcctccgagtgtgtgggctgtaccgtgaatggcttagccgaacagagggtgatctagggcaactcctgccggggggctcagct

SEQ ID NO: 116829 - DNA, 603 bp, Artificial Sequence
  derived and/or modified sequence
atgtcccggagggagggaagcctggaggatccccaaacagattctagcgtgagcctgctcccccacctggaagcaaaaatcaggcaaactcactcactcgcccacctgctgactaagtacgcggaacagctgctgcaggaatacgtccaattacaaggcgatccttttggtctgcctagtttcagccccccaagactgcccgtagccggacttagtgcccccgcaccatctcatgccgggttgccagtgcatgagcggctgcggctagacgccgccgccctcgcggccctgcctcctctactggacgccgtctgtcgtcgacaggcggagcttaacccacgcgctcccaggctattaaggcggctcgaagacgccgcacggcaggctagggcactcggcgcagcggtggaagcactgctcgcggctctgggagctgccaaccggggccctcgagcagagccacccgccgcaaccgctagtgccgctagtgctacaggcgtgttcccagccaaggtgctcggtttgcgcgtgtgcggcctctatagggaatggctatctaggaccgagggcgatctcgggcagcttcttccaggcggaagtgct

SEQ ID NO: 116830 - DNA, 603 bp, Artificial Sequence
  derived and/or modified sequence
atgagtagacgagaaggatctttggaagatccccagactgattcctccgtgtctctcctccctcatctcgaggctaagatacgacagactcactcgctggcccatctgctgacaaagtacgctgagcaactattacaggaatacgtgcagttacagggagatcctttcggattacccagtttctcccccccccgtctacccgttgcagggctctcagcccctgcaccatcacacgccgggttgcctgtccacgaaagactgcgactcgatgccgccgccttggctgccttgccacctctccttgacgctgtgtgtagacgtcaggctgaattgaatcctcgagccccacgcctcttaagaaggttagaagatgctgctaggcaggctcgcgcactcggggccgccgtggaagcgctgctagctgcattaggagctgctaatcgggggcccagagccgaaccaccagccgccacagcttcagccgcatctgctacaggagtgttcccagcaaaggtactcggattaagggtctgcgggctgtacagggaatggctctctagaacagaaggagacttagggcagctactcccaggggggtctgca

SEQ ID NO: 116831 - DNA, 603 bp, Artificial Sequence
  derived and/or modified sequence
atgtcacgcagagaaggaagtcttgaggatccgcaaacagactctagcgtgtccctgctgccccaccttgaggccaaaatccgtcagacccattccttagcccacctgctgaccaaatacgccgagcaactgttacaagaatatgttcagctacagggcgatccatttggattgccgagcttcagccctccaaggctgcccgtcgcaggcctgagcgcccccgcaccttcccatgctggcttgcctgtgcacgaacggctgcgcttagatgctgcggcactggctgccttgccccccctcctcgacgccgtgtgccgtcgacaagcggagcttaacccaagggccccaagactgctaaggaggctcgaagatgctgccaggcaggctcgcgcactcggagctgccgtggaggccctgttagcagccctgggtgcagctaaccgcggaccccgtgcagagccacccgccgctaccgctagcgccgcctctgccaccggagtttttccagcaaaagtcttgggattacgcgtatgcggtttgtatcgggagtggctttcccgaactgaaggcgacctgggacaacttctgccagggggaagcgca

SEQ ID NO: 116832 - DNA, 603 bp, Artificial Sequence
  derived and/or modified sequence
atgtcgcgacgagaaggcagcctggaggatccccagacagactcttctgtaagcttgctcccacacctggaggctaagattcggcagacgcacagtctcgcccatctcctgactaagtacgctgaacagttgctccaagagtacgttcagttacaaggcgaccccttcggattaccctcctttagcccaccaaggctgcccgtcgctgggctgagcgcacccgcaccctcacatgcaggactgcccgtgcatgaacgccttcgtttggatgccgccgctcttgctgcccttccgccgctcttagatgccgtttgtcgccgacaggccgagttaaatcctcgggcgccccgccttctccgtagactggaggacgccgccagacaggcgagggcactgggggccgctgttgaggccctgctggcagcattgggggccgctaacagggggcccagggctgagccccccgccgcaacagctagcgccgcctccgcaacaggcgtctttccagccaaggtactggggttgcgcgtatgcggtttgtacagggagtggctgagcaggaccgaaggggatttgggacagttgcttccaggtggttcagcc

SEQ ID NO: 116833 - DNA, 603 bp, Artificial Sequence
  derived and/or modified sequence
atgagcagacgggaaggctcgctggaggacccacagacggattcttctgtgtccctcttgccacacttggaggccaaaattcgacaaacacatagcttggcgcacctgctaacaaagtacgccgagcaactcctacaggaatacgtgcagctgcagggcgacccttttgggctgcccagtttctctcctccacgccttccagttgccggcctctcagccccagcaccctctcacgcaggtctgcccgtgcatgagcgactgcgattggacgcagcggccctcgctgcactgcctccgttgctcgacgcggtttgtcgccgacaggctgaactgaatcctagggcccccagactgcttagacggctggaagacgctgcccggcaggccagagcattaggggccgccgtcgaagcacttctcgccgctctcggggcagccaaccgtgggccacgggctgaaccccctgctgccaccgctagtgccgccagtgccacaggggtcttccctgcaaaagtattaggtcttcgggtctgcggcctttacagagaatggctgtcaaggacagagggtgacctgggacagctgttgcctggcggtagtgcg

SEQ ID NO: 116834 - DNA, 603 bp, Artificial Sequence
  derived and/or modified sequence
atgagccgacgagaggggtccttggaagaccctcagaccgacagctcagtctccctcctgcctcacctggaggcaaaaatccgccagacccacagcttggcacatctcctgactaagtatgcagaacagttgctacaggagtacgttcagctgcagggcgatccatttggcctaccttctttttctccaccacgtctcccggtggccgggttgtcagctcctgctcccagccacgccggcctacccgtgcacgagaggctgcgccttgacgccgccgccttggccgccctgcctccactgctggatgccgtttgccggcgccaagctgaactgaatcctcgggccccccgactgctgcgcaggctcgaggatgctgctaggcaagcaagagctctgggagctgccgtcgaggctcttctggcagccctgggcgccgctaatagggggccaagggctgagccacccgccgctactgcctctgccgctagcgctacaggagttttccccgctaaagtgctgggtctccgtgtctgtgggctgtaccgggagtggctcagccggaccgaaggagacctgggccaactgctgcctgggggctcggcc

SEQ ID NO: 116835 - DNA, 603 bp, Artificial Sequence
  derived and/or modified sequence
atgagcagacgcgaggggagcttggaagatccacaaaccgatagcagcgtcagcctcctcccccatctggaggccaagattcgccaaactcatagcctcgcgcacctcttgacaaagtatgccgaacagctgctacaagagtacgtacagctgcaaggagatccgtttgggctaccatcctttagccctccccgcctcccagtggctgggctgagcgccccggcgccttcccacgctggccttcccgtgcatgagagactgcgccttgatgccgccgccctcgcagcactcccacctctgcttgatgctgtttgccgcaggcaggcggaactcaaccctcgggcacccagacttcttaggaggttagaggacgcagccagacaggctcgagccctgggcgccgctgttgaagctctgctggctgcactgggtgctgcaaaccggggaccacgtgcggaaccacccgccgcgactgcatcggccgcctccgctactggagtgtttcccgctaaagtgctaggcttgagggtgtgtgggctctatagagagtggctaagccgcacagaaggggaccttgggcagctgttacctgggggaagtgcc

SEQ ID NO: 116836 - DNA, 603 bp, Artificial Sequence
  derived and/or modified sequence
atgtccagaagagaaggttccctggaagatccacagactgattccagcgtttcactgctgccacacttggaagcaaagatcagacaaacccattcgctggcgcatcttctgactaagtacgcggaacaacttcttcaggaatatgttcaactccaaggggatccttttggtttgcctagcttttcgccgcctcgccttcctgtggctgggctgtcggctcccgctccatcccatgcggggctgccagtccacgaaaggctgcgacttgacgccgcagccctggcagcgcttcctccacttttggatgcagtctgcagaaggcaggcagaattgaaccctagggcaccacgccttctgcgccgactggaggacgccgccagacaggcaagagctctcggtgcggcagtggaagcccttttggcagcacttggagcggcaaaccggggacccagggcagaaccaccagccgcaaccgcgtcggcggcgagcgcaaccggcgtgttccctgcgaaggtgcttgggcttcgggtgtgcggactctaccgggagtggctgtcgcgcactgagggtgatctggggcaactgcttcctggtggaagcgca

SEQ ID NO: 116837 - DNA, 603 bp, Artificial Sequence
  derived and/or modified sequence
atgagccgccgagaaggttcgctggaagaccctcagactgattctagcgtgagcctgctgcctcatttggaggctaagataagacaaactcactctctggctcaccttctgacgaaatacgcggagcaactgctgcaggagtatgtgcaactgcagggggacccattcggcctgccttcgttttcaccaccgcgccttccagtcgcgggcctcagcgcgccagcgcctagccacgcaggcttgccagtccacgagaggcttcgtctggatgctgccgccctcgctgctctgcccccgttgttggacgcggtctgtcgccgacaggcggagctgaacccaagggctcctagattactgagacgtctggaggacgccgcccgacaggcacgcgcgctgggagcagccgtggaagccctgctagccgctcttggtgcggccaataggggaccgagggcagagcctccagcagcgacggcatcagcagcgagcgctactggtgtcttcccagccaaggttctgggcctgcgcgtttgcggcctgtacagggagtggctgagccggaccgaaggtgacctgggtcaattgctaccaggaggctccgca

SEQ ID NO: 116838 - DNA, 603 bp, Artificial Sequence
  derived and/or modified sequence
atgtcccgccgcgaaggttctctggaagacccacagactgacagttcagtgagcctgctacctcacctcgaggctaagatccgtcaaacacactccctcgctcacctgctgacaaagtatgccgagcagctactccaggagtacgttcagctacagggtgacccgttcggccttccctccttttcaccccctcgtcttcctgttgcgggcctatccgcgcctgctccgtcccacgcaggcctgcctgtgcatgagcgcttgaggttagacgctgccgctcttgccgctcttcctccactgctggacgctgtgtgcaggaggcaagcggagttaaatccccgcgccccacggctcctgaggcggctggaggacgcagcacggcaggcgcgggcacttggcgctgccgtggaggcactccttgctgccctgggggcagcaaacagaggtccgagagcagaacccccagccgctacagcgagtgcagcttctgcaaccggcgtgttcccagccaaggtgctcggcttgagggtctgcggcctttatagggagtggttgtctcgcacagagggagatctcggacagctgctgccgggagggagtgct

SEQ ID NO: 116839 - DNA, 603 bp, Artificial Sequence
  derived and/or modified sequence
atgagcaggcgtgaaggctcgctcgaggatccgcagacggattcaagcgtttccctgctcccccacttggaggcaaaaatccggcagactcattccctcgcccacctgctgaccaagtacgctgagcaactgcttcaggaatacgtgcagctgcaaggggacccatttggactcccatcattctcgccgcctcgcctgcctgtggcaggactgagcgccccggctccgtctcacgcggggctcccagtccatgagcggctgaggctggatgcagccgcactcgcggccctgccgcccctgctcgacgcggtgtgcaggagacaagcggaactcaatccgcgggccccgagattgctgaggcgactggaggatgcggcacggcaagcccgggcccttggtgcggctgtggaagccctcctggcggcgcttggtgccgcgaacaggggaccgcgggcggaaccgccggctgctaccgcgtcggcagcctccgccaccggtgtattcccggcaaaggtcttgggattgcgcgtgtgcggactctaccgcgagtggctgtcgagaaccgaaggtgatctcggacagctcttgccggggggaagcgct

SEQ ID NO: 116840 - DNA, 603 bp, Artificial Sequence
  derived and/or modified sequence
atgagtcgacgcgaaggctcccttgaagacccccagaccgactctagtgtgtctctgttaccccatctggaagccaagattcgccagacccactccctcgcccacctcctgactaagtatgcagagcaactgttgcaggaatacgtgcaactacagggcgatcccttcggcctcccctctttttcccctccccggctgcctgtggctggcctcagtgctcctgctcctagccatgccggattgcccgtgcacgagcggcttagactcgatgcggccgctctggcagcactgcccccccttctggatgcagtttgcaggcgccaggccgagttgaatccacgggctccaaggctactccgtcgactggaagatgccgcacgtcaagcccgcgccctaggcgccgccgtggaagctctccttgctgccctgggagccgcaaaccgcggcccccgggctgagccccccgcagcaaccgctagcgctgcatcagcgaccggagtcttccccgccaaggtcttgggccttagagtatgcggtctgtatcgggaatggttgtcccgaaccgagggggacctaggacagctgcttcccggaggtagcgct

SEQ ID NO: 116841 - DNA, 603 bp, Artificial Sequence
  derived and/or modified sequence
atgtcgcgcagggagggatccctggaagatcctcagactgactcatcggtcagcctcctacctcacttggaagccaaaatccgacagacgcactctcttgcacacctgctgaccaagtacgccgagcagctgctccaggagtacgttcagctgcagggggacccgttcgggctcccttccttctccccgccacgtctccctgtggccggactgtccgccccagccccttcacatgcaggcctgcccgtccacgagcgcctaaggttggatgcagcggctctcgctgccctcccccctctccttgatgctgtctgtaggcgacaggctgagcttaacccccgagccccccggctgctgcggagacttgaggacgccgcccgtcaggcgcgggctctaggagccgccgtcgaggccttactcgccgcgctcggtgcagctaacagaggacctcgggcagagccacctgctgcgaccgcaagcgccgcgtcggccacaggagtgttcccagcaaaagttctgggactgagagtgtgtggcctgtaccgggagtggttgagcaggactgaaggggaccttgggcagttgctccctggaggcagcgcc

SEQ ID NO: 116842 - DNA, 603 bp, Artificial Sequence
  derived and/or modified sequence
atgtcacgccgcgagggatcactcgaagatccccagactgacagctcggtgtcgctgctgccacatctcgaggcgaagatccgacagactcattccctggcccacttgcttactaagtacgcagaacagctgctccaagaatacgtgcaactgcaaggcgacccctttggtctgccttcgttctccccacctcgccttccggtggctggattgagcgcaccggcgccgtcccacgccggactgccggtgcatgagcgcctcagactggatgccgccgcgctcgctgcgctgccgccgcttcttgacgccgtctgccgccgtcaggcagaactcaacccccgcgcgccgcgcctgctgagacggttggaggacgcggcgcggcaggcgcgcgccctcggcgcggccgtggaggctctgttggcagcactgggcgccgcgaaccggggaccgagagccgaaccaccggcagctaccgccagcgcggcatcggccactggtgtattccccgcaaaagtgctgggcttgcgggtgtgcgggctgtacagggaatggctgagcagaactgaaggagacttgggacagctcctgccgggaggaagtgcc

SEQ ID NO: 116843 - DNA, 603 bp, Artificial Sequence
  derived and/or modified sequence
atgtctagaagggagggatctctagaggatcctcaaaccgactcttccgtgtcacttctcccacatttggaggccaaaatccgtcaaacacactcattagctcaccttttgactaagtacgctgagcagctcctccaagagtacgtccaactccaaggtgaccccttcggtttaccttcattcagtccacctagactgcctgtggcaggtctcagtgcgcccgcgccatcccatgcaggtttacctgtgcacgagagacttcgactagacgctgctgccttagctgcattgcccccacttttggacgctgtttgcaggaggcaggcggaattaaatcccagggcccccaggctgcttcgaaggctagaggacgcagcaaggcaagctagagcacttggggcagccgttgaagctcttttggccgctctcggagctgcaaataggggccctagggctgaaccgccagctgcgaccgcttctgctgcatctgcaactggcgtcttccccgcgaaggtcctaggactgagggtttgtggtctttatagggaatggctctcccgtactgaaggagatttggggcaattgttgccagggggtagtgca

SEQ ID NO: 116844 - DNA, 603 bp, Artificial Sequence
  derived and/or modified sequence
atgtcccgacgtgaggggtccctggaggatccccagaccgatagttctgtgtcactcctcccgcatctggaagccaagatccgtcaaacccattctctggcccacttactgactaagtatgctgaacaactgttgcaggagtatgtccagctccagggcgaccccttcggtctgccgagcttctccccgcctcgtctgcccgtggcaggattgtctgccccggccccaagccacgcgggtctgcctgtccatgagcggctgcgcctggacgcagctgccctggcagctctaccaccacttctcgatgcagtctgcagacgacaggctgagttgaatccccgggctcccagactcctcagacgattagaggatgctgcaaggcaggctcgcgctctgggcgcagctgtggaagcactgctcgccgcacttggggccgccaacagaggcccccgagccgagcctcctgcagcaacggcttccgccgcttctgctaccggagtcttcccagcaaaagtcctgggactccgtgtttgcggcctgtatcgtgagtggctgagccgaaccgagggggatctgggtcagctgttgcccggtgggagtgct

SEQ ID NO: 116845 - DNA, 603 bp, Artificial Sequence
  derived and/or modified sequence
atgagtcggcgagaaggcagcttggaagacccccagaccgactctagtgtcagtctgctcccacatctagaggcgaaaatccgtcagacccacagtttagctcacctgctgactaaatatgcagaacagttgctccaggagtatgtccagctgcaaggagatccatttggactaccaagcttcagccccccccgcctccctgtggccgggttgtccgcccccgctccttcacatgcgggcctacccgtccatgagaggttgaggctcgacgcggccgccttagctgctctaccccccttgctcgacgccgtatgtaggagacaggccgaattgaaccctagggcacccagattactccgccgactagaagatgccgctaggcaggcgcgagctctcggcgcagctgtagaggcccttctggccgccctcggagctgcaaatagaggacctcgcgcagaacctcccgcggccacagcaagtgccgcatccgccacaggagtatttcctgcaaaagtcctgggccttcgtgtctgtggtctctacagggagtggctgtcacgcactgaaggcgatctaggtcagctcctcccaggcggcagtgca

SEQ ID NO: 116846 - DNA, 603 bp, Artificial Sequence
  derived and/or modified sequence
atgagtcgcagagaagggagtctcgaagaccctcagacagacagcagcgtgtccctactgcctcatctggaggctaaaatacgccaaactcacagtctcgctcacctattaaccaaatacgcagaacaactgttgcaggaatacgtccaactgcaaggcgacccttttggactgccaagtttttcaccccctagattaccagttgctggcttgtctgccccagccccttctcacgctggtctacccgtgcatgagaggctgaggctggatgctgccgccctggcagctctccctccactacttgatgctgtctgccgacggcaggccgaactaaatcctcgtgccccccgcctgctcagacggttagaagacgcagcccgccaagcaagagcactgggggccgccgtcgaggctttgttggccgccttaggggcagccaataggggacctcgggccgagcccccagccgccaccgcctccgcagccagtgctactggcgtctttcctgccaaagtcctagggctgagagtatgcggcctttatcgagaatggctcagcagaacagagggcgacctaggccagctactcccaggcggtagcgcc

SEQ ID NO: 116847 - DNA, 603 bp, Artificial Sequence
  derived and/or modified sequence
atgagtagaagagaaggtagtttagaagatccacaaacggatagtagtgttagtcttttaccacatcttgaagctaaaattcgtcaaacacattctttggcacatttattaacaaaatatgctgaacaacttttacaggaatatgttcaattacaaggagatccattcggattaccttcattttcacctccaagattaccagtagcaggattatcagctccagccccaagtcatgcaggtcttcctgtacatgagagattaagacttgacgcagcagctttggctgcacttccacctcttttagatgcagtgtgtcgaaggcaagctgaattaaatccaagagcaccacgtcttcttcgacgtcttgaagatgctgcaagacaagctagagcattaggagcagctgtagaagctcttcttgcagcacttggagctgctaatagaggaccacgagcagagcctccagctgcaactgcttcagctgcttcagccacaggtgttttccctgcaaaagtattaggacttagagtttgtggattatatagagaatggttatcacgtacagaaggagatttaggacaattattaccagggggatcagca

SEQ ID NO: 116848 - DNA, 603 bp, Artificial Sequence
  derived and/or modified sequence
atgtcccgccgagaagggtcgctggaggacccgcagactgattcttcggtttccctgctgccgcaccttgaggctaagattagacagacccatagcctcgctcatttgctgaccaaatatgccgaacagttgctgcaagaatatgtgcagctccagggagatccgttcggactcccgtcgttctccccacctcggctgccggtcgccggtctgtcggcaccagcaccgtcccatgcaggcctgcctgtgcacgaacggctgcgcctggatgcagccgccctcgcggccctcccaccgctgctggacgctgtgtgtcggaggcaggccgagctgaatccgcgggctccgcggcttctcaggcgattggaagatgccgctcgccaagcaagggcactcggggccgctgtggaggccctcctcgccgcattgggagcagcaaaccgcggaccgcgcgccgaaccacccgcggcgaccgcgtccgccgcttcggcgactggggtctttcccgccaaggtgcttggactcagagtgtgcggactttaccgcgaatggctcagcaggaccgagggcgatctgggacagctgctgcctggaggctcggct

SEQ ID NO: 116849 - DNA, 603 bp, Artificial Sequence
  derived and/or modified sequence
atgagtcgacgcgagggctcccttgaagatcctcagaccgattcctctgtcagcctactgccgcatttggaggcaaagatcagacagacacactcattagcccacctcttgacaaagtacgcggagcagcttctccaagaatacgtgcagcttcagggagatcctttcgggctcccctcattttcaccaccccgcttgcctgtagccggtctatcggcccctgccccatcccacgctggtcttcctgtgcacgagcggctcaggctggacgccgcggcactagccgctctgccacccttgctcgacgcagtgtgtcggcgtcaggctgagcttaatccacgggcgcccaggctcctgcgccgtcttgaagatgcggcccggcaggcgcgtgctctgggcgcagccgtggaggccttacttgccgctttaggagccgcaaacaggggcccacgggctgaacccccggcggcaacagcctccgctgcgtctgcaaccggcgtgtttcccgccaaggtgctgggacttagagtgtgcggactgtatcgcgagtggctttccaggaccgagggggacctaggccagctgcttccgggtgggtccgcc

SEQ ID NO: 116850 - DNA, 603 bp, Artificial Sequence
  derived and/or modified sequence
atgtcaaggagggaaggtagccttgaggacccccagaccgactctagcgtctccctgctgcctcacctggaagcaaagattagacaaacacacagcttggctcacttgcttactaaatacgcggaacagctgcttcaggagtacgttcagctgcagggtgacccttttgggttgccgagctttagccctccgcgactgcccgtggcaggactgtctgcacccgccccatctcacgcaggcctgccggtccatgagaggctgcggctggacgccgccgccctggcagcactgcccccactccttgacgcagtgtgcagacgccaggccgagctgaacccaagagctccaaggctgcttaggagacttgaggatgcagcgagacaagcccgcgccctgggcgcagcggtggaggccctcctggccgccctgggcgccgctaaccgcgggcccagggccgaaccgccagccgcaacagccagcgccgcttctgcgactggtgtgtttcccgcaaaggtgctggggctgagagtatgcggactttatagggaatggctttcacgaaccgagggcgaccttgggcagctcctgcccggaggctccgct

SEQ ID NO: 116851 - DNA, 603 bp, Artificial Sequence
  derived and/or modified sequence
atgagtcggcgcgagggatctctggaagacccgcagaccgattctagcgtttcactcctgccacacctggaagcgaagatccgccaaactcactctctcgctcatttgttaacaaagtacgcagaacaactgctgcaagaatacgtccagctacagggagacccctttggtcttccaagcttctcccctcctaggctccccgtggccggtttgtctgcgccagccccatcacacgctgggcttcctgtacatgagcggttgcggctggatgctgccgccctcgccgccttacccccacttctggatgcggtatgtcgccgccaggcggaactgaacccgcgggctcctcgcctgctcagacgattggaggatgccgcgcgccaagcaagggcattgggagccgccgttgaagccctgctggccgctttgggtgcagcaaaccgcggaccacgagccgagcccccagccgccactgcttctgctgcatccgcgacaggagtcttcccagccaaggttttggggctgcgggtttgcggcttgtatagggaatggctgtccagaacagagggtgatctaggacagcttctcccgggcggctctgcc

SEQ ID NO: 116852 - DNA, 603 bp, Artificial Sequence
  derived and/or modified sequence
atgtcacgccgggaaggaagtctggaagatccgcagactgatagttccgtgtcactactcccccacctcgaagcgaaaattagacaaacccatagtttggcccatctgctaacaaagtatgctgaacaattgctccaagaatatgtacagttgcagggtgaccccttcggcttgccgtcgttcagtcctccgagactaccagttgccgggttaagcgcaccagctccatctcatgctggcctgcccgtccacgagcgcttgagattagacgccgcagcattagcagcattacctccattactagacgctgtgtgcagaagacaggctgaactaaatcctcgagctccgcgactccttcgtagacttgaagacgcagcgcgccaagcacgtgctttgggagctgctgtagaggccctcctcgcagcactgggagcagctaatagaggaccaagagccgagcctccagccgcaacagctagtgcagcttcagctaccggtgtttttccagctaaggtgctaggacttagagtgtgtggtctctatcgggaatggcttagccgaactgagggagaccttggacaattgctgccaggcggatcagct

SEQ ID NO: 116853 - DNA, 603 bp, Artificial Sequence
  derived and/or modified sequence
atgagccggcgcgaaggaagcctcgaagatccgcagacggactcgagcgtgagcctgctgccccacctcgaggcgaagattagacaaactcattcactggcacatctgctgactaagtacgcggagcagttgctgcaggaatacgtgcaacttcaaggcgaccccttcgggctgccgtcgttctcgccgccacgcctgcccgtcgcgggactctccgccccagcgccttcccacgccggactgcccgtccacgaaaggctccgcctggacgctgccgcgctggcggcactgccgccgctccttgacgccgtctgtcgccgccaagcggagctgaacccgcgggccccgcggttgcttagaaggctcgaggacgcagctaggcaggcgcgggcactgggcgcggcggtggaggcgctcctggcggctcttggtgcagctaatcggggtccccgcgcggaaccgcctgctgccaccgcatccgcggcctcggcaacgggcgtctttccagccaaagtcctggggctgcgggtctgcggactgtaccgggagtggctctccagaaccgagggggacctgggacagctcctgcctggcggcagcgcc

SEQ ID NO: 116854 - DNA, 603 bp, Artificial Sequence
  derived and/or modified sequence
atgagtaggcgagagggttctctcgaagaccctcagaccgatagttcagtgtcgttgctgccacatctggaagcaaagatcagacagacgcactcccttgcccacctgctgaccaaatacgcggagcagctcctgcaggagtatgtccagctccagggtgatcctttcggcttgccatcatttagtccccccaggctgccggtagctgggttaagcgcgcctgccccctcacatgcaggcttgcctgtgcacgagcgtctgcggttggacgccgcagctcttgccgctctgccacctctcctcgatgcagtgtgtcgcagacaagcggaactgaatccgcgggcgcctcggctgttgcgccgactcgaggacgccgcccgacaggctcgagcgctgggagccgccgtcgaagccctgctggcagccttaggtgccgctaatagaggcccacgggcggaaccacccgctgccactgccagtgctgccagcgcaaccggagtgttccctgccaaagtgctggggttgcgtgtctgcggtctgtatagagagtggctcagcaggaccgagggggacctggggcaactcctgccaggaggctccgcc

SEQ ID NO: 116855 - DNA, 603 bp, Artificial Sequence
  derived and/or modified sequence
atgtccaggcgcgagggcagccttgaggacccacagacggatagtagcgtatccctgctgcctcaccttgaggccaagattcgacaaacccacagcctggcacacctgttaaccaaatacgctgaacagttgctacaagagtatgtccagctccaaggggacccattcggtctgcctagcttctccccacctaggctcccagtggcaggcctcagtgcacctgccccctcccacgcaggacttcctgttcacgagaggcttcggctcgacgcagcagcgctggctgcccttcctccactccttgacgctgtgtgcaggcggcaagccgaactaaatcctagagcacctaggctgctgcggagattggaagacgccgctcgccaggcccgcgcacttggagccgccgttgaggcgctgcttgcagctttaggagccgccaacagagggccccgcgcagaacctcccgcagctaccgcgtctgctgccagcgctaccggtgtttttcctgctaaagtcctcgggctgcgtgtatgtggactgtatagggaatggttgtcccgtacagaaggagacctggggcagctcctccctggaggctctgca

SEQ ID NO: 116856 - DNA, 603 bp, Artificial Sequence
  derived and/or modified sequence
atgtctagaagggaaggatcactggaagacccacagacagattcctctgtatcactcctgccccacctggaagcaaaaatcaggcagacacattctcttgcccatttgttaactaaatatgctgaacaactcctccaggaatatgtccagctgcaaggagacccatttggactaccaagtttttctcctcccagactcccagtagcgggactctccgctcctgcacctagtcatgccggactacctgtacatgagcggctccggctagatgccgcggccttggctgccctgcccccactgctcgatgccgtctgtcggaggcaggctgaactgaaccctcgagcccctaggctcctcagaaggttagaagatgccgcacgacaggcccgggcgctgggagctgctgtcgaagctctcctggccgcacttggggcagccaatcggggacccagggctgagccccctgcggctacagcttctgccgcatccgctactggagtgtttccagctaaagtgctaggactccgggtctgcggattataccgagaatggctcagtcggactgagggagatttgggacagctcttacccggagggtccgca

SEQ ID NO: 116857 - DNA, 603 bp, Artificial Sequence
  derived and/or modified sequence
atgagtcggcgagaaggcagcctggaggatcctcaaacggatagcagcgtcagcctgcttcctcatctggaggcgaaaatccggcaaacacatagtctcgctcacctgctcactaagtacgcagagcagttgctacaagagtacgtccaactgcaaggagatccatttgggctgcccagcttttctccccccaggctccctgtcgctggtctgagtgctccagccccaagccatgctggattaccagtccacgagagactgcgccttgacgctgccgccttggccgccttgccaccactcctagatgcagtctgtcgccgacaggccgagctgaacccaagggccccaaggctgctgcgccggctggaggatgccgctaggcaggcaagagcactgggagcagcggtcgaagcactgctggcagctttgggagcagctaaccggggtccacgggcggagccccctgcagccactgcaagtgccgcaagtgccaccggcgtcttcccagcaaaagtccttggactcagggtttgcggcctctatcgagagtggctcagcagaaccgagggtgacctgggtcaattactgcctggtgggagcgcg

SEQ ID NO: 116858 - DNA, 603 bp, Artificial Sequence
  derived and/or modified sequence
atgagccgacgggagggttctcttgaagatccacagactgattcctcagtgtcgctgctgcctcacctggaagccaaaattcgtcaaacccattcgctcgcacatctgctgactaagtatgcagaacaactcctccaggaatacgtccaactgcagggcgatccattcgggttgccttcctttagcccaccgaggctgccggtggcgggtctgtccgcacctgcaccttcgcatgcaggacttcctgtgcatgaaagacttagactggacgcggcagcactggcagcgctccctccactgctggatgcggtgtgtcgtcgccaggccgaattgaacccacgcgctccacggctgctgcgtcgcctggaagatgccgcacggcaggcgagagcactcggagcagccgtcgaagcccttctcgcggcccttggagctgcaaacagaggaccgagagcagaacctccagcagctaccgcatcagccgcgtccgcaactggcgtgttccctgcaaaggtgcttggtcttagggtgtgtggactctaccgagagtggctgtcacggaccgaaggagacttgggccagctgctccctgggggatcggca

SEQ ID NO: 116859 - DNA, 603 bp, Artificial Sequence
  derived and/or modified sequence
atgtcaaggcgggaagggtctttggaagacccgcagactgactctagcgtgtccctccttcctcatcttgaggcgaagattaggcagactcactccctagcacaccttctgaccaaatatgccgaacagcttttgcaagagtatgtacagctgcagggcgaccctttcgggttgcctagcttttctcctccccggcttcccgttgccggcctatctgccccagctcccagccatgcaggcctacctgtccacgaacgactccgtttggatgccgcggcgcttgctgcattgcctcctttgttggatgccgtttgccgtaggcaggccgaactaaacccgagggctccacgactgttgcggagactcgaggacgcagcacggcaggcacgagctttgggagcagctgtcgaagccctcctcgccgctctgggagccgccaatcggggaccgcgagccgagccccctgctgccaccgctagtgccgcctccgccaccggagtgtttcccgcaaaggtattgggtctgcgggtgtgtggcctttatagagaatggctgagccgcactgagggagatctcggccagttattgcccggcggatccgcc

SEQ ID NO: 116860 - DNA, 603 bp, Artificial Sequence
  derived and/or modified sequence
atgtccaggcgggagggctctcttgaagatccacagacagactcctccgtgtcattgttacctcatctggaagccaaaatacgtcagacgcactcactggcccacttgcttacaaagtacgctgaacagctgcttcaagaatacgtccagttacaaggtgatcccttcggcctgccctcatttagcccaccccggttacctgtggctggactgtctgcccccgccccatcacacgccggcctccctgtgcacgagcggctccgtctcgatgctgcagctctggcagcgcttccccccttgctggatgccgtatgcaggcgacaggcagagctcaatccacgtgccccccggctcttgagaagactggaggatgcagcaagacaggccagggctctcggagccgctgtcgaggctctgctggctgccttgggtgctgcaaatcgtggacctagggccgaaccgcccgccgccaccgcctcagcggcctcagctacaggtgtgtttcccgcgaaggtcctgggtctccgcgtatgcggactttacagagagtggctcagtaggactgagggcgatctcggacagctcttgcctgggggaagtgcc

SEQ ID NO: 116861 - DNA, 603 bp, Artificial Sequence
  derived and/or modified sequence
atgtcgaggagagaggggagcctggaggatccccagacagatagttcagtgagcttgctgccacatctggaggccaagatcagacagacacactccctagcacatctgctcacaaagtacgccgaacagttactgcaggaatatgtgcagctgcagggagacccattcgggctgccgtctttcagcccgccccgcctgccggtggcgggacttagtgcgccagctcctagccatgccggcctccccgttcacgaaagactacgcctggatgctgcggcacttgccgcactgccccccctgcttgacgcggtgtgccggagacaggcggaactcaacccacgggcacctcgacttcttcggaggctcgaggatgctgcacggcaggcgagggccctgggcgccgcagtggaagccctcctggcggcactcggcgctgccaaccgaggtccaagggccgagcctcccgcagccacggcttctgctgctagcgcaaccggcgtttttccagcgaaggtcctggggctgcgagtgtgtggactgtatcgtgagtggttaagccggacagagggggatctcggacaattgctcccaggcggctccgcc

SEQ ID NO: 116862 - DNA, 603 bp, Artificial Sequence
  derived and/or modified sequence
atgtcccggagggagggcagtcttgaagatccgcagactgattcatccgtgtcacttcttcctcatctcgaagctaaaattaggcaaacacattcgttggctcacttactgaccaagtacgccgagcagctgttacaggaatacgtgcagctgcaaggagacccgtttgggctgccatccttttccccccctaggttgccagtcgctggtctctccgcccccgcgccctcccacgccgggttgcccgttcacgaaaggctgcgtttagacgctgcggcacttgccgcactccctcctctcttggacgccgtatgcagacggcaagcggagttaaacccaagagctcctcggctgctccgcagactggaggatgctgcccgccaagctcgagccttaggcgcggccgttgaagccttgcttgcggccctcggagcggcgaaccggggaccgagagccgagccgccggctgctaccgcgagcgccgcttctgccacaggggtgttccccgctaaagttctcggcctgcgagtgtgtggcctttaccgggaatggctttcacggactgaaggggatttggggcaattgctacctgggggcagcgcc

SEQ ID NO: 116863 - DNA, 603 bp, Artificial Sequence
  derived and/or modified sequence
atgtctaggagagagggttccttggaagacccccagaccgactcatcagtgtccttgctgcctcatctcgaggccaaaattaggcagacccattccttggctcacttgttgacaaagtacgcggaacagctgctgcaggaatacgtgcaactgcagggtgatccatttggtttgccttcattcagtccacccaggctgcccgtggctggtttgagtgctcctgctcccagccacgcaggtttgcccgtgcatgaaaggctgcgcctggacgcggccgctttggccgccctccctcctctcctcgacgctgtttgcaggaggcaggcagagttgaatcctagggccccaaggctcctccgcagactggaagatgctgcaagacaagcgcgcgctcttggtgccgctgttgaagccctgctcgcggctctgggcgctgctaaccgcggcccaagggctgagcccccagccgcgacggcctccgccgccagtgcaactggcgttttcccagcaaaagtacttggactgagggtgtgtggcctctacagggaatggctgtctagaactgagggcgatctcggccagttgttgccaggtggttcagcc

SEQ ID NO: 116864 - DNA, 603 bp, Artificial Sequence
  derived and/or modified sequence
atgtccagacgcgaggggtctcttgaagaccctcagaccgattcaagtgtatcacttttgccgcatctcgaagccaagatcagacagacccacagcttggcgcacctgctcacaaagtacgctgagcagctcttgcaggagtatgttcagttgcagggggacccctttggcctcccgagcttctctccccccaggttgccagtcgcaggcctctcggcaccggcaccgagccacgccggccttcctgtccacgaaaggctgcgtctagacgccgcagcgctcgccgcactcccacctttgctggacgccgtctgcagacgtcaggctgagcttaacccaagagccccccgcctgctgagaaggctcgaggacgctgccaggcaggcacgcgcccttggcgccgccgtcgaagcattattagctgctcttggcgctgccaatcgcggcccaagggcagagccacctgctgccactgccagcgctgcctcggctaccggagtgtttcctgcaaaggtgttggggttgcgagtatgcggcctgtatcgtgaatggttgtcccgcacggagggggacctgggccagctcctgcccggggggagcgca

SEQ ID NO: 116865 - DNA, 603 bp, Artificial Sequence
  derived and/or modified sequence
atgtcaaggagagaaggctcgctggaagatcctcagacggactcgtccgtctcactcctgcctcatcttgaagcaaagattaggcaaactcatagccttgcacatcttctgaccaagtacgccgaacaacttctccaggagtacgtgcagcttcaaggtgacccatttggcctgccatctttttcgcccccgcgtctcccagtggcaggcctttccgcacctgccccttcccatgcaggcttgccagtgcacgaaaggctgagacttgacgccgctgcacttgctgcacttcctccactcctcgacgcggtgtgccgccgtcaggcagaactgaaccccagggcgccacgccttcttcggagactggaagatgctgcacgccaagcccgggcgctgggtgcggcggttgaggcattgctcgctgcccttggcgccgcaaacaggggaccaagggcagagccccctgcggcaactgcatcagcagcatctgccactggagtgtttccagcgaaggtgcttggtcttagagtgtgtggtctgtaccgggaatggctttcccggacggaaggggatcttggtcaacttctgccagggggtagcgcc

SEQ ID NO: 116866 - DNA, 603 bp, Artificial Sequence
  derived and/or modified sequence
atgtctaggcgggagggcagccttgaagacccacagacggattccagtgttagtcttctgccgcacctggaagcaaagatccgacagacccacagcctcgcccatttgttgaccaagtatgccgagcagctgttgcaggaatacgtacaactccagggcgatcccttcggattgccaagttttagtccaccacggctacctgtcgctggcttgtctgcacccgctcctagccacgccggtctgcccgtgcatgaacggctccggcttgatgcagcagctctggccgccctccccccattactggacgccgtgtgtcgaaggcaggccgagctgaatcccagggctccccgcctgctacggagacttgaagatgccgcgaggcaggcccgcgcactgggcgccgccgttgaggcgctcctcgctgccctgggggctgctaatcgcggcccgagagcggaaccacctgccgctaccgcctccgctgcatcagctaccggcgtgtttccggcaaaggtcctgggattacgtgtctgcggcctgtatcgcgagtggctgagcaggacagagggggacttaggccaactgttaccgggcggcagcgcg

SEQ ID NO: 116867 - DNA, 603 bp, Artificial Sequence
  derived and/or modified sequence
atgtcccgtcgggagggaagtctggaggatccacaaaccgacagcagcgtctcgctcttgccgcacctcgaagcaaagatccgccagacgcattcactggctcacctgcttaccaagtacgccgaacaactgctgcaggaatacgtccaactgcagggggatccctttggcttgccatcgttcagcccgccaagactgccagtggccggactctctgccccggcaccgagtcacgccggactcccggtgcatgaacggttgcgcctggacgccgctgctcttgctgcattgccacctctcttggacgcggtgtgcaggagacaggcggagctcaatccgagagctccgcgcttgctgcgtcggctggaggatgccgcccgccaggcgagagcactgggcgccgcagtggaagcactgctcgcagctctgggggccgccaaccgcggtccccgggcagagccccctgccgcgaccgcttccgcggcgtccgcgactggagtgttccctgcgaaagtgcttggtctgcgggtctgtggactctaccgcgagtggctctcgagaactgaaggcgacctcggccagctgctgccaggaggaagtgcc

SEQ ID NO: 116868 - DNA, 603 bp, Artificial Sequence
  derived and/or modified sequence
atgtcccggcgtgaaggtagtctggaagacccgcagactgattctagcgtttcactcctgccccacctggaggctaagatccgtcagacacactccctggcccacctgctgaccaagtacgcagagcagctactccaggagtacgtgcagctacagggcgatccctttggactcccgagtttttcaccccctcggcttccggtagccggtctgtcagccccagctccatcccacgccggacttcccgtacacgaaaggctgcgcctggacgctgccgctcttgctgcccttccacccctccttgacgctgtttgtcggcggcaagctgaactgaatccccgggcccctcgtctgctgcgccgtctcgaagatgcagctcgccaggcgcgtgctctgggcgcagccgtcgaggcgctgctggccgccctgggtgccgcgaaccgtggcccgcgcgcggagccgccggccgctaccgcaagcgccgcctctgccaccggtgtttttcccgcaaaggtgctcggcctccgtgtctgtggattgtaccgcgagtggttgagcaggactgaaggcgatcttggccaacttctccccggtggttccgcg

SEQ ID NO: 116869 - DNA, 603 bp, Artificial Sequence
  derived and/or modified sequence
atgtcacggcgcgaaggctcgcttgaggacccacagaccgatagcagcgtgagcttgctgccccatttggaagccaagattcggcaaacgcactccctggcgcaccttctgactaaatacgcggaacagttgctccaggagtacgtgcaactgcaaggagatccgtttggtctgccatcgttctcgccgccgaggctgccggtggctggactgtccgctcccgctccttcgcacgcaggactgcctgtccacgaacgcctgcgcctggacgctgcggctttggcggctctgccaccattgctcgacgctgtgtgtcggcggcaggccgaattgaacccgcgggcccctcggttgctgaggcggctggaggatgccgcacggcaagcgagagctctgggagcggccgtggaggctctgctcgctgcactcggagcagccaacagaggacccagagccgaacctccagccgcaaccgcgtcagccgcaagcgccactggtgtgtttccggcgaaggtccttggacttagagtgtgcggactctaccgggagtggctgagccgtactgaaggagatctcgggcagctgcttccaggagggtcggct

SEQ ID NO: 116870 - DNA, 603 bp, Artificial Sequence
  derived and/or modified sequence
atgagcaggcgcgaaggctctttggaggacccgcaaactgactcctccgtgtcgctgctgccgcacttggaagcaaagatcagacagactcatagcctcgcccacctgcttacgaaatacgccgagcaactcctccaggaatacgtgcaactccagggcgacccatttgggcttccgtcgttctcgccgccacgcctgccagtggcgggtctgtcggcgccagctcctagccacgctggacttccggtgcacgaacggctgcggctggatgccgcggcccttgcggcgctgccgccgctgttggatgccgtgtgccggcgccaggcggaactcaatccgagagcaccacggctccttcggcggcttgaggacgcggctaggcaggcccgcgccctcggggccgccgtggaagctctgctggccgcgctgggagccgccaaccgaggaccgagggcagaaccacctgcagcgacggcctcagcagcctcggcaactggtgtattcccagcaaaggtcctcggactcagagtgtgtggactctaccgcgaatggctctcccgaaccgagggcgaccttggacagctcctgccaggagggtccgca

SEQ ID NO: 116871 - DNA, 603 bp, Artificial Sequence
  derived and/or modified sequence
atgagccggagagaagggtctctggaagacccccaaacagactcctctgtgagcttgttgccccacctggaagcaaagattagacagacacacagcctggcacaccttttgaccaagtatgcggaacagcttttgcaggaatacgttcagttgcagggcgatcccttcgggcttccaagcttctcaccgccacggttgcctgttgccggtctctccgctcccgccccatctcatgccgggctgccggtgcacgagcggctgaggctcgacgccgctgccttggccgcactgcctcccctgctcgatgcagtctgtcggaggcaggcagaactgaatccccgcgctcctcgattgttgaggagattggaagatgctgcacggcaagcgcgggccctgggggccgccgtggaggcactgctcgccgccctgggcgctgctaacaggggtccccgagccgaaccgccggccgccacggcctccgcagcctcagccaccggcgtctttccagcaaaagtgttgggtctgagagtctgtggactgtatagggaatggttgagccggaccgaaggggacctgggtcagctcctcccaggcggctcagcc

SEQ ID NO: 116872 - DNA, 603 bp, Artificial Sequence
  derived and/or modified sequence
atgtcacgcagggaaggatcccttgaggaccctcagactgattcatctgtgagcctccttcctcatctggaggccaaaattcgccagacgcactcactggcacatctcctgaccaagtacgcagaacaactccttcaagaatacgtccaactgcaaggtgacccgttcggacttccatccttttcacctccacgactgcctgtggcaggtctttcggccccggcaccatcccatgcaggacttcctgtgcatgaaagacttcgccttgatgcggccgccctcgctgcgctcccccctctgcttgatgctgtgtgtagacgacaagccgaactcaaccctcgagcacctcgactgcttcgtagactggaagatgcggctcgccaggccagagcactgggagccgcagtcgaggcactccttgctgcactcggagcagccaacagagggcctagggccgaacctccggccgcaactgcatccgcagccagcgcaactggggtctttccagcgaaggtcctggggcttcgagtctgtggtttgtaccgcgaatggctctcgcgcactgaaggagatctgggtcaacttctgcccggaggatccgca

SEQ ID NO: 116873 - DNA, 603 bp, Artificial Sequence
  derived and/or modified sequence
atgtctcggcgcgaaggctcgcttgaggacccccagacggactcaagcgtctcactgctccctcatctggaagccaaaattcggcaaacccattcacttgcccacctgctgactaagtacgcagaacagctgctccaagaatacgtgcaactgcaaggtgaccctttcggtctgcctagcttttcgcctcctagactgcccgttgcaggtctgtctgcacccgcaccttcgcacgccgggctgccagtccacgaaagactgcgtcttgatgcggcagctcttgcagcactgcctcccctgctggatgcagtatgtaggaggcaggcagaactcaaccctcgtgcaccgagactgcttaggcggcttgaagatgcggcacgacaggccagggcactgggggcagctgtggaagcactgcttgcggcactcggtgcagcaaatcggggcccaagagcagaaccaccagcagctaccgcgagcgccgcgtccgcaactggagtgtttcctgccaaggtgcttggcttgcgggtgtgcggactttaccgagaatggctttcgcgaactgaaggggacttgggacagcttcttcctggagggtccgcc

SEQ ID NO: 116874 - DNA, 603 bp, Artificial Sequence
  derived and/or modified sequence
atgtccagacgggagggttcactcgaagatcctcaaaccgattcgtcagtgagcctgttgccacatcttgaagcgaagatcagacagacccactcgttggcccatctcctcaccaagtacgcagaacaacttctgcaagagtacgttcaacttcagggggatccttttggacttccatcgttcagccctccacgactgccggtggcaggtttgagcgctcccgccccgagccatgccggccttccggtccacgagcggctcagactggatgcagccgcattggcagcgttgcctcctcttctggacgccgtgtgtaggagacaggccgagctgaaccctagagccccacgcctgcttcgtaggcttgaggacgcagcaagacaggcacgcgccctgggcgcagccgtggaagctctgttggcagctctgggggctgcaaaccgcggcccccgcgctgaacctccggcagcgaccgcatccgccgcgtctgcgaccggagtgtttccagctaaagtcctcggacttagggtatgtggtctgtaccgagaatggctgtcaaggacggaaggagatctcggtcaactgttgccaggaggatccgca

SEQ ID NO: 116875 - DNA, 603 bp, Artificial Sequence
  derived and/or modified sequence
atgtcacggcgagagggatcacttgaagatccacaaactgactcatctgtttcgctgctcccacatctcgaagcaaagattagacaaacccattcactcgcccatctcctgaccaaatacgcagaacagcttctgcaagaatacgtgcagcttcagggtgacccctttggactgccttccttctccccacctaggctgcccgtggcgggcctttcggctcccgcgccatcccacgccggtttgcctgtgcacgagagacttcgcctggatgcagcagcacttgcagcattgccccctctcctggacgcggtctgtagacggcaagctgagttgaaccctagggctccgcgtctgcttaggagactggaagatgctgcacggcaagctcgagcactcggcgcagcggtggaagcccttctcgccgcgctgggagcagcaaatcggggacctcgagccgagcctccagccgccaccgcttcggcagcgtccgcaacgggcgtttttccggctaaggtcctcggtttgagagtgtgcggactgtacagagagtggttgtctcgtactgaaggcgatcttgggcaacttcttccgggtggatcggcc

SEQ ID NO: 116876 - DNA, 603 bp, Artificial Sequence
  derived and/or modified sequence
atgtcgcggcgagaaggatcactggaggacccgcagactgattcatctgtctcgctgcttccgcatttggaggccaagatccgccagacccactcgctggcacacctcctgactaagtacgcagaacaacttctgcaagaatacgtgcaactgcaaggcgacccattcggcctgccttcattcagcccgcctcgcctgccagtggcaggactgtcggcccccgcgccatcccacgctggactccctgtgcacgagcggctcagactcgacgcggcagccttggccgcactcccgcctctcctcgacgcagtctgccgccggcaggcggagctcaacccacgtgcgccgcggctgctgcgccggctcgaggacgcggcccgccaggcgagagccttgggagccgcagtggaggcactcctggcggcactcggcgcggccaatcggggaccacgggctgagcctccagctgcaactgcctccgctgcgtccgccaccggagtgtttccggccaaagtgctgggactgcgcgtgtgtgggctttaccgcgaatggctgtccagaactgaaggggacctcggacagctgctccctggtggatcggca

SEQ ID NO: 116877 - DNA, 603 bp, Artificial Sequence
  derived and/or modified sequence
atgtcccgccgcgaaggctcgctcgaagatccgcagaccgactcgtcagtctccctcctgcctcatctggaagctaagatcagacagacccatagcttggcgcatcttctgactaaatacgctgaacaactgctccaggaatacgttcagttgcaaggcgacccattcggtctgccgtcgttttccccaccgcgcctccctgtggccggcctgagcgcgccggccccatcgcatgccggtctgcccgtgcacgagcggctgcggctggatgctgcggcgctggccgcactgccacctctcctggacgcagtgtgtcgccgtcaggcggagctgaacccccgggcgccgagacttctgagacgccttgaggacgccgccaggcaggctcgggccctgggtgccgccgtggaggccctcctggcggcacttggggcggcaaacaggggacctcgcgcagaaccgcccgcagccactgcatccgcagcaagcgcaaccggagtgtttccggctaaagtgctgggactgagagtctgcggactctaccgcgagtggctgagccgcaccgagggagatctgggacaactgctccccggagggtccgct

SEQ ID NO: 116878 - DNA, 603 bp, Artificial Sequence
  derived and/or modified sequence
atgagtaggcgggaaggatcactggaggacccccagactgatagctcagtgagcctcctgccacatctggaggctaagattagacagacccacagcctggctcatctcctgacaaagtatgcagaacagctgctgcaggagtatgtgcaactgcaaggagatccctttgggctcccatctttcagtccaccacggttgccggtggctgggctgtccgcccccgcaccatctcatgccggtcttcctgtccacgaaaggctgcgcttggacgctgccgcactcgccgccttgccccccctcctcgacgcagtctgcaggaggcaggcagagctcaatcccagggcgcccaggctgctccggcgcctggaagatgccgcccgacaggccagggctctgggggctgccgttgaggctcttttggctgccctcggcgccgcgaataggggccccagggctgagccccctgccgccacggcctccgccgccagcgccacaggggtgttcccagccaaagtgctcggtctcagagtatgcggactctaccgcgaatggctctctcgcacggagggcgacttgggacagctgcttcccggcgggtccgcc

SEQ ID NO: 116879 - DNA, 603 bp, Artificial Sequence
  derived and/or modified sequence
atgtcacgcagggaagggtcactggaggatccccaaaccgattcgagcgtgtccctgctcccgcaccttgaggcaaagatcagacagacgcactccctcgcgcacttgttgactaagtacgccgaacagcttctgcaggaatacgttcagcttcaaggagatccttttggcctgccctcctttagcccaccaagactgccagtggccggtcttagcgcaccggcaccttcgcatgcaggactgcctgtccatgagagactccgactggatgcagccgcactcgcggcactgcccccgttgttggacgcagtctgtcggcggcaagcagagctgaacccgcgtgcaccacggctcttgaggagactggaagatgctgcacggcaggcgcgggcattgggagcagcggtggaagcactgctggcagcactcggagcggcaaaccgcggaccccgggcagaacctcccgcagctaccgcaagcgctgcctcagcgactggagttttccctgcaaaggtgctcgggcttcgcgtgtgtggactgtaccgcgaatggctctcccggaccgaaggagatctgggccaactgctgccaggaggctctgca

SEQ ID NO: 116880 - DNA, 603 bp, Artificial Sequence
  derived and/or modified sequence
atgtctaggcgtgagggctcgcttgaggatccccagacggatagctccgtttccttgctcccccacctagaagctaagattaggcagacgcattcactggcccatctgctgaccaaatacgcagaacagttactgcaggaatatgtacagttgcagggggatccgttcggactcccttcattctccccaccgcgattgcctgtcgctggattgagcgcacccgccccctcccacgctgggctgcccgtgcatgaaagactcagactggacgcagccgccctagccgccctgcccccattgctggacgcagtatgtcgtcgccaggcggaactgaaccctcgggctccacgcttgctccgtcgcctggaggatgcagccagacaggcgcgcgccctgggggctgccgtggaggcactgctcgcagcgctgggggccgctaatagagggccacgggccgagcctcccgcagctaccgcctctgccgcgtccgccaccggcgtttttcctgccaaagttctcggactgcgtgtgtgcggactgtatcgcgagtggctcagtaggacagagggggacctgggccaacttttgccgggaggctcggcc

SEQ ID NO: 116881 - DNA, 603 bp, Artificial Sequence
  derived and/or modified sequence
atgagcagaagagagggttccttggaggatcctcaaactgactcttccgtgtcgctgttgcctcaccttgaggccaagatcaggcagacccactcactggctcacctgctgacgaaatacgcagagcaactgttgcaagaatacgttcagctgcagggagatccctttggcctcccgtcattctcgccgccaaggttgcccgtggctggcctgtcagctccggccccaagccatgcgggactgccggtgcatgaacggcttcgcctggacgctgctgcccttgccgctttgccgcccctccttgacgctgtgtgccgccggcaagcagaactgaacccacgggccccgagactgctgagaaggttggaagatgcagcgaggcaggcgcgggccctgggagcagcagtagaggcactccttgcggctctcggggcagcaaacagaggccctcgagccgaaccgccagccgccaccgcctcggccgcgtccgccaccggcgtctttcccgcaaaggtgctggggctgagagtgtgcggactctaccgagagtggctgagtcgcactgaaggggacctgggacagctgctccccggaggaagcgcg

SEQ ID NO: 116882 - DNA, 603 bp, Artificial Sequence
  derived and/or modified sequence
atgtcacgccgggaaggaagcctggaggatccccaaactgacagctcagtgtcacttctgcctcatctcgaggccaagattaggcagacccacagtctggcacacctcctgaccaaatacgcagaacagcttctccaggaatacgtgcaactccaaggagatcccttcggactgccgtcattttcaccgccccgccttcctgtagcaggactctccgctcctgcaccatcgcacgccggtctgccggtgcacgaacgtcttagactggacgccgcggcacttgcggcacttcctccattgctggatgcagtgtgcaggcgtcaggcagaattgaaccctcgagccccacggctgctgcgcagactggaggatgcagctcgtcaagcacgcgcgcttggcgcggcagtcgaagcccttctcgcagcactgggggccgcgaatcgaggcccaagagcagaacccccagcggcaacggcgtcggcagcatcagcaactggagtgttccctgcaaaggtcctcggactcagagtctgtggactttacagagagtggctgagccggactgaaggcgatctgggtcaattgcttccgggcgggtctgcc

SEQ ID NO: 116883 - DNA, 603 bp, Artificial Sequence
  derived and/or modified sequence
atgtccaggagagagggttcactggaagacccccaaactgatagttcagtgagcctgttgccccacttggaggctaagattaggcagactcactcacttgctcatcttctgacaaaatatgcggagcagctcttgcaggagtatgttcaactgcagggggacccttttggactgcccagcttcagtcctccgagactccccgtcgctggtctgtctgcgcccgcgcccagtcacgcaggactgcctgtgcatgagcgattacgcttggacgctgccgccttggccgctctgccacctctgttggatgcggtctgcaggcgacaggccgagctgaatccgagagctcctcggctactgcgacggttggaagatgctgcacgccaggcacgggcgttaggtgccgcagtggaggctctgcttgccgcgcttggtgcagccaatcggggacctcgtgccgagccccctgccgccaccgcatcagccgcctccgctaccggtgtgtttcccgctaaggtgttgggcctgcgtgtttgcgggctgtatcgtgaatggttgagccgtacagagggagacttgggacagcttctcccgggcgggagcgcc

SEQ ID NO: 116884 - DNA, 603 bp, Artificial Sequence
  derived and/or modified sequence
atgtcccggcgcgagggaagcctggaagatccacaaactgattcatccgtctcgctgttgccacacctggaagcgaagatccgacagacccattccctggctcacttgcttaccaaatacgctgaacaactcctgcaggaatacgtgcagctccaaggagatccgtttggtttgccgtccttctccccgcctaggctcccagtcgcagggctgtccgccccggctccatctcatgctgggttgcccgtgcacgaacggctgcgcttggacgccgcggccctcgccgcactcccaccgctcctggacgcagtctgcagacggcaagctgaactgaacccgcgtgcccccagactgctgcggcggctggaggacgcggcgcgccaggcgcgggcgttgggagctgctgtggaggcactgctggccgcgcttggggcggcgaatcggggacctagggctgagccccctgctgcgacggcctcggcggcctcagctactggagtattccctgctaaggtcctcggtctgagagtgtgtggactttacagagaatggctttcgcgcactgagggagacttggggcagctgctgccgggcgggagcgct

SEQ ID NO: 116885 - DNA, 603 bp, Artificial Sequence
  derived and/or modified sequence
atgtcccgcagagaaggctcccttgaggatccacaaaccgactcttcggtcagccttctcccccatctcgaagctaagattagacaaacccattcgctggcacatctcttgaccaagtacgcggagcaacttctgcaagagtacgtgcaactgcaaggtgatccatttggactcccatccttttccccacccagactgccggtggcaggactttcggcacctgcgcctagtcacgcagggcttcctgtccacgagaggcttaggctggacgcagcagctttggcggccctgccacctctgctcgacgcagtgtgtagacggcaagcagagctgaacccacgcgcgccgagactcttgagacgactcgaagatgctgcaaggcaggccagagcgctgggcgcggctgtggaagcactccttgccgcactgggtgccgcgaacagaggtccacgtgcagaaccgcctgccgcaaccgcgtcggctgcctcggccactggtgtgttcccagcgaaggtcctgggcctccgcgtttgtgggctgtaccgagagtggctgagcagaacggagggagatctggggcaactcttgcctggcggatcagca

SEQ ID NO: 116886 - DNA, 603 bp, Artificial Sequence
  derived and/or modified sequence
atgtcgaggcgcgagggatcgcttgaggacccacaaacggactcaagtgtgtcgctgcttccacatctggaggctaagattcgccagacccattccctggcccacctgctgacgaaatacgcggagcaactcttgcaggagtacgtccagctgcagggtgacccatttggattgccatctttttcaccaccacgccttccagtcgcgggtttgagcgcgccggccccgtcgcacgcgggcctaccggttcatgagaggctcaggctcgatgccgccgcacttgcggcgctgccaccgctgctggatgccgtgtgccgccggcaggccgagctgaaccctagagcaccgaggctcctgcgccgcctcgaggatgccgcgcgtcaggcccgggcgctgggggccgcagtggaggcgttgctggccgccttaggggccgccaaccgcggcccaagagctgagcccccggccgccactgcctctgccgccagtgcgacaggggtgttccccgccaaggtgctcgggctgcgcgtgtgcggcctttaccgtgagtggctatcgcgcaccgagggagacttgggccaactgttgcccggcggctcagcc

SEQ ID NO: 116887 - DNA, 603 bp, Artificial Sequence
  derived and/or modified sequence
atgtctcgcagagagggatccctggaagacccccagaccgattcatccgtgtccctgctgcctcacctggaagcgaagatccgccagacccatagtctcgcacacctgctgaccaagtacgcagagcagctgcttcaggagtacgtccaactccaaggggacccgtttggtctgccatcgttctccccgcctcggctgccggtggcgggcctgtcagctcccgccccttcgcacgctggactgccagtgcatgaacggctgcgactggatgcagcagccctggcagcactgccgcctctgctggatgcggtctgccggcgccaggccgaactcaatccacgcgcgcctcgcctgctgcggaggctggaggacgctgccaggcaggcccgcgctctcggggccgctgtcgaagcgctcctggccgcgctgggagccgctaaccggggtcctcgggccgagccccctgcggccacggcgtcggccgctagcgcgactggtgtgtttccagccaaggtcctcggactgagagtgtgtggactgtatcgcgaatggctgtcgcggactgaaggcgacctgggccagctgctgcctggggggagcgcc

SEQ ID NO: 116888 - DNA, 603 bp, Artificial Sequence
  derived and/or modified sequence
atgtcgagaagggaggggagcctggaggaccctcaaaccgattcgtcggtcagccttcttccacatctggaagcaaagatacgccaaacgcactcgctggcacacttgttgacgaaatatgcagaacaacttctgcaggaatacgttcaactgcaaggtgatccctttggacttccctcgtttagccccccacgtctgcccgtggcaggactctcggccccagcaccctcgcatgctggccttcccgtgcatgagaggcttagactcgatgccgccgcactcgcagccctgccacctcttctggatgcagtgtgcagacgacaggctgaattgaacccgcgtgccccaagattgctccgacggcttgaagatgcagcaaggcaagcccgggcactcggcgcagcagtggaggcactgcttgccgccctgggggccgcaaatcgtggtccccgggcggaaccgcctgcggcaactgcatccgccgcctcagcaaccggtgtgttccctgctaaggtgcttggcctgcgggtctgtgggctgtaccgagaatggcttagccggactgagggggatcttggacagttgcttcctggaggatcagca

SEQ ID NO: 116889 - DNA, 603 bp, Artificial Sequence
  derived and/or modified sequence
atgtctagacgtgaaggaagccttgaggatcctcagacagattctagtgtgtcccttctgccgcatcttgaagccaaaattcgccagactcatagtctcgcgcatctgctgactaaatacgccgaacaactcttacaggaatatgtgcagctgcagggcgatccttttgggctgcctagtttctcccccccaagactgcccgtagctggcctgtctgctccggccccatcccatgcagggttgccggttcatgagcgactgaggctcgacgctgctgctctagcagccttgccgccactattggatgccgtttgccgcagacaagctgagctgaatccaagagcaccccgcctcctgagaaggctggaggatgccgcccggcaagcgcgagcgctcggtgcggctgttgaagccctcttggccgctctcggagcagcaaacaggggtcctcgcgcagaacctccagctgccactgcatccgccgctagcgccacgggtgtgttccccgcaaaggtcttgggactgcgtgtgtgtggactatatcgcgaatggctcagccgaactgaaggggatctgggccagctgctgcccggaggcagcgcc

SEQ ID NO: 116890 - DNA, 603 bp, Artificial Sequence
  derived and/or modified sequence
atgtcccggagagagggctcacttgaggacccacaaaccgatagttccgtatcacttctcccacacctcgaagctaaaatacgacagacccattccttggcccacctcctgactaaatacgccgagcaactactccaagagtacgtgcaactacagggggatcctttcggcctgccatcattctcgcctccgcgccttccagtggcgggcttgtcggcccccgcgccatcacacgcgggactgccagtccacgaacgactacggctggatgccgcggctctcgccgctctgcctccgctgctggatgctgtctgcagacgtcaggcggagcttaacccaagagcaccgcgcctgctgcgacgacttgaggatgctgctaggcaagcacgcgctttaggagccgccgtggaggccttgttggctgcattgggggccgctaatcgtggccctcgtgctgaaccgcctgccgccacggcctcggccgcctctgccacgggtgtgttcccggccaaagtgcttggcttacgtgtgtgcggattgtatcgagagtggttgtcccggactgaaggtgatctggggcaacttcttccgggaggaagtgca

SEQ ID NO: 116891 - DNA, 603 bp, Artificial Sequence
  derived and/or modified sequence
atgtcgagacgcgagggaagcctggaagatccacagactgattcttcagtcagcctcctcccgcacctggaagccaagatccgccagacgcactcattggcccatctcctcactaaatacgccgaacagctgcttcaggaatacgtgcaactccagggtgacccgttcggcctgcctagcttttcccctccgcgtctgcctgtggcagggctgtcggccccggccccatcgcacgctggcctcccggtgcatgagcgactccggctggatgcagctgctctggcagcgcttcctcccctgttggacgctgtgtgcaggcggcaagccgaactcaacccgcgggcacccagactgctgcgcaggttggaggacgcggcccggcaggcccgcgcgctgggagcagccgttgaggctcttctggcagccctgggagccgcaaatcgcggaccaagagccgaaccgccagcggcgaccgcgtcagcggcctccgccaccggcgtgttcccagctaaggtcctcgggctgcgcgtctgtggactgtaccgggagtggctgtccagaaccgaaggagacttgggacaactgcttccgggtggctcggcg

SEQ ID NO: 116892 - DNA, 603 bp, Artificial Sequence
  derived and/or modified sequence
atgtcgcgccgggaaggttcccttgaagatcctcagactgactccagcgtgtcgcttctgcctcatctggaagcaaaaatcagacagactcattcgctggcccatctcctcaccaagtacgcagaacaactgctgcaagaatacgtgcaacttcagggagatccttttggccttccttctttttcgccaccacgtctgcctgtggcgggcctgagcgcacctgcaccttcacacgcaggtctgcccgtgcatgaacggctgcggcttgacgccgcagcccttgccgctttgcctcctctgctggatgcagtgtgtcggcgacaagcagagctgaatccgcgggcaccccgcctgctgcggaggttggaagatgcggcgagacaggcacgggcactcggagcggcagttgaagccctgctggcagctcttggagcagctaaccgcggaccgcgtgctgagcctccagcagcaactgcatcagcagcctctgcgactggagtgttccctgcgaaagtgctgggtctgagagtctgcggactgtatcgagagtggctgtcaaggaccgaaggagatcttgggcagttgcttcctgggggcagcgca

SEQ ID NO: 116893 - DNA, 603 bp, Artificial Sequence
  derived and/or modified sequence
atgtctcggagagagggctctctcgaagatccacagacagattcatccgtctcccttctgccgcatttagaagcgaagattcggcagactcattcattagctcacttactgaccaagtacgctgaacaacttctccaagaatatgttcagttgcaaggagacccgtttggcctgccgagtttctcgccgccacggttgccggtcgctggcctgtctgctccggccccttctcatgcagggctgccggtccatgaacgtctgcggctcgatgcagctgctttagcggcgcttcctccacttctcgatgcagtttgtcgtagacaagctgaacttaacccacgcgctccgcgcctgcttcgcaggctcgaagatgcggccaggcaggcccgggccttaggggctgctgtcgaggctcttcttgcggcccttggcgcggcaaatcggggtcctcgagcagaaccgcctgcagcaacggcatccgcagcatcagccacaggagtcttcccggcaaaagtgctgggactacgcgtctgcggattataccgggagtggttatcccgaacagaaggagacttgggccagctcctgccgggagggtccgca

SEQ ID NO: 116894 - DNA, 603 bp, Artificial Sequence
  derived and/or modified sequence
atgagtcgacgggaaggttccttagaagacccccaaacagactctagcgtatcccttctgccccatcttgaagctaagatcaggcagactcactcccttgcccacttgctgaccaagtatgccgagcagctgctccaggaatatgtccagctgcagggggacccgtttgggttgccatccttcagccccccccgactgcccgtggcaggtctctccgctccagccccgtctcatgcgggcctgcctgtgcacgagcggctgcgactggacgccgcggccctcgccgctcttccaccactgctcgatgccgtatgccgtaggcaagcagagctcaatccacgcgcgcccagattgttgcgacgcctggaagacgcagctcgacaggccagggccttgggcgcggcggtggaggctctgcttgcggccctcggcgccgcaaatcgaggcccccgggctgagccgccagctgcgacggcgtctgctgccagcgccaccggagtattcccggctaaggtgctggggctccgggtgtgcggtctgtacagagaatggctgtcacgcacagagggagacttaggtcagcttctcccaggcggttccgct

SEQ ID NO: 116895 - DNA, 603 bp, Artificial Sequence
  derived and/or modified sequence
atgagccgccgagaagggagcctggaggacccacagacagattcttctgtgagcttactgccacacctcgaggctaagatcaggcagacacattccctcgcccacctgctcactaaatatgccgagcagctcctgcaggagtacgtccagctacaaggtgatccttttggcttaccctctttttccccacccagacttccagtggcaggactgtcggcaccagcccctagccatgccgggttgcctgtgcatgagcggctaagactggatgccgcagctctagccgcattaccgccactgcttgacgctgtctgtaggcgccaggccgagcttaatccgagggcaccccgcctcttgaggcggcttgaagacgcagctcggcaggctcgagctttaggagcagctgtagaggcgctcctagcagctctgggagctgctaacaggggtccacgtgcagaaccgcccgcagcaacagcctctgcggcgtccgcaacgggcgtattccctgccaaagtattaggcctgcgggtgtgtggactttacagagagtggttgtctaggaccgaaggagatctcggtcaactgctgcctggtggcagcgca

SEQ ID NO: 116896 - DNA, 603 bp, Artificial Sequence
  derived and/or modified sequence
atgtcaagacgggaaggttcattggaagatcctcaaaccgattcaagcgtgagccttctgcctcacctcgaggcaaagattaggcagacccactcgctcgcacacctgctgaccaagtacgcggaacaactcctccaggaatatgtgcaattgcagggtgacccctttggactcccttcgttctcaccccccagattgcctgtggctggcctctcagctcctgcaccttcccatgccggactgcctgtccatgaacgcctgcggctggatgcggcggctctggctgccctgcctcctcttctggatgcggtgtgtaggcgccaagctgagcttaaccccagagcaccaaggctgctgcgccgcctcgaggacgccgcacgccaggcaagagcgctcggagcagcagtcgaggcactgcttgcagcactgggtgcggcaaacaggggaccccgagccgagccaccagcagcaaccgcgtcggcagccagcgcaacgggagtgttcccagcaaaagtcctcggactgcgggtgtgtggactttacagagaatggctgtccaggaccgaaggcgatctgggacagcttctgcccggtggctccgcc

SEQ ID NO: 116897 - DNA, 603 bp, Artificial Sequence
  derived and/or modified sequence
atgtccaggagagaggggtcattggaagatccccagactgattcgagcgtgtcgctgctgccgcatctcgaggcaaaaatccggcagactcactccttggcccacttgctcaccaagtacgcagaacagcttctgcaggagtacgtgcaactgcagggagatccgtttgggctgccatctttcagtccgcccagactgccggtcgctggcctgtccgcaccggccccttcccacgcgggcctgccggttcacgagcggcttagactggacgcggctgctctggcggcactgcctccgctccttgatgccgtgtgccgaaggcaggccgagctgaatccgcgcgccccacgtctgctgcgcaggctggaggacgcggcgcgccaggcgagagctctgggggccgcagtggaagcgcttcttgcggctctgggagctgccaacagaggaccacgggccgagccgccagctgcaactgcctccgccgctagcgccactggtgtgttcccggcaaaggtcctgggacttcgcgtgtgcggcctttaccgcgaatggctgtcacgcaccgaaggagatctggggcagcttctgcccggaggctcagcc

SEQ ID NO: 116898 - protein, 887 aa, Artificial Sequence
  derived and/or modified sequence
MANGTLTRRHQNGRFVGDADLERQKFSDLKLNGPQDHSHLLYSTIPRMQEPGQIVETYTEEDPEGAMSVVSVETSDDGTTRRTETTVKKVVKTVTTRTVQPVAMGPDGLPVDASSVSNNYIQTLGRDFRKNGNGGPGPYVGQAGTATLPRNFHYPPDGYSRHYEDGYPGGSDNYGSLSRVTRIEERYRPSMEGYRAPSRQDVYGPQPQVRVGGSSVDLHRFHPEPYGLEDDQRSMGYDDLDYGMMSDYGTARRTGTPSDPRRRLRSYEDMIGEEVPSDQYYWAPLAQHERGSLASLDSLRKGGPPPPNWRQPELPEVIAMLGFRLDAVKSNAAAYLQHLCYRNDKVKTDVRKLKGIPVLVGLLDHPKKEVHLGACGALKNISFGRDQDNKIAIKNCDGVPALVRLLRKARDMDLTEVITGTLWNLSSHDSIKMEIVDHALHALTDEVIIPHSGWEREPNEDCKPRHIEWESVLTNTAGCLRNVSSERSEARRKLRECDGLVDALIFIVQAEIGQKDSDSKLVENCVCLLRNLSYQVHREIPQAERYQEAAPNVANNTGPHAASCFGAKKGKGKKPIEDPANDTVDFPKRTSPARGYELLFQPEVVRIYISLLKESKTPAILEASAGAIQNLCAGRWTYGRYIRSALRQEKALSAIADLLTNEHERVVKAASGALRNLAVDARNKELIGKHAIPNLVKNLPGGQQNSSWNFSEDTVISILNTINEVIAENLEAAKKLRETQGIEKLVLINKSGNRSEKEVRAAALVLQTIWGYKELRKPLEKEGWKKSDFQVNLNNASRSQSSHSYDDSTLPLIDRNQKSDNNYSTPNERGDHNRTLDRSGDLGDMEPLKGTTPLMQDEGQESLEEELDVLVLDDEGGQVSYPSMQKI

SEQ ID NO: 116899 - protein, 941 aa, Artificial Sequence
  derived and/or modified sequence
MDDSEVESTASILASVKEQEAQFEKLTRALEEERRHVSAQLERVRVSPQDANPLMANGTLTRRHQNGRFVGDADLERQKFSDLKLNGPQDHSHLLYSTIPRMQEPGQIVETYTEEDPEGAMSVVSVETSDDGTTRRTETTVKKVVKTVTTRTVQPVAMGPDGLPVDASSVSNNYIQTLGRDFRKNGNGGPGPYVGQAGTATLPRNFHYPPDGYSRHYEDGYPGGSDNYGSLSRVTRIEERYRPSMEGYRAPSRQDVYGPQPQVRVGGSSVDLHRFHPEPYGLEDDQRSMGYDDLDYGMMSDYGTARRTGTPSDPRRRLRSYEDMIGEEVPSDQYYWAPLAQHERGSLASLDSLRKGGPPPPNWRQPELPEVIAMLGFRLDAVKSNAAAYLQHLCYRNDKVKTDVRKLKGIPVLVGLLDHPKKEVHLGACGALKNISFGRDQDNKIAIKNCDGVPALVRLLRKARDMDLTEVITGTLWNLSSHDSIKMEIVDHALHALTDEVIIPHSGWEREPNEDCKPRHIEWESVLTNTAGCLRNVSSERSEARRKLRECDGLVDALIFIVQAEIGQKDSDSKLVENCVCLLRNLSYQVHREIPQAERYQEAAPNVANNTGPHAASCFGAKKGKGKKPIEDPANDTVDFPKRTSPARGYELLFQPEVVRIYISLLKESKTPAILEASAGAIQNLCAGRWTYGRYIRSALRQEKALSAIADLLTNEHERVVKAASGALRNLAVDARNKELIGKHAIPNLVKNLPGGQQNSSWNFSEDTVISILNTINEVIAENLEAAKKLRETQGIEKLVLINKSGNRSEKEVRAAALVLQTIWGYKELRKPLEKEGWKKSDFQVNLNNASRSQSSHSYDDSTLPLIDRNQKSDNNYSTPNERGDHNRTLDRSGDLGDMEPLKGTTPLMQDEGQESLEEELDVLVLDDEGGQVSYPSMQKI

SEQ ID NO: 116900 - protein, 840 aa, Artificial Sequence
  derived and/or modified sequence
MQEPGQIVETYTEEDPEGAMSVVSVETSDDGTTRRTETTVKKVVKTVTTRTVQPVAMGPDGLPVDASSVSNNYIQTLGRDFRKNGNGGPGPYVGQAGTATLPRNFHYPPDGYSRHYEDGYPGGSDNYGSLSRVTRIEERYRPSMEGYRAPSRQDVYGPQPQVRVGGSSVDLHRFHPEPYGLEDDQRSMGYDDLDYGMMSDYGTARRTGTPSDPRRRLRSYEDMIGEEVPSDQYYWAPLAQHERGSLASLDSLRKGGPPPPNWRQPELPEVIAMLGFRLDAVKSNAAAYLQHLCYRNDKVKTDVRKLKGIPVLVGLLDHPKKEVHLGACGALKNISFGRDQDNKIAIKNCDGVPALVRLLRKARDMDLTEVITGTLWNLSSHDSIKMEIVDHALHALTDEVIIPHSGWEREPNEDCKPRHIEWESVLTNTAGCLRNVSSERSEARRKLRECDGLVDALIFIVQAEIGQKDSDSKLVENCVCLLRNLSYQVHREIPQAERYQEAAPNVANNTGPHAASCFGAKKGKGKKPIEDPANDTVDFPKRTSPARGYELLFQPEVVRIYISLLKESKTPAILEASAGAIQNLCAGRWTYGRYIRSALRQEKALSAIADLLTNEHERVVKAASGALRNLAVDARNKELIGKHAIPNLVKNLPGGQQNSSWNFSEDTVISILNTINEVIAENLEAAKKLRETQGIEKLVLINKSGNRSEKEVRAAALVLQTIWGYKELRKPLEKEGWKKSDFQVNLNNASRSQSSHSYDDSTLPLIDRNQKSDNNYSTPNERGDHNRTLDRSGDLGDMEPLKGTTPLMQDEGQESLEEELDVLVLDDEGGQVSYPSMQKI

SEQ ID NO: 116901 - DNA, 2826 bp, Artificial Sequence
  derived and/or modified sequence
atggatgactccgaagtagagtccacagccagcatacttgcgagcgtgaaggagcaggaggcacagttcgagaaacttacccgcgccctcgaggaggaaagaaggcatgtcagcgcccaactggagcgggtcagggtgagcccccaagatgcaaacccactgatggcaaatggcacgctcacacgccggcatcagaacgggagatttgttggggacgccgatctcgaaagacagaagttttccgatctcaagctcaatgggccccaggatcattcccacttgctgtattctacaattcccagaatgcaagagcccggtcagatcgttgagacatacacagaagaggacccggagggagctatgtcagttgtgtccgtggagacctctgacgacggcactacgaggcggactgagactacagtgaagaaggtcgtcaaaaccgttacgacacggaccgttcaacctgtggccatgggccctgatggtcttccggtggatgcttcaagcgtgagcaataactacatccagacccttgggagagatttcaggaagaacgggaatggaggacccggaccctacgttggacaagctgggactgcaacactgccccgcaactttcattacccgcctgacggctacagccgacattacgaagacgggtatcctggggggtctgataactacggctctctttcaagggtcacgcgtattgaggagcgctatcggccgtcgatggaaggttaccgggcaccctcgagacaagatgtttatgggcctcaaccccaggtgcgagtaggcggctcatccgtcgacctgcaccgatttcatccggaaccctacggccttgaggacgaccaacgtagcatgggctacgatgatctcgattatggaatgatgagcgactacggtaccgcccggcggaccggcactccgtctgatccaaggcgcaggctgcggagttatgaagacatgatcggagaggaggtcccaagcgaccagtattactgggcaccactggcccaacacgaaagaggatcccttgcctccctagactcgcttaggaaagggggcccccccccacccaactggcggcagcctgagcttcctgaggtcattgctatgcttggatttcggcttgatgctgtgaaatccaatgcagccgcttacctgcagcatctgtgctacaggaacgacaaggttaaaacagatgtacgcaaactcaagggcatccctgtgctggtgggtttattggatcaccccaagaaggaagtgcacttgggtgcctgtggtgccttaaagaatatctcgtttggccgagaccaggacaacaagatcgctatcaagaattgcgatggcgttcccgccctcgtacgcctgttgcgcaaggcaagagacatggatcttaccgaggtaattaccggtacactatggaacctatctagccacgacagcattaaaatggaaatcgtcgatcacgctttgcatgccctgacagacgaagtgatcattcctcattctggctgggagcgggagcctaatgaagactgtaagccacgccatatcgaatgggagagcgtcctgacaaatactgcgggctgcttgaggaatgtgagtagcgaaagatccgaagccagaagaaaattgagggagtgtgatggactggttgacgcattgatttttatcgtccaggccgaaattggccagaaagattccgacagcaagttagtggagaactgtgtatgtctgctgcgcaacctgtcataccaagtgcaccgggagatccctcaagccgagcgctatcaggaagctgctcccaacgtggccaataacaccggaccacacgccgcctcttgtttcggcgccaagaaaggcaagggtaaaaaacctattgaagaccccgctaatgatacagtagattttccgaagcgaaccagtccagctcgtggttacgaattacttttccaaccagaagtagtgcgaatttacatctccctgctgaaggagtcgaagacacctgctatattggaggcgtctgctggcgccatccagaacctttgcgccggtaggtggacatatgggaggtacatcagaagtgcccttcggcaggagaaagcgctgtcagcaattgctgatctccttacaaatgagcacgagcgagtcgtgaaagctgcttctggagctcttcggaacttggccgtggatgcacggaataaagagctgattggcaaacatgctatccccaacctggtaaagaatttacccggcggccagcagaattcctcatggaactttagcgaagatacggtcattagtatcttaaacacgatcaatgaagtgatcgctgaaaacctggaagcagcaaagaaactgcgcgagacccagggtatcgagaagcttgtgcttatcaacaagagcggaaatagatcagaaaaggaagttagagccgccgccttggttcttcagacaatatggggatataaagagctgcgcaaacctttggagaaagagggctggaagaaatccgattttcaggttaatctcaataatgccagccgtagtcagtcgagtcacagctatgacgactcaacactgcctctcattgataggaaccagaagagcgataacaactactccacccccaacgagaggggggatcataatagaacacttgaccgctctggagatctaggcgacatggagcccctgaaaggaaccacaccactgatgcaggacgaaggccaggaatctttagaggaagagctggacgtgctggtgctcgatgatgaagggggacaggtgagttacccttcgatgcaaaaaatctag

SEQ ID NO: 116902 - DNA, 2826 bp, Artificial Sequence
  derived and/or modified sequence
atggatgacagcgaggtggagagcacagccagcatcctggcctctgtgaaggagcaggaggcccagtttgagaagctgacccgggccctggaggaggagcggcggcacgtgtctgcccagctggagcgggtgcgggtgagcccccaggatgccaaccccctgatggccaacggcaccctgacccggcggcaccagaatggccgctttgtgggagatgctgacctggagcggcagaagttcagtgacctgaagctgaatggcccccaggaccacagccacctgctgtacagcaccatccccaggatgcaggagcccggccagatcgtggagacctacacagaagaagatcctgagggcgccatgtctgtggtgtctgtggagaccagtgatgatggcaccaccaggagaacagagaccaccgtgaagaaggtggtgaagacagtgaccaccaggacagtgcagcctgtggccatgggcccagatggcctgcctgtggatgccagctctgtgagcaacaactacatccagaccctgggccgggacttcaggaagaatggaaatggaggccctggcccctacgtgggccaggccggcacagccaccctgcccaggaacttccactaccccccagatggctacagccgccactatgaagatggctacccaggcggcagtgacaactacggcagcctgagccgggtgaccagaattgaggagcgctaccggcccagcatggagggctaccgggcccccagccggcaggatgtgtatggcccccagccccaggtgcgggtgggcggcagctctgtggacctgcaccgcttccaccctgagccctacggcctggaggatgaccagaggtccatgggctatgatgacctggactatggcatgatgtctgactatggaacagcccggaggacaggcacccccagcgacccccggcggcggctgcggagctatgaggacatgattggagaggaggtgcccagcgaccagtactactgggcccccctggcccagcacgagcggggcagcctggccagcctggacagcctgaggaaaggaggccccccaccacccaactggaggcagcctgagctgcctgaggtgattgccatgctgggcttccggctggatgctgtgaagagcaatgctgctgcctacctgcagcacctgtgctacagaaatgacaaggtgaagacagatgtgaggaagctgaagggcatccctgtgctggtgggcctgctggaccaccccaagaaggaggtgcacctgggcgcctgtggggccctgaagaacatcagctttggccgggaccaggacaacaagatcgccatcaagaactgtgatggagtgcctgccctggtgcggctgctgaggaaggcccgggacatggacctgacagaggtgatcaccggcaccctgtggaacctgagcagccatgacagcatcaagatggagatcgtggaccacgccctgcacgccctgacagatgaagtcatcatcccccacagcggctgggagcgggagcccaatgaagactgcaagcccaggcacatcgagtgggagagcgtgctgaccaacacagctggctgcctgagaaatgtgtcctctgagaggtctgaggcccggaggaagctgcgggagtgtgatggcctggtggatgccctgatcttcatcgtgcaggccgagatcggccagaaggacagcgacagcaagctggtggagaactgtgtgtgcctgctgaggaacctgagctaccaggtgcaccgggagatcccccaggccgagcgctaccaggaggccgcccccaacgtggccaacaacacaggcccccatgctgccagctgctttggagccaagaagggcaagggcaagaagcccattgaagatcctgccaatgacacagtggacttccccaagaggaccagccctgcccggggctatgagctgctcttccagcctgaggtggtgcgcatctacatcagcctgctgaaggagagcaagaccccagccatcctggaggccagcgctggggccatccagaacctgtgtgccggccgctggacctacggccgctacatccgcagcgccctgcggcaggagaaggccctgagcgccatcgctgacctgctgaccaatgaacatgagcgggtggtgaaggccgccagcggggccctgaggaacctggccgtggatgccaggaacaaggagctgattggcaagcacgccatccccaacctggtgaagaacctgcccggcggccagcagaacagctcctggaacttcagcgaggacaccgtcatcagcatcctgaacaccatcaatgaggtgattgctgagaacctggaggccgccaagaagctgcgggagacccagggcatcgagaagctggtgctgatcaacaagagcggcaacagaagtgagaaggaggtgcgggccgccgccctggtgctgcagaccatctggggctacaaggagctgaggaagcccctggagaaggagggctggaagaagagtgacttccaggtgaacctgaacaatgccagccgcagccagagcagccacagctatgatgacagcaccctgcccctgattgacaggaaccagaagagtgacaacaactacagcaccccaaatgaaagaggagaccacaacagaaccctggacagaagtggggacctgggggacatggagcccctgaagggcaccacccccctgatgcaggatgagggccaggagagcctggaggaggagctggatgtgctggtgctggatgatgagggcggccaggtgtcctaccccagcatgcagaagatctag

SEQ ID NO: 116903 - DNA, 2826 bp, Artificial Sequence
  derived and/or modified sequence
atggacgacagcgaggtggagagcaccgccagcatcctggccagcgttaaagaacaggaggcccagttcgaaaaactaacacgagcactggaggaagagcggcggcatgtgagcgcccagttggaacgtgtgagagttagcccccaggacgcaaatcccctgatggctaatggcaccctgacccggaggcaccagaacggaaggtttgttggagacgccgacctggagcgacagaagtttagcgatctaaaactgaacgggccccaggatcactcccatcttctatactcaaccatacccagaatgcaggagccaggccagatcgtagagacctacacagaggaggatcccgagggggccatgtctgtagttagtgtcgagacctccgatgacgggactacaagaagaaccgaaacaacagtcaagaaggtggtcaaaactgttactacacgcactgtacagcccgtggcaatgggtcccgacggccttcccgttgacgcttctagcgtctccaacaactacatccaaaccctgggccgcgatttccgcaagaatgggaacggaggacccgggccctacgttgggcaggcaggtacggccaccctgcctaggaactttcattatcctccagacggctactctaggcactatgaagacgggtaccctggtggatctgacaactatgggagcctgagtcgggtgaccaggatcgaagagagatatcggccaagcatggaggggtatcgggcgcctagccgccaagacgtgtacggacctcaacctcaggtcagagtgggcggcagttccgtggacctgcaccgttttcatcccgagccttatggcttggaggatgaccaacgctcaatgggctatgacgatcttgattatggcatgatgagtgactacggcaccgcccgacgcactggcaccccctccgatcctcgcagacgtctccggtcatacgaagacatgattggtgaagaggtgccttccgaccagtattactgggctcccctcgcacagcatgagcgtgggagcctagcctcacttgattccctgcggaagggtggcccccctcctcccaattggaggcagcctgagctgccagaggtgatcgccatgcttgggttcaggctggacgcagtgaaaagcaatgctgccgcctatctacaacacttatgttataggaatgacaaggtgaagacggatgtgcgaaagctaaaggggatccccgtgctggtcgggttattagaccatcccaagaaagaggtacacctgggtgcctgtggggcactgaaaaatatctcttttggacgcgaccaagataacaaaattgccattaagaattgcgatggagtgccagccctggtgaggctgctgagaaaggcgcgcgatatggacctgactgaagtaattaccggaaccctgtggaacttgagcagccacgatagcattaagatggaaattgttgatcacgcactccatgccttgactgacgaagtgatcatcccccattccggctgggaaagggaacctaatgaggactgtaagcccagacatatcgagtgggagtccgtcttaacgaacaccgctggctgtctgaggaatgtgagttctgaacgctccgaggcccgtaggaagctgcgggaatgtgacggcctggtggacgccctgatcttcatcgtgcaggccgagatcggccaaaaagattcggattccaagctggtagagaactgtgtttgtttgttgaggaatctgtcctatcaggtgcacagggaaattcctcaggctgaacgttatcaggaagccgcccctaacgtggcaaataataccgggccgcacgctgcttcctgtttcggcgcgaaaaagggcaagggaaagaagcccatcgaggatcctgccaacgacacagttgattttccaaagagaacctctcctgcccggggatacgagttactgttccagcctgaagtggtccgcatctatatcagcctcctgaaagagagtaaaacgcctgctatcctagaagccagcgcgggcgccatacagaatctctgcgcggggcgctggacatacggcaggtatattcgctcagctcttaggcaggagaaagcactgtccgctattgcagacctgttaaccaacgaacacgaaagggtggtcaaagcagccagcggtgccttacggaacctggcggtggacgctcgcaataaagaattaattggcaaacatgccatccctaacctcgttaagaatctccccgggggccagcagaattcaagttggaacttctctgaagataccgtgatcagtatactcaacacaattaacgaagttattgctgagaaccttgaggcggccaagaaactccgtgaaacacagggaattgagaaactagtgttgatcaacaagagcgggaaccgatcagaaaaggaagtgcgtgcagcggccctggttctgcagactatctggggatataaggaactgagaaaacctctcgagaaagaaggctggaagaagtcagattttcaggtgaacttaaataacgcaagtagatcccagagctctcactcttacgatgacagtactcttcctctgatcgataggaaccaaaaatccgacaataattactccacccctaatgagaggggggatcataaccggacactggacagaagtggggatctcggagacatggaaccgctgaaaggaaccacacctctgatgcaggatgaggggcaggaaagtctagaggaggagctggacgttttggttctcgacgatgagggtgggcaagtgtcctaccctagcatgcagaaaatctag

SEQ ID NO: 116904 - DNA, 2826 bp, Artificial Sequence
  derived and/or modified sequence
atggatgatagcgaggtcgaaagcaccgcttcaatcctcgcgtctgtgaaggagcaggaagcccaattcgagaagcttacacgcgctttggaggaggaacgacgtcatgtcagcgcgcagctggaacgagtgagggtgagtccccaagatgctaatccgctgatggcaaacgggacacttacacgaaggcatcagaatgggagattcgtgggtgacgcagacctggagaggcagaagttctccgacctgaaactcaatggaccccaggatcattcacatttactgtattcaacgattcctaggatgcaggaacccggacagatcgtcgaaacatatacagaagaggatcctgaaggagccatgagtgttgtgtctgttgagacgtctgacgatggcacaacccggaggaccgagactacagttaagaaggtggtgaagactgtgactacacgcactgtgcaacccgtggccatgggtcctgatgggctcccagtggatgcctcttctgtatccaataattatatccagactctgggccgagactttcgtaagaatggcaatggcggtccgggtccatatgtgggtcaggccggtaccgcgactctaccacggaactttcactaccctcccgatgggtatagccgacactacgaggacggttatcccggaggcagcgacaactacgggtcactgagccgcgttacccgcatcgaggagaggtacagaccctcgatggaagggtacagagcgccttcccgacaggatgtgtacggccctcaaccacaagtccgggtcggaggctccagcgtcgatttgcaccgtttccatccggagccttacggactcgaagacgatcagcgcagtatgggttacgatgacctcgactatggaatgatgtcggattatggtaccgccagaagaaccgggacaccaagcgatcccaggaggcgtttgagatcttacgaggacatgattggagaggaggttccctccgatcagtattactgggcccctcttgcccaacacgaaagagggtccctggcttctctagacagtcttcggaagggcggtccacctccaccaaactggaggcagcctgaactacccgaagttattgccatgttaggttttcgcctggacgccgtgaagagtaacgcagccgcatatcttcaacacctctgttaccgaaacgataaggttaaaactgatgtgaggaaactcaagggcatccctgtgttggtgggcttactcgatcatccaaagaaggaagtacatcttggtgcgtgcggcgcactcaaaaatatttcttttggtcgggatcaggataataagatcgcgataaaaaactgtgacggagtgccagccctggtacgcctcttgaggaaagccagggatatggatctgaccgaggtgattaccggcactctttggaacctgagcagccacgatagcatcaagatggagatcgtcgaccatgcccttcatgccttgacagatgaggtcatcattccccatagcggctgggagagggaaccaaacgaggattgtaaacccagacacatcgagtgggagtccgtactgaccaatactgccggatgcctgcggaatgttagctccgagagaagtgaggcgcgacggaagctgagagaatgtgatgggctggtggacgctctgatctttatcgtgcaagccgagattgggcaaaaagacagcgactcaaagctggtggaaaactgcgtgtgcctactccgcaatctgtcctatcaagtccatcgggagattcctcaggccgaacgctatcaggaggctgcccctaacgtggcaaataataccggacctcacgccgcttcatgtttcggcgctaagaaaggcaagggaaaaaaacccatcgaggacccggcaaacgataccgttgacttccctaaaaggacgtctcctgcaaggggctatgaactcctttttcagcctgaggtcgtccggatttatatcagtttacttaaggaaagcaagacaccagctatccttgaggcctctgctggcgcaattcagaacctgtgtgccggtcgctggacctatggccgttatatccgcagtgccttgaggcaggaaaaagcgctgagtgcaatcgccgatctgctgactaatgagcacgagagggtggtgaaggctgccagcggagccctgcgcaatctagccgtcgacgcacggaacaaggagctcattggaaagcatgctatacctaatctggtcaaaaacctgccaggcggtcaacagaactcatcttggaatttctcagaagataccgtgatttcaattctgaatacaatcaatgaagtgatcgcggagaatttggaggccgctaagaagcttagagagactcagggaatagaaaagctggttctgattaacaaaagcgggaaccggtccgagaaggaggtccgggcagccgcacttgtgctgcagacaatctggggttataaggaactgcggaaaccactggagaaagagggatggaaaaaatctgattttcaagttaacttgaacaacgccagtagatcccaatcctcccactcgtatgacgacagtactcttccactgattgaccggaatcaaaagagtgataataattatagcacgcccaatgagcgcggagaccataacagaacactggatcgaagtggcgacctgggagatatggagccattgaaaggaactacacctctcatgcaagacgagggccaagagtccttggaggaggagctggacgtgctcgtcctggacgacgagggaggacaagtgtcttatccgtcaatgcagaaaatctag

SEQ ID NO: 116905 - DNA, 5931 bp, Artificial Sequence
  derived and/or modified sequence
ctgccagatcagtttgtcaccacccaggctcccttgcctttggctgggtgcaacttccattttaggtgttggatctgagggggaaaaaaaagagagagggagagagagagaaagaagagcaggaaagatcccgaaaggaggaagaggtggcgaaaaatcaactgccctgctggatttgtctttctcagcaccttggcgaagccttgggtttctttcttaaaggactgatttttagaactccacatttgaggtggagtcgaccgccagcatcttggcctctgtgaaggaacaagaggcccagtttgagaagctgacccgggcgctggaggaggaacggcgccacgtctcggcgcagctggaacgcgtccgggtctcaccacaagatgccaacccactcatggccaacggcacactcacccgccggcatcagaacggccggtttgtgggcgatgctgaccttgaaagacagaaattttcagatttgaaactcaacggaccccaggatcacagtcaccttctatatagcaccatccccaggatgcaggagccggggcagattgtggagacctacacggaggaggatcctgagggagccatgtctgtagtctctgtggagacctcagatgatgggaccactcggcgcacagagaccacggtcaagaaagtagtgaagactgtgacaacacggacagtacagccagtcgctatgggaccagacgggttgcctgtggatgcttcatcagtttctaacaactatatccagactttgggtcgtgatttccgcaagaatggcaatgggggacctggtccctatgtggggcaagctggcactgctacccttcctaggaacttccactaccctcctgatggttatagtcgccactatgaagatggttatccaggtggcagtgataactatggcagtctgtcccgggtgacccgcattgaggagcggtataggcccagcatggaaggctaccgggcacctagtagacaggatgtgtatgggccccaaccccaggttcgggtaggtgggagcagcgtggatctgcatcgctttcatccagagccttatgggctagaggatgaccagcgtagtatgggctatgatgacctggattatggtatgatgtctgattatggcactgcccgtcggactgggacaccctctgaccctcgtcggcgcctcaggagctatgaagacatgattggtgaggaggtgccatcggatcaatactactgggctcctttggcccagcatgagcgaggaagtttagcaagcttggatagcctgcgcaaaggagggcctccacctcctaattggagacagccagagctgccagaggtgatcgccatgcttggattccgcttggatgctgtcaagtccaatgcagctgcatacctgcaacacttatgctaccgcaatgacaaggtgaagactgacgtgcggaagctcaagggcatcccagtactggtgggattgttagaccatcccaaaaaggaagtgcaccttggagcctgtggagctctcaagaatatctcttttggacgtgaccaggataacaagattgccataaaaaactgtgatggtgtgcctgcccttgtgcgattgcttcgaaaggctcgtgatatggaccttactgaagttattaccggaaccctgtggaatctttcatcccatgactcaatcaaaatggagattgtggaccatgcactgcatgccttgacagatgaagtgatcattcctcattctggttgggagcgggaacctaatgaagactgtaagccacgccacattgagtgggaatcggtgctcaccaacacagctggctgccttaggaatgtaagctcagagaggagtgaagctcgccggaaacttcgggaatgtgatggtttagttgatgccctcattttcattgttcaggctgagattgggcagaaggattcagacagcaagcttgtagagaactgtgtttgccttcttcggaacttatcatatcaagttcaccgggagatcccacaggcagagcgttaccaagaggcagctcccaatgttgccaacaatactgggccacatgctgccagttgctttggggccaagaagggcaaagggaaaaaacctatagaggatccagcaaacgatacagtggatttccctaaaagaacgagtccagctcgaggctatgagctcttatttcagccagaggtggttcggatatacatctcacttcttaaggagagcaagactcctgccatcctagaagcctcagctggagctatccagaacttgtgtgctgggcgctggacgtatggtcgatacatccgctctgctctgcgtcaagagaaggctctttctgccatagctgacctcctgactaatgaacatgaacgggtggtgaaagctgcatctggagcactgagaaacctggctgtggatgctcgcaacaaagaattaattggtaaacatgctattcctaacttggtaaagaatctgccaggaggacagcagaactcctcttggaatttctctgaggacactgtcatctctattttgaacactatcaacgaggttatcgctgagaacttggaggctgccaaaaagcttcgagagacacagggtattgagaagctggtgttgatcaacaaatcagggaaccgctcagaaaaagaagttcgagcagcagcacttgtattacagacaatctggggatataaggaactgcggaagccactggaaaaagaaggatggaagaaatcagactttcaggtgaatctaaacaatgcttcccgaagccagagcagtcattcatatgatgatagtactctccctctcattgaccggaaccaaaaatcagataacaactattccacaccaaatgagagaggagaccacaatagaacactggatcgatcgggggatctaggcgacatggagccattgaagggaacaacacccttgatgcaggacgaggggcaggaatctctggaggaagagttggatgtgttggttttggatgatgaggggggccaagtgtcttacccctccatgcagaagatttagcaccactatctccgttccatctgggcttatatgtacttttattttttggtggtgaaattgactgatgattttcctttttcttcgctggactattgtgccaactgccaggctgcctcctgcccttacagccctaagtggctgccttctttccatcaactcccaacttcttcctgtgaagtttaattgtctcaacgcctccccctcccccattccctccatttttctcccaagaaacctgactcaattatttgcatattttgagaaactgctgcagattagttctttttgccagttttccctggaactcctggccttttgtggaggggagggatggagagaataggaatcttcactagaagccgtgggaagaattggaagttacatgctgtatatgcaatgtccagcagtctgataaactgacgattcttaatcaagatttttttcctgatggggaagggacttttattttcttttagagaggggaaagtgtgagctcttcccttattcctaatggctatttttgaagcaaagaaggccagcaacattggcacatgccacctggcaaaggacccttgagtaagtgaaggtctcctaaaactgggattaagaaaccttgctctcctcatctccaaggcagggaccatcaagaacctacagactccatctcttctgcaagcctcatgccaaccctgggctattgctgctgccccttaaacacaggctgtccttaacccacctctcctgccctgtgatatgtctgctgagttggcctggccatttccaagaggctgtagaaaggggagaatgtcaaggaagacttttggtagagaaggagcagaaagatgtgtttttgggaagaagaagacctctaggaggagctagtaggaatgtacatgaagcaattagtctgaaactggcttccccactcccccgtttctccttttcctatccttataggcctgtcccttgcctctgccctggattggttggcaaactaaaggacttgatgtacataactcctgtcccttttcccttacaaggtggggattgcccctggctttgcctcttctttgtgcctttggcctggggtgcatctcctcccgcccttccatgtgcctttctttgcctctgcagtctcatttctcataattttgcaaattatattttgttgctttcttacctactattggccctaaatagcagaaagaagagaagtgaccgagagaacctcagattcttcattgaggattggtatagccatgatttcagtcatagcaagcttttgctcaacagcatatgggtgggattttgcaaaaatcctattctgatgaatctcaaagtaaggctggtaagagaagtgagtggtgtgactcttactccttaggtgcccagaatttaccatcatctctgaaggagttacagggaagtggtctccccaattctcccctccctccagtattgccccctctcactttagcatatattaattagcaggttgggctagagaaatcagctgctatgcgggttgattattattattatttctaatccttttccttatttgccttctactccccttaatctaatctaaaagctctgttccatgcaactggagttccttatccctctcttccccttcccttatatattgaggctatggggtaggagaaaagtgcacaacccaccaccccctttactcgtgcattaaaatttcttatttacccttttcccccttcccatttcttcccactttcatctaccttttctggcaaaaaggagccttttgctctctgtgaccctaagagcacactgcacagggaaaattgccccatccagacctggctccactcttgatctctcttgtcctcttctgctcttttcctggtgctcttttttctcggtggggtgtgggtaatagaacagccgtgggcttttggggacctttaacttttttttctctcttttgtttataaaaaacactaaacattcaattccagagaaccaaaaatcccaccttcccaccgaacactactaaggggcttgtgttctgctccataccttttctcttttctttctgtcttgttaatgcttttaaaaacaaatgagttttttatataaataaagtttttaaagtgtgtatgtggggggtctgtgtcatttcttcacttcaagctgttatttcttccctgctttgcatctttgttacttccttatgtatcagtgtcctttccagagcaaccagaaggaggttataccaggatttattttgagctcagccccaactctttatcaagcaacattcttgttaactatatgtgaaacattttttcttctgaagattcttaaaaattgaatgtggctgaagttgaacatgggagcttattgctaatttagagataggaaactgaagcataaagaattaatgacttactttaattactggaattcttctgcaacatttgacaaaactaaccttgaataaggcccactgtaatacgtagctctcttaaatataacacttaggactagaagattagaaactaccaatcccaactacgtaataggaaaatgtaggatcaaaaggcccatgtatataagtactgaccactgggccataatgttgcttctcaggctatatgcagtcctttagtcagaagtcaataggcctatttattaatattttacagaccatattacctggattaccagggactatctttgctgcagagatcaagggttaagatctatgggaagatacttatttttctgaggtccttatgtcctgtcatataattaaagactcaagagaatttatgtgaaatgctttctgtatgcccaaatctttagattaaaattatatagctgctcct

SEQ ID NO: 116906 - DNA, 6232 bp, Artificial Sequence
  derived and/or modified sequence
ctgccagatcagtttgtcaccacccaggctcccttgcctttggctgggtgcaacttccattttaggtgttggatctgagggggaaaaaaaagagagagggagagagagagaaagaagagcaggaaagatcccgaaaggaggaagaggtggcgaaaaatcaactgccctgctggatttgtctttctcagcaccttggcgaagccttgggtttctttcttaaaggactgatttttagaactccacatttgaggtgtgtggcttttgaagaaaatgtatgtactgacgggaaaaggaggataagcaagtcgaatttttgtcttacgctctctccttcctgcttcctccttgctgtggtggctgggatgcttcttccatgattttttgaatctagactgggctgttctctgtgttaaaccaatcagttgcgaccttctcttaacagtgtgaagtgagggggtctctctccctccttctccttcctctgtgattcaccttcctttttaccctgccctgcggcggctccgccccttaccttcatggacgactcagaggtggagtcgaccgccagcatcttggcctctgtgaaggaacaagaggcccagtttgagaagctgacccgggcgctggaggaggaacggcgccacgtctcggcgcagctggaacgcgtccgggtctcaccacaagatgccaacccactcatggccaacggcacactcacccgccggcatcagaacggccggtttgtgggcgatgctgaccttgaaagacagaaattttcagatttgaaactcaacggaccccaggatcacagtcaccttctatatagcaccatccccaggatgcaggagccggggcagattgtggagacctacacggaggaggatcctgagggagccatgtctgtagtctctgtggagacctcagatgatgggaccactcggcgcacagagaccacggtcaagaaagtagtgaagactgtgacaacacggacagtacagccagtcgctatgggaccagacgggttgcctgtggatgcttcatcagtttctaacaactatatccagactttgggtcgtgatttccgcaagaatggcaatgggggacctggtccctatgtggggcaagctggcactgctacccttcctaggaacttccactaccctcctgatggttatagtcgccactatgaagatggttatccaggtggcagtgataactatggcagtctgtcccgggtgacccgcattgaggagcggtataggcccagcatggaaggctaccgggcacctagtagacaggatgtgtatgggccccaaccccaggttcgggtaggtgggagcagcgtggatctgcatcgctttcatccagagccttatgggctagaggatgaccagcgtagtatgggctatgatgacctggattatggtatgatgtctgattatggcactgcccgtcggactgggacaccctctgaccctcgtcggcgcctcaggagctatgaagacatgattggtgaggaggtgccatcggatcaatactactgggctcctttggcccagcatgagcgaggaagtttagcaagcttggatagcctgcgcaaaggagggcctccacctcctaattggagacagccagagctgccagaggtgatcgccatgcttggattccgcttggatgctgtcaagtccaatgcagctgcatacctgcaacacttatgctaccgcaatgacaaggtgaagactgacgtgcggaagctcaagggcatcccagtactggtgggattgttagaccatcccaaaaaggaagtgcaccttggagcctgtggagctctcaagaatatctcttttggacgtgaccaggataacaagattgccataaaaaactgtgatggtgtgcctgcccttgtgcgattgcttcgaaaggctcgtgatatggaccttactgaagttattaccggaaccctgtggaatctttcatcccatgactcaatcaaaatggagattgtggaccatgcactgcatgccttgacagatgaagtgatcattcctcattctggttgggagcgggaacctaatgaagactgtaagccacgccacattgagtgggaatcggtgctcaccaacacagctggctgccttaggaatgtaagctcagagaggagtgaagctcgccggaaacttcgggaatgtgatggtttagttgatgccctcattttcattgttcaggctgagattgggcagaaggattcagacagcaagcttgtagagaactgtgtttgccttcttcggaacttatcatatcaagttcaccgggagatcccacaggcagagcgttaccaagaggcagctcccaatgttgccaacaatactgggccacatgctgccagttgctttggggccaagaagggcaaagggaaaaaacctatagaggatccagcaaacgatacagtggatttccctaaaagaacgagtccagctcgaggctatgagctcttatttcagccagaggtggttcggatatacatctcacttcttaaggagagcaagactcctgccatcctagaagcctcagctggagctatccagaacttgtgtgctgggcgctggacgtatggtcgatacatccgctctgctctgcgtcaagagaaggctctttctgccatagctgacctcctgactaatgaacatgaacgggtggtgaaagctgcatctggagcactgagaaacctggctgtggatgctcgcaacaaagaattaattggtaaacatgctattcctaacttggtaaagaatctgccaggaggacagcagaactcctcttggaatttctctgaggacactgtcatctctattttgaacactatcaacgaggttatcgctgagaacttggaggctgccaaaaagcttcgagagacacagggtattgagaagctggtgttgatcaacaaatcagggaaccgctcagaaaaagaagttcgagcagcagcacttgtattacagacaatctggggatataaggaactgcggaagccactggaaaaagaaggatggaagaaatcagactttcaggtgaatctaaacaatgcttcccgaagccagagcagtcattcatatgatgatagtactctccctctcattgaccggaaccaaaaatcagataacaactattccacaccaaatgagagaggagaccacaatagaacactggatcgatcgggggatctaggcgacatggagccattgaagggaacaacacccttgatgcaggacgaggggcaggaatctctggaggaagagttggatgtgttggttttggatgatgaggggggccaagtgtcttacccctccatgcagaagatttagcaccactatctccgttccatctgggcttatatgtacttttattttttggtggtgaaattgactgatgattttcctttttcttcgctggactattgtgccaactgccaggctgcctcctgcccttacagccctaagtggctgccttctttccatcaactcccaacttcttcctgtgaagtttaattgtctcaacgcctccccctcccccattccctccatttttctcccaagaaacctgactcaattatttgcatattttgagaaactgctgcagattagttctttttgccagttttccctggaactcctggccttttgtggaggggagggatggagagaataggaatcttcactagaagccgtgggaagaattggaagttacatgctgtatatgcaatgtccagcagtctgataaactgacgattcttaatcaagatttttttcctgatggggaagggacttttattttcttttagagaggggaaagtgtgagctcttcccttattcctaatggctatttttgaagcaaagaaggccagcaacattggcacatgccacctggcaaaggacccttgagtaagtgaaggtctcctaaaactgggattaagaaaccttgctctcctcatctccaaggcagggaccatcaagaacctacagactccatctcttctgcaagcctcatgccaaccctgggctattgctgctgccccttaaacacaggctgtccttaacccacctctcctgccctgtgatatgtctgctgagttggcctggccatttccaagaggctgtagaaaggggagaatgtcaaggaagacttttggtagagaaggagcagaaagatgtgtttttgggaagaagaagacctctaggaggagctagtaggaatgtacatgaagcaattagtctgaaactggcttccccactcccccgtttctccttttcctatccttataggcctgtcccttgcctctgccctggattggttggcaaactaaaggacttgatgtacataactcctgtcccttttcccttacaaggtggggattgcccctggctttgcctcttctttgtgcctttggcctggggtgcatctcctcccgcccttccatgtgcctttctttgcctctgcagtctcatttctcataattttgcaaattatattttgttgctttcttacctactattggccctaaatagcagaaagaagagaagtgaccgagagaacctcagattcttcattgaggattggtatagccatgatttcagtcatagcaagcttttgctcaacagcatatgggtgggattttgcaaaaatcctattctgatgaatctcaaagtaaggctggtaagagaagtgagtggtgtgactcttactccttaggtgcccagaatttaccatcatctctgaaggagttacagggaagtggtctccccaattctcccctccctccagtattgccccctctcactttagcatatattaattagcaggttgggctagagaaatcagctgctatgcgggttgattattattattatttctaatccttttccttatttgccttctactccccttaatctaatctaaaagctctgttccatgcaactggagttccttatccctctcttccccttcccttatatattgaggctatggggtaggagaaaagtgcacaacccaccaccccctttactcgtgcattaaaatttcttatttacccttttcccccttcccatttcttcccactttcatctaccttttctggcaaaaaggagccttttgctctctgtgaccctaagagcacactgcacagggaaaattgccccatccagacctggctccactcttgatctctcttgtcctcttctgctcttttcctggtgctcttttttctcggtggggtgtgggtaatagaacagccgtgggcttttggggacctttaacttttttttctctcttttgtttataaaaaacactaaacattcaattccagagaaccaaaaatcccaccttcccaccgaacactactaaggggcttgtgttctgctccataccttttctcttttctttctgtcttgttaatgcttttaaaaacaaatgagttttttatataaataaagtttttaaagtgtgtatgtggggggtctgtgtcatttcttcacttcaagctgttatttcttccctgctttgcatctttgttacttccttatgtatcagtgtcctttccagagcaaccagaaggaggttataccaggatttattttgagctcagccccaactctttatcaagcaacattcttgttaactatatgtgaaacattttttcttctgaagattcttaaaaattgaatgtggctgaagttgaacatgggagcttattgctaatttagagataggaaactgaagcataaagaattaatgacttactttaattactggaattcttctgcaacatttgacaaaactaaccttgaataaggcccactgtaatacgtagctctcttaaatataacacttaggactagaagattagaaactaccaatcccaactacgtaataggaaaatgtaggatcaaaaggcccatgtatataagtactgaccactgggccataatgttgcttctcaggctatatgcagtcctttagtcagaagtcaataggcctatttattaatattttacagaccatattacctggattaccagggactatctttgctgcagagatcaagggttaagatctatgggaagatacttatttttctgaggtccttatgtcctgtcatataattaaagactcaagagaatttatgtgaaatgctttctgtatgcccaaatctttagattaaaattatatagctgctcct

SEQ ID NO: 116907 - DNA, 2826 bp, Artificial Sequence
  derived and/or modified sequence
atggacgacagcgaggtggagagcaccgccagcatcctggccagcgtgaaggagcaggaggcccagttcgagaagctgaccagagccctggaggaggagagaagacacgtgagcgcccagctggagagagtgagagtgagcccccaggacgccaaccccctgatggccaacggcaccctgaccagaagacaccagaacggcagattcgtgggcgacgccgacctggagagacagaagttcagcgacctgaagctgaacggcccccaggaccacagccacctgctgtacagcaccatccccagaatgcaggagcccggccagatcgtggagacctacaccgaggaggaccccgagggcgccatgagcgtggtgagcgtggagaccagcgacgacggcaccaccagaagaaccgagaccaccgtgaagaaggtggtgaagaccgtgaccaccagaaccgtgcagcccgtggccatgggccccgacggcctgcccgtggacgccagcagcgtgagcaacaactacatccagaccctgggcagagacttcagaaagaacggcaacggcggccccggcccctacgtgggccaggccggcaccgccaccctgcccagaaacttccactacccccccgacggctacagcagacactacgaggacggctaccccggcggcagcgacaactacggcagcctgagcagagtgaccagaatcgaggagagatacagacccagcatggagggctacagagcccccagcagacaggacgtgtacggcccccagccccaggtgagagtgggcggcagcagcgtggacctgcacagattccaccccgagccctacggcctggaggacgaccagagaagcatgggctacgacgacctggactacggcatgatgagcgactacggcaccgccagaagaaccggcacccccagcgaccccagaagaagactgagaagctacgaggacatgatcggcgaggaggtgcccagcgaccagtactactgggcccccctggcccagcacgagagaggcagcctggccagcctggacagcctgagaaagggcggcccccccccccccaactggagacagcccgagctgcccgaggtgatcgccatgctgggcttcagactggacgccgtgaagagcaacgccgccgcctacctgcagcacctgtgctacagaaacgacaaggtgaagaccgacgtgagaaagctgaagggcatccccgtgctggtgggcctgctggaccaccccaagaaggaggtgcacctgggcgcctgcggcgccctgaagaacatcagcttcggcagagaccaggacaacaagatcgccatcaagaactgcgacggcgtgcccgccctggtgagactgctgagaaaggccagagacatggacctgaccgaggtgatcaccggcaccctgtggaacctgagcagccacgacagcatcaagatggagatcgtggaccacgccctgcacgccctgaccgacgaggtgatcatcccccacagcggctgggagagagagcccaacgaggactgcaagcccagacacatcgagtgggagagcgtgctgaccaacaccgccggctgcctgagaaacgtgagcagcgagagaagcgaggccagaagaaagctgagagagtgcgacggcctggtggacgccctgatcttcatcgtgcaggccgagatcggccagaaggacagcgacagcaagctggtggagaactgcgtgtgcctgctgagaaacctgagctaccaggtgcacagagagatcccccaggccgagagataccaggaggccgcccccaacgtggccaacaacaccggcccccacgccgccagctgcttcggcgccaagaagggcaagggcaagaagcccatcgaggaccccgccaacgacaccgtggacttccccaagagaaccagccccgccagaggctacgagctgctgttccagcccgaggtggtgagaatctacatcagcctgctgaaggagagcaagacccccgccatcctggaggccagcgccggcgccatccagaacctgtgcgccggcagatggacctacggcagatacatcagaagcgccctgagacaggagaaggccctgagcgccatcgccgacctgctgaccaacgagcacgagagagtggtgaaggccgccagcggcgccctgagaaacctggccgtggacgccagaaacaaggagctgatcggcaagcacgccatccccaacctggtgaagaacctgcccggcggccagcagaacagcagctggaacttcagcgaggacaccgtgatcagcatcctgaacaccatcaacgaggtgatcgccgagaacctggaggccgccaagaagctgagagagacccagggcatcgagaagctggtgctgatcaacaagagcggcaacagaagcgagaaggaggtgagagccgccgccctggtgctgcagaccatctggggctacaaggagctgagaaagcccctggagaaggagggctggaagaagagcgacttccaggtgaacctgaacaacgccagcagaagccagagcagccacagctacgacgacagcaccctgcccctgatcgacagaaaccagaagagcgacaacaactacagcacccccaacgagagaggcgaccacaacagaaccctggacagaagcggcgacctgggcgacatggagcccctgaagggcaccacccccctgatgcaggacgagggccaggagagcctggaggaggagctggacgtgctggtgctggacgacgagggcggccaggtgagctaccccagcatgcagaagatctag

SEQ ID NO: 116908 - protein, 1225 aa, Artificial Sequence
  derived and/or modified sequence
MFARKPPGAAPLGAMPVPDQPSSASEKTSSLSPGLNTSNGDGSETETTSAILASVKEQELQFERLTRELEAERQIVASQLERCKLGSETGSMSSMSSAEEQFQWQSQDGQKDIEDELTTGLELVDSCIRSLQESGILDPQDYSTGERPSLLSQSALQLNSKPEGSFQYPASYHSNQTLALGETTPSQLPARGTQARATGQSFSQGTTSRAGHLAGPEPAPPPPPPPREPFAPSLGSAFHLPDAPPAAAAAALYYSSSTLPAPPRGGSPLAAPQGGSPTKLQRGGSAPEGATYAAPRGSSPKQSPSRLAKSYSTSSPINIVVSSAGLSPIRVTSPPTVQSTISSSPIHQLSSTIGTYATLSPTKRLVHASEQYSKHSQELYATATLQRPGSLAAGSRASYSSQHGHLGPELRALQSPEHHIDPIYEDRVYQKPPMRSLSQSQGDPLPPAHTGTYRTSTAPSSPGVDSVPLQRTGSQHGPQNAAAATFQRASYAAGPASNYADPYRQLQYCPSVESPYSKSGPALPPEGTLARSPSIDSIQKDPREFGWRDPELPEVIQMLQHQFPSVQSNAAAYLQHLCFGDNKIKAEIRRQGGIQLLVDLLDHRMTEVHRSACGALRNLVYGKANDDNKIALKNCGGIPALVRLLRKTTDLEIRELVTGVLWNLSSCDALKMPIIQDALAVLTNAVIIPHSGWENSPLQDDRKIQLHSSQVLRNATGCLRNVSSAGEEARRRMRECDGLTDALLYVIQSALGSSEIDSKTVENCVCILRNLSYRLAAETSQGQHMGTDELDGLLCGEANGKDAESSGCWGKKKKKKKSQDQWDGVGPLPDCAEPPKGIQMLWHPSIVKPYLTLLSECSNPDTLEGAAGALQNLAAGSWKWSVYIRAAVRKEKGLPILVELLRIDNDRVVCAVATALRNMALDVRNKELIGKYAMRDLVHRLPGGNNSNNTASKAMSDDTVTAVCCTLHEVITKNMENAKALRDAGGIEKLVGISKSKGDKHSPKVVKAASQVLNSMWQYRDLRSLYKKDGWSQYHFVASSSTIERDRQRPYSSSRTPSISPVRVSPNNRSASAPASPREMISLKERKTDYECTGSNATYHGAKGEHTSRKDAMTAQNTGISTLYRNSYGAPAEDIKHNQVSAQPVPQEPSRKDYETYQPFQNSTRNYDESFFEDQVHHRPPASEYTMHLGLKSTGNYVDFYSAARPYSELNYETSHYPASPDSWV

SEQ ID NO: 116909 - protein, 1167 aa, Artificial Sequence
  derived and/or modified sequence
MFARKPPGAAPLGAMPVPDQPSSASEKTSSLSPGLNTSNGDGSETETTSAILASVKEQELQFERLTRELEAERQIVASQLERCKLGSETGSMSSMSSAEEQFQWQSQDGQKDIEDELTTGLELVDSCIRSLQESGILDPQDYSTGERPSLLSQSALQLNSKPEGSFQYPASYHSNQTLALGETTPSQLPARGTQARATGQSFSQGTTSRAGHLAGPEPAPPPPPPPREPFAPSLGSAFHLPDAPPAAAAAALYYSSSTLPAPPRGGSPLAAPQGGSPTKLQRGGSAPEGATYAAPRGSSPKQSPSRLAKSYSTSSPINIVVSSAGLSPIRVTSPPTVQSTISSSPIHQLSSTIGTYATLSPTKRLVHASEQYSKHSQELYATATLQRPGSLAAGSRASYSSQHGHLGPELRALQSPEHHIDPIYEDRVYQKPPMRSLSQSQGDPLPPAHTGTYRTSTAPSSPGVDSVPLQRTGSQHGPQNAAAATFQRASYAAGPASNYADPYRQLQYCPSVESPYSKSGPALPPEGTLARSPSIDSIQKDPREFGWRDPELPEVIQMLQHQFPSVQSNAAAYLQHLCFGDNKIKAEIRRQGGIQLLVDLLDHRMTEVHRSACGALRNLVYGKANDDNKIALKNCGGIPALVRLLRKTTDLEIRELVTGVLWNLSSCDALKMPIIQDALAVLTNAVIIPHSGWENSPLQDDRKIQLHSSQVLRNATGCLRNVSSAGEEARRRMRECDGLTDALLYVIQSALGSSEIDSKTVENCVCILRNLSYRLAAETSQGQHMGTDELDGLLCGEANGKDAESSGCWGKKKKKKKSQDQWSVYIRAAVRKEKGLPILVELLRIDNDRVVCAVATALRNMALDVRNKELIGKYAMRDLVHRLPGGNNSNNTASKAMSDDTVTAVCCTLHEVITKNMENAKALRDAGGIEKLVGISKSKGDKHSPKVVKAASQVLNSMWQYRDLRSLYKKDGWSQYHFVASSSTIERDRQRPYSSSRTPSISPVRVSPNNRSASAPASPREMISLKERKTDYECTGSNATYHGAKGEHTSRKDAMTAQNTGISTLYRNSYGAPAEDIKHNQVSAQPVPQEPSRKDYETYQPFQNSTRNYDESFFEDQVHHRPPASEYTMHLGLKSTGNYVDFYSAARPYSELNYETSHYPASPDSWV

SEQ ID NO: 116910 - protein, 792 aa, Artificial Sequence
  derived and/or modified sequence
MRSLSQSQGDPLPPAHTGTYRTSTAPSSPGVDSVPLQRTGSQHGPQNAAAATFQRASYAAGPASNYADPYRQLQYCPSVESPYSKSGPALPPEGTLARSPSIDSIQKDPREFGWRDPELPEVIQMLQHQFPSVQSNAAAYLQHLCFGDNKIKAEIRRQGGIQLLVDLLDHRMTEVHRSACGALRNLVYGKANDDNKIALKNCGGIPALVRLLRKTTDLEIRELVTGVLWNLSSCDALKMPIIQDALAVLTNAVIIPHSGWENSPLQDDRKIQLHSSQVLRNATGCLRNVSSAGEEARRRMRECDGLTDALLYVIQSALGSSEIDSKTVENCVCILRNLSYRLAAETSQGQHMGTDELDGLLCGEANGKDAESSGCWGKKKKKKKSQDQWDGVGPLPDCAEPPKGIQMLWHPSIVKPYLTLLSECSNPDTLEGAAGALQNLAAGSWKWSVYIRAAVRKEKGLPILVELLRIDNDRVVCAVATALRNMALDVRNKELIGKYAMRDLVHRLPGGNNSNNTASKAMSDDTVTAVCCTLHEVITKNMENAKALRDAGGIEKLVGISKSKGDKHSPKVVKAASQVLNSMWQYRDLRSLYKKDGWSQYHFVASSSTIERDRQRPYSSSRTPSISPVRVSPNNRSASAPASPREMISLKERKTDYECTGSNATYHGAKGEHTSRKDAMTAQNTGISTLYRNSYGAPAEDIKHNQVSAQPVPQEPSRKDYETYQPFQNSTRNYDESFFEDQVHHRPPASEYTMHLGLKSTGNYVDFYSAARPYSELNYETSHYPASPDSWV

SEQ ID NO: 116911 - protein, 320 aa, Artificial Sequence [sequence omitted]

SEQ ID NO: 116912 - DNA, 3678 bp, Artificial Sequence
  derived and/or modified sequence
atgttcgcccgcaagcccccaggcgccgcccccctcggcgcaatgcccgtgccagaccaacctagcagtgcttctgaaaaaacatcttcacttagtcctggtcttaatactagcaatggcgacggaagtgaaacagagacgacctcagcaattttggcttcagtcaaggagcaggaattacagttcgaaaggctaactcgcgaactggaggcggaaagacagatagtagcaagccagcttgagcgatgcaagctgggttccgagaccgggagtatgagcagcatgtctagtgctgaggagcagttccaatggcagagtcaggatggacagaaggacattgaagatgaactgaccactggcttggagttagttgatagctgcatccgaagtcttcaggaaagtggaatcctggaccctcaggattacagtacaggagagcggccctcacttctgtcccagtctgccctacaactgaactcaaaacccgagggaagctttcagtaccccgcatcataccactctaaccaaactttggcattaggggaaaccaccccctctcagctgcccgctcggggaacccaggcgagggcaaccgggcagagctttagccagggcacaacctccagagcagggcacctggccggccccgagccagctcctccccccccaccgcctcctcgagagcccttcgcgccctccctaggtagcgcctttcacctgccggatgcgcctccagccgctgccgccgcagccctgtactattcatcaagcaccctgcctgcaccacccaggggaggaagcccacttgcagccccccagggtgggagccctactaaacttcagcgtggcggttccgccccggagggcgctacctacgcagcacctcgcggaagcagccctaaacagagtcctagccggctggccaaaagttattctacgtcctctcctattaacattgtagtctcctcagctggcctctctccaatccgcgtgacgtcaccccctactgtccagtccactatatcctcgagccccattcaccagctttcatctacaattggaacctacgcgacactttctcctactaaaagactggtgcacgcttctgagcagtactcgaagcactctcaggaattatacgctaccgccacccttcagagaccaggctccctagccgccggatccagagcgtcctactccagccaacacggccacctgggtccagaactgagggctctccagagtcccgaacatcatatcgatccgatctatgaagacagggtatatcagaagccacctatgaggtccctgtctcagtctcagggggaccctctgccgcccgcgcatacaggcacctacagaaccagcaccgcacctagtagtccgggcgtcgattccgtgccattacagaggactggttcccagcacggaccacaaaatgctgccgccgccacctttcaacgggcatcgtacgccgcaggaccagcctcaaactacgcggacccgtatagacagctgcagtactgtccatccgttgagagtccctattctaagagcggtcccgcactgcctcctgagggcactttggccagatctccctcaatagatagtatccagaaagacccccgggagttcgggtggcgagatccagagttacctgaagtgattcagatgctgcagcatcaattccctagcgtgcagtcaaacgctgcggcctacctgcaacatttgtgttttggagacaataagattaaagccgagataaggcggcaggggggtatccagctcctagtcgatctcttagaccaccggatgaccgaggttcatcggagcgcttgcggcgctctccgcaacctggtgtatggtaaagccaatgacgataacaagatagctctgaagaattgcggaggcatcccagccctggttaggctgttgcggaaaacgacagacctggaaattagggagctcgtcacaggcgtgttatggaatcttagctcatgcgacgccctgaaaatgccaattattcaggatgctttggctgttctaaccaacgccgtgatcataccccacagcgggtgggaaaactctcctctgcaggacgacagaaagattcagctccacagctcacaggtactgcgtaatgccactggatgccttaggaatgtctccagtgccggggaggaggcacgaagacggatgagagaatgtgatggactcaccgatgccctcctttacgtcattcagtcagccctcggcagcagtgaaatcgattctaagaccgtggaaaactgtgtgtgtatcctgcgaaacctgagttaccggctggcagctgaaacatcacagggacagcatatggggactgatgagctagacggacttctgtgtggggaggccaatgggaaggacgcagagtcttctgggtgctggggcaaaaagaaaaaaaagaagaaatctcaagatcaatgggatggcgtgggacccctccccgactgtgccgagcctccgaagggtatccaaatgctctggcaccccagcatcgtcaagccttatttaacattattgtccgaatgctccaatcctgatactttggaaggggcagccggtgctctgcaaaacctcgcagctggctcctggaagtggtctgtgtatatccgcgcagctgtgcggaaggaaaaaggcctccccatcctagtcgaactgctcagaattgacaatgaccgcgtggtgtgtgctgtcgccacagccctccgcaacatggcactcgacgtgcgcaacaaggaactcataggaaagtatgccatgcgggatctggtgcacagactgcccgggggcaataattccaacaacaccgctagtaaggccatgagcgatgatactgtgactgcagtttgctgcacccttcatgaagtgatcacgaaaaatatggagaacgctaaagctctacgagacgcaggaggtatcgagaaacttgtcggtatcagtaaatcaaaaggtgacaagcactcccccaaagtcgtcaaggccgctagccaggtgctcaactccatgtggcagtacagagacctgagatccctgtataagaaagacggttggtctcaatatcacttcgtggcttcctcgagcactattgagcgcgaccggcaaagaccatactcctctagtcggactcctagcatctcccctgtgcgggtctctcccaacaatcgaagcgcctctgcaccggcatcgccgagggaaatgatcagcctcaaagaaagaaagacagattacgagtgcaccggaagtaatgccacctaccatggagccaaaggagaacatacatccaggaaggacgccatgaccgcccagaatactgggatctcgaccctgtataggaactcctatggcgccccagcagaagatataaagcacaatcaggtgtcagctcagcccgtccctcaagagccttcacgaaaggactacgagacatatcagccgtttcagaacagtacgaggaattatgacgaatctttctttgaagatcaggtccaccacagaccccccgcctccgagtatacaatgcatctgggtctgaagtccactggcaattacgttgatttttactcagcagctcgtccctattctgagttgaattacgagacctctcattatcctgcctcgcctgacagttgggtgtag

SEQ ID NO: 116913 - DNA, 3504 bp, Artificial Sequence
  derived and/or modified sequence
atgtttgccaggaagcccccaggagccgcccccttaggagcaatgcccgtgccagaccagccttcctccgccagcgagaaaaccagctccctgagccccggcttgaatacaagcaatggagacggatccgaaacagaaaccacatccgcgattctggccagcgtcaaggagcaggaacttcagtttgaaaggttgacgagagagctcgaagcagaaagacagattgtggcgtcccagcttgagaggtgcaaactaggatctgagaccggaagtatgtcatcaatgtcctctgccgaggagcagttccagtggcagtcccaagatggccagaaagacattgaggacgagctcactacaggtttagaactagtggactcttgcattagaagcctgcaggaaagcggcatactggatccccaagactactcaacaggtgagagacctagcctgctgagtcaatctgcactgcagttaaacagtaaacccgagggatcatttcagtatccagcatcataccactccaaccagaccctggccttgggcgaaactaccccaagccagctgcctgccaggggcacccaggctagagctaccggacagtcattttcgcaaggcaccacaagtcgagcaggacaccttgcaggcccagagcccgccccaccgcctcctcctcctccacgggaaccattcgcacccagcttgggcagtgcctttcacctgcctgatgcccctcctgctgctgcagcagcagctctgtattacagctctagtacattaccagctcctccgagaggaggctctccactcgccgctccgcagggggggtcccccaccaagctgcagcgaggaggatcagcgcctgagggcgctacatatgccgctccaagggggtcttcaccaaaacaaagcccctccagattggcaaaatcctacagtacctccagtccaattaacatagtggtcagcagcgcaggcttaagccccataagggtcactagcccaccgactgtgcagagcactattagctcaagccctattcaccaactctcgtctaccatcgggacctacgctacactgtccccaaccaagcgactggttcatgcatcagagcagtattccaagcattctcaagagctgtacgcaactgccactctccagagaccaggatccctcgcagccgggagccgcgcaagctactccagtcagcatgggcatctaggcccagaactgcgcgcattgcagtctccagaacaccatatagacccaatctatgaggacagggtgtaccagaagccccccatgcgtagtctgtctcagtctcagggagaccccctaccacctgcgcacacgggaacctatcgcacttccacagcccccagcagccccggggtcgactcagtgcctctccagcggacaggtagtcagcatggaccccaaaacgcagccgctgcaacctttcagagggccagctatgccgccgggcctgcctctaactatgctgatccttatcgacagctgcagtattgtcccagcgtggaaagcccgtactccaagtctggaccagccctgccccctgaaggaaccctggcgcgctctccctccatcgatagcattcaaaaggaccctagggagttcggttggcgcgaccctgaacttccagaggtgatccaaatgctgcagcaccagtttccaagcgtacagtccaatgccgcagcctacctgcagcacctgtgtttcggcgataacaaaatcaaagccgaaatccggcggcaaggaggaatccaattgctggtagatctgctggatcacaggatgactgaagttcataggtctgcgtgtggggctctgcggaatcttgtttacggtaaggccaatgacgataacaagatcgcactcaaaaattgtggcgggataccagcacttgtcaggctgctgcgcaagacgacagaccttgaaattagagagcttgtgacgggtgtgctctggaacttgagctcttgcgatgccttgaaaatgccaataattcaggacgctctggctgtcctcactaacgcagttattatcccacattcagggtgggagaactccccccttcaggacgacagaaagatccagctccactctagccaggtgctgaggaacgcaacggggtgtctccgcaatgtttctagcgctggtgaggaagcaagacggcggatgagagagtgtgacggactgacggatgccctgctatacgtcatccagagtgctttaggctcctcagagatcgacagtaaaacagtggaaaactgcgtctgcatcctgcggaacctgtcgtatcggttggcagccgagaccagccagggacagcatatgggaacagatgaactcgacgggttgctttgtggggaggcaaatggcaaggatgccgagagctcaggctgctggggcaagaaaaagaagaagaagaagtcccaggatcagtggtcagtgtacattcgcgcagccgtgcgcaaagaaaaagggcttcctatccttgtggaacttctgcgaatcgacaatgatcgggtggtctgtgctgtcgctaccgctctgaggaacatggctcttgacgtccggaacaaggaactgatcgggaaatacgccatgagggacctggtccaccgactgcccggcggaaataactccaacaacactgcctcaaaagcaatgtcagatgacaccgtgaccgctgtgtgctgtacacttcacgaggtgatcactaagaacatggagaacgctaaggctttgcgcgacgcaggaggcattgagaagctggtaggaataagtaagtccaaaggtgataagcacagcccaaaggtcgttaaagccgcctcccaggttctgaactctatgtggcaataccgagatctcaggtctctgtataagaaggacggatggagtcagtaccacttcgtggcttccagctctactattgagcgggatcgccagcgtccctacagcagctcacggactcctagcatatctcccgtccgtgtgagtcccaataatcggagcgccagcgccccggcttcacctcgggagatgataagcttgaaagagagaaagactgactacgaatgcacgggctccaatgcaacataccacggtgccaagggggaacatacaagccgaaaagacgctatgacagcacagaataccggaatctctaccctttacaggaattcgtatggggctcctgcagaagacataaaacacaatcaagtaagcgctcagcccgtacctcaggaaccgtcccgcaaagattacgagacatatcaaccctttcaaaacagtactcggaattatgacgagtctttctttgaggatcaagtgcatcacaggcccccagcttccgagtatacaatgcacctggggctgaaaagcacgggaaactacgttgacttctacagtgccgcaagaccttattcagaactgaattatgagaccagtcattacccagctagcccagactcatgggtctag

SEQ ID NO: 116914 - DNA, 2379 bp, Artificial Sequence
  derived and/or modified sequence
atgaggtctttgagccagtcccagggggatcctctgccaccagctcacactggtacctacaggacttccactgccccatcgtccccaggcgtggattcagttccattacagcggaccggatcacaacatggacctcagaacgctgcagccgccacctttcagagggcctcatatgccgcgggtccagcgtctaattatgccgatccgtaccgccagcttcagtattgccccagcgtggaatcaccctactccaagtcaggtcccgcgcttccccctgagggcaccctcgcacgcagtccatccatcgatagcatccagaaggatccacgcgaattcggctggagagacccagaattacctgaggtgatacaaatgctccagcaccagtttccatccgtgcaaagcaatgccgctgcttatctgcagcacctgtgcttcggcgacaacaagattaaggctgagatccggagacaaggcggcattcagctcctggtcgaccttttggatcatcggatgaccgaggtacaccgatctgcgtgtggcgcccttagaaatctggtgtacgggaaggccaacgatgataacaagattgctctgaagaattgcggaggcattcccgccctcgtacggctgctgaggaagaccaccgatctggaaattagggaattggtgaccggtgtactgtggaacctgagcagctgcgatgcattgaagatgcccatcatccaagacgctcttgcagtgctcactaacgcagttattattcctcattctggatgggagaatagtccactgcaggatgatcggaagatccaacttcactcaagccaggtcttacggaacgccaccggatgtcttcgcaacgtaagtagcgctggagaagaggctagaaggagaatgagagaatgtgacggcctcaccgatgctctgctctatgtgatccagagtgcactcggcagctcggaaatagattctaaaaccgttgaaaattgtgtgtgtatcctgcggaacctgagttaccgacttgcggccgaaacatcacaaggtcagcacatgggcacagacgagctggatggcctcctgtgcggcgaagctaatggcaaagacgctgaaagctccggctgttggggcaaaaagaaaaaaaaaaaaaaatcacaggatcaatgggatggggttggacccttaccagactgcgccgagcctccgaaagggatccagatgttatggcatccttcgatcgtcaaaccctatctcaccctcctttccgaatgctccaacccggatacccttgagggcgcggcgggcgcacttcagaatcttgcggccggaagctggaagtggagcgtttacatcagagctgcagtgcggaaggagaaaggcctgcctatcttagtagagctgttacggatcgacaacgacagagtcgtgtgcgccgttgctactgctctgagaaatatggccctggacgtgaggaataaggagcttatcggcaagtacgccatgcgcgatctggtgcaccggcttccagggggtaataattccaataacacggccagtaaggcaatgtcagacgataccgttactgccgtgtgctgcacactgcacgaggtgatcaccaagaacatggagaacgcgaaagcccttcgtgatgccggagggatagagaagctcgtcgggatttctaaaagcaagggggataagcattccccaaaagtagtcaaggccgcaagtcaggtgttgaattccatgtggcagtaccgtgatctccgctctctctataagaaagacggctggagccagtatcatttcgttgcttcttctagcacaattgaacgcgatcgtcaacgcccctattcatcttctcgcaccccgtctatatcccccgtgagggtctctcccaataatagaagcgcatctgctcccgcctcgccgcgggaaatgatctccctgaaagaacggaagacagactatgagtgtaccggctcaaacgccacctaccatggcgccaaaggggagcatacatccagaaaggacgcgatgactgctcagaataccggcataagcactctctacagaaactcctacggtgcgcccgctgaagatattaagcacaaccaggtgagtgcccagcccgttccccaggagcctagtcgtaaggactatgagacctaccagcctttccagaacagcacacgcaattatgacgagagtttcttcgaagaccaggtccatcacaggccgccagcgagtgagtacacgatgcaccttggcctgaagagcaccggaaattatgtcgacttttattctgctgcaagaccgtattccgaacttaactacgaaacttctcattaccctgccagtccagattcttgggtttag

SEQ ID NO: 116915 - DNA, 3678 bp, Artificial Sequence
  derived and/or modified sequence
atgtttgccaggaagcccccaggagctgcccccctgggcgccatgcctgtgcctgaccagcccagcagcgccagcgagaagaccagcagcctgagccctggcctgaacaccagcaatggagatggcagcgagacagagaccaccagcgccatcctggcctctgtgaaggagcaggagctgcagtttgagcggctgacccgggagctggaggccgagcggcagatcgtggccagccagctggagcgctgcaagctgggcagcgagaccggctccatgagctccatgagcagcgctgaggagcagttccagtggcagagccaggacggccagaaggacattgaagatgagctgaccaccggcctggagctggtggacagctgcatccgcagcctgcaggagagcggcatcctggacccccaggactacagcactggagagcggcccagcctgctgagccagagcgccctgcagctgaacagcaagccagagggcagcttccagtacccagccagctaccacagcaaccagaccctggccctgggggagaccacccccagccagctgcctgcccggggcacccaggcccgggccaccggccagagcttcagccagggcaccaccagccgggccggccacctggccggccctgagcccgcccctcctcctcctcctccaccccgggagccctttgcccccagcctgggcagcgccttccacctgcctgatgcccccccagctgctgctgctgctgccctgtactacagcagcagcaccctgcctgccccaccccggggcggcagccccctggccgccccccagggcggcagccccaccaagctgcagagaggaggcagcgcccctgagggcgccacctatgctgccccccggggcagcagccccaagcagagccccagccggctggccaagagctacagcaccagcagccccatcaacatcgtggtgtcctctgctggcctgagccccatccgggtgaccagcccccccaccgtgcagagcaccatcagcagcagccccatccaccagctgagcagcaccatcggcacctacgccaccctgagccccaccaagaggctggtgcacgccagcgagcagtacagcaagcacagccaggagctgtatgccacagccaccctgcagaggcctggcagcctggccgccggcagccgggccagctacagcagccagcacggccacctgggccctgagctgcgggccctgcagagccctgagcaccacatcgaccccatctatgaagatagagtgtaccagaagccacccatgaggagcctgagccagagccagggcgaccccctgcccccagcccacacaggcacctaccgcaccagcacagcccccagcagccctggggtggacagcgtgcccctgcagaggacaggcagccagcacggcccccagaatgctgctgctgccaccttccagagggccagctatgctgctggccctgccagcaactatgctgacccctaccggcagctgcagtactgccccagcgtggagagcccctacagcaagagcggccctgccctgcccccagagggcaccctggcccggagccccagcattgacagcatccagaaggacccccgggagtttggctggagggaccctgagctgcctgaggtgatccagatgctgcagcaccagttccccagcgtgcagagcaatgctgctgcctacctgcagcacctgtgctttggagacaacaagatcaaggccgagatccggcggcagggcggcatccagctgctggtggacctgctggaccacaggatgacagaggtgcacaggtctgcctgtggggccctgaggaacctggtgtatggcaaggccaatgatgacaacaagatcgccctgaagaactgtggcggcatcccagccctggtgcggctgctgaggaagaccacagacctggagatccgggagctggtgactggagtgctgtggaacctgagcagctgtgatgccctgaagatgcccatcatccaggatgccctggccgtgctgaccaatgctgtgatcatcccccacagcggctgggagaacagccccctgcaggatgacaggaagatccagctgcacagcagccaggtgctgagaaatgccaccggctgcctgagaaatgtgagcagcgctggggaggaggcccggcggaggatgagagaatgtgatggcctgacagatgccctgctgtatgtgatccagagcgccctgggcagcagcgagattgacagcaagacagtggagaactgtgtgtgcatcctgaggaacctgagctaccgcctggccgctgagaccagccagggccagcacatgggcacagatgagctggatggcctgctgtgtggggaggccaacgggaaggatgctgagagcagcggctgctggggcaagaagaagaagaagaagaagagccaggaccagtgggatggagtgggccccctgcctgactgtgccgagccccccaagggcatccagatgctgtggcaccccagcatcgtgaagccctacctgaccctgctgtctgagtgcagcaacccagacaccctggagggcgctgctggggccctgcagaacctggccgccggctcctggaagtggagcgtgtacatccgggctgctgtgaggaaggagaagggcctgcccatcctggtggagctgctgagaattgacaatgacagagtggtgtgtgctgtggccacagccctgaggaacatggccctggatgtgaggaacaaggagctgattggcaagtatgccatgagggacctggtgcaccggctgcccggcggcaacaacagcaacaacacagccagcaaggccatgtctgatgacacagtgacagctgtgtgctgcaccctgcacgaggtgatcaccaagaacatggagaatgccaaggccctgagagatgctgggggcatcgagaagctggtgggcatcagcaagagcaaaggagacaagcacagccccaaggtggtgaaggccgccagccaggtgctgaacagcatgtggcagtacagagacctgcggagcctgtacaagaaggatggctggagccagtaccactttgtggccagcagcagcaccatcgagcgggaccggcagaggccctacagcagcagcaggacccccagcatcagccctgtgcgggtgagccccaacaacagaagtgccagcgccccagccagcccccgggagatgatcagcctgaaggagaggaagacagattatgaatgtacaggcagcaatgccacctaccacggggccaagggggagcacaccagcaggaaggatgccatgacagcccagaacacaggcatcagcaccctgtacagaaattcctatggagccccagctgaggacatcaagcacaaccaggtgtctgcccagcctgtgccccaggagcccagcaggaaggactatgagacctaccagcccttccagaacagcaccagaaattatgatgagagcttctttgaggaccaggtgcaccaccggcccccagccagcgagtacaccatgcacctgggcctgaagagcacaggcaactacgtggacttctacagcgctgcccggccctacagcgagctgaactatgagaccagccactacccagccagcccagacagctgggtgtag

SEQ ID NO: 116916 - DNA, 3504 bp, Artificial Sequence
  derived and/or modified sequence
atgtttgccaggaagcccccaggagctgcccccctgggcgccatgcctgtgcctgaccagcccagcagcgccagcgagaagaccagcagcctgagccctggcctgaacaccagcaatggagatggcagcgagacagagaccaccagcgccatcctggcctctgtgaaggagcaggagctgcagtttgagcggctgacccgggagctggaggccgagcggcagatcgtggccagccagctggagcgctgcaagctgggcagcgagaccggctccatgagctccatgagcagcgctgaggagcagttccagtggcagagccaggacggccagaaggacattgaagatgagctgaccaccggcctggagctggtggacagctgcatccgcagcctgcaggagagcggcatcctggacccccaggactacagcactggagagcggcccagcctgctgagccagagcgccctgcagctgaacagcaagccagagggcagcttccagtacccagccagctaccacagcaaccagaccctggccctgggggagaccacccccagccagctgcctgcccggggcacccaggcccgggccaccggccagagcttcagccagggcaccaccagccgggccggccacctggccggccctgagcccgcccctcctcctcctcctccaccccgggagccctttgcccccagcctgggcagcgccttccacctgcctgatgcccccccagctgctgctgctgctgccctgtactacagcagcagcaccctgcctgccccaccccggggcggcagccccctggccgccccccagggcggcagccccaccaagctgcagagaggaggcagcgcccctgagggcgccacctatgctgccccccggggcagcagccccaagcagagccccagccggctggccaagagctacagcaccagcagccccatcaacatcgtggtgtcctctgctggcctgagccccatccgggtgaccagcccccccaccgtgcagagcaccatcagcagcagccccatccaccagctgagcagcaccatcggcacctacgccaccctgagccccaccaagaggctggtgcacgccagcgagcagtacagcaagcacagccaggagctgtatgccacagccaccctgcagaggcctggcagcctggccgccggcagccgggccagctacagcagccagcacggccacctgggccctgagctgcgggccctgcagagccctgagcaccacatcgaccccatctatgaagatagagtgtaccagaagccacccatgaggagcctgagccagagccagggcgaccccctgcccccagcccacacaggcacctaccgcaccagcacagcccccagcagccctggggtggacagcgtgcccctgcagaggacaggcagccagcacggcccccagaatgctgctgctgccaccttccagagggccagctatgctgctggccctgccagcaactatgctgacccctaccggcagctgcagtactgccccagcgtggagagcccctacagcaagagcggccctgccctgcccccagagggcaccctggcccggagccccagcattgacagcatccagaaggacccccgggagtttggctggagggaccctgagctgcctgaggtgatccagatgctgcagcaccagttccccagcgtgcagagcaatgctgctgcctacctgcagcacctgtgctttggagacaacaagatcaaggccgagatccggcggcagggcggcatccagctgctggtggacctgctggaccacaggatgacagaggtgcacaggtctgcctgtggggccctgaggaacctggtgtatggcaaggccaatgatgacaacaagatcgccctgaagaactgtggcggcatcccagccctggtgcggctgctgaggaagaccacagacctggagatccgggagctggtgactggagtgctgtggaacctgagcagctgtgatgccctgaagatgcccatcatccaggatgccctggccgtgctgaccaatgctgtgatcatcccccacagcggctgggagaacagccccctgcaggatgacaggaagatccagctgcacagcagccaggtgctgagaaatgccaccggctgcctgagaaatgtgagcagcgctggggaggaggcccggcggaggatgagagaatgtgatggcctgacagatgccctgctgtatgtgatccagagcgccctgggcagcagcgagattgacagcaagacagtggagaactgtgtgtgcatcctgaggaacctgagctaccgcctggccgctgagaccagccagggccagcacatgggcacagatgagctggatggcctgctgtgtggggaggccaacgggaaggatgctgagagcagcggctgctggggcaagaagaagaagaagaagaagagccaggaccagtggagcgtgtacatccgggctgctgtgaggaaggagaagggcctgcccatcctggtggagctgctgagaattgacaatgacagagtggtgtgtgctgtggccacagccctgaggaacatggccctggatgtgaggaacaaggagctgattggcaagtatgccatgagggacctggtgcaccggctgcccggcggcaacaacagcaacaacacagccagcaaggccatgtctgatgacacagtgacagctgtgtgctgcaccctgcacgaggtgatcaccaagaacatggagaatgccaaggccctgagagatgctgggggcatcgagaagctggtgggcatcagcaagagcaaaggagacaagcacagccccaaggtggtgaaggccgccagccaggtgctgaacagcatgtggcagtacagagacctgcggagcctgtacaagaaggatggctggagccagtaccactttgtggccagcagcagcaccatcgagcgggaccggcagaggccctacagcagcagcaggacccccagcatcagccctgtgcgggtgagccccaacaacagaagtgccagcgccccagccagcccccgggagatgatcagcctgaaggagaggaagacagattatgaatgtacaggcagcaatgccacctaccacggggccaagggggagcacaccagcaggaaggatgccatgacagcccagaacacaggcatcagcaccctgtacagaaattcctatggagccccagctgaggacatcaagcacaaccaggtgtctgcccagcctgtgccccaggagcccagcaggaaggactatgagacctaccagcccttccagaacagcaccagaaattatgatgagagcttctttgaggaccaggtgcaccaccggcccccagccagcgagtacaccatgcacctgggcctgaagagcacaggcaactacgtggacttctacagcgctgcccggccctacagcgagctgaactatgagaccagccactacccagccagcccagacagctgggtgtag

SEQ ID NO: 116917 - DNA, 2379 bp, Artificial Sequence
  derived and/or modified sequence
atgaggagcctgagccagagccagggcgaccccctgcccccagcccacacaggcacctaccgcaccagcacagcccccagcagccctggggtggacagcgtgcccctgcagaggacaggcagccagcacggcccccagaatgctgctgctgccaccttccagagggccagctatgctgctggccctgccagcaactatgctgacccctaccggcagctgcagtactgccccagcgtggagagcccctacagcaagagcggccctgccctgcccccagagggcaccctggcccggagccccagcattgacagcatccagaaggacccccgggagtttggctggagggaccctgagctgcctgaggtgatccagatgctgcagcaccagttccccagcgtgcagagcaatgctgctgcctacctgcagcacctgtgcttcggggacaacaagatcaaggccgagatccggcggcagggcggcatccagctgctggtggacctgctggaccacaggatgacagaggtgcacaggtctgcctgtggggccctgaggaacctggtgtatggcaaggccaatgatgacaacaagatcgccctgaagaactgtggcggcatcccagccctggtgcggctgctgaggaagaccacagacctggagatccgggagctggtgactggagtgctgtggaacctgagcagctgtgatgccctgaagatgcccatcatccaggatgccctggccgtgctgaccaatgctgtgatcatcccccacagcggctgggagaacagccccctgcaggatgacaggaagatccagctgcacagcagccaggtgctgagaaatgccaccggctgcctgagaaatgtgtcctctgctggggaggaggcccggcggaggatgagagaatgtgatggcctgacagatgccctgctgtatgtgatccagagcgccctgggcagcagcgagattgacagcaagacagtggagaactgtgtgtgcatcctgaggaacctgagctaccgcctggccgctgagaccagccagggccagcacatgggcacagatgagctggatggcctgctgtgtggggaggccaacgggaaggatgctgagagcagcggctgctggggcaagaagaagaagaagaagaagagccaggaccagtgggatggagtgggccccctgcctgactgtgccgagccccccaagggcatccagatgctgtggcaccccagcatcgtgaagccctacctgaccctgctgtctgaatgtagcaacccagacaccctggagggcgccgccggggccctgcagaacctggccgccggctcctggaagtggagcgtgtacatccgggctgctgtgaggaaggagaagggcctgcccatcctggtggagctgctgagaattgacaatgacagagtggtgtgtgctgtggccacagccctgaggaacatggccctggatgtgaggaacaaggagctgattggcaagtatgccatgagggacctggtgcaccggctgcccggcggcaacaacagcaacaacacagccagcaaggccatgtctgatgacacagtgacagctgtgtgctgcaccctgcatgaagtcatcaccaagaacatggagaatgccaaggccctgagagatgctgggggcatcgagaagctggtgggcatcagcaagagcaagggggacaagcacagccccaaggtggtgaaggccgccagccaggtgctgaacagcatgtggcagtacagagacctgcggagcctgtacaagaaggatggctggagccagtaccactttgtggccagcagcagcaccatcgagcgggaccggcagaggccctacagcagcagcaggacccccagcatcagccctgtgcgggtgagccccaacaacagaagtgccagcgccccagccagcccccgggagatgatcagcctgaaggagaggaagacagattatgagtgcaccggcagcaatgccacctaccatggagccaagggggagcacaccagcaggaaggatgccatgacagcccagaacacaggcatcagcaccctgtacagaaacagctatggagccccagctgaggacatcaagcacaaccaggtgtctgcccagcctgtgccccaggagcccagcaggaaggactatgagacctaccagcccttccagaacagcaccaggaactatgatgagagcttctttgaggaccaggtgcaccaccggcccccagccagcgagtacaccatgcacctgggcctgaagagcactggaaactacgtggacttctacagcgctgcccggccctacagcgagctgaactatgagaccagccactacccagccagcccagacagctgggtgtag

SEQ ID NO: 116918 - DNA, 3678 bp, Artificial Sequence
  derived and/or modified sequence
atgttcgcccggaagccccccggcgccgcccccctgggcgccatgccagtcccggaccagccttcatccgccagcgaaaagactagctcactgtcgccagggctgaacacctccaacggcgacggttcagagaccgagaccacgagtgccatccttgcaagcgttaaggaacaggaacttcagtttgagaggctgactcgagagctggaagcagaacggcagatcgttgcaagtcagctcgaacgatgcaagctgggatccgaaaccggctctatgtcaagcatgtcgtcagcggaggagcagtttcaatggcaatctcaggacggccaaaaagatatagaagatgagttaacgaccgggttagaactggtggatagttgcatcaggtcgctgcaagagagcggtattctggaccctcaggattactctacaggggaacgtccatctctgctcagccagagcgccctccagctaaatagcaagcccgagggctctttccagtacccagccagttatcacagtaaccaaacactcgcgcttggcgagacgacacccagccagcttccggctagaggaacacaggcaagagcaaccggccagagcttcagtcagggcactactagccgggccggtcacttggctggccccgagcccgccccaccaccaccgcctcccccgagggaaccatttgcaccttcactgggcagcgcctttcacctgcccgatgcacctcccgccgccgctgctgcagcgctgtactattcctctagcacactgcctgcgccacctcgcgggggaagtccgctggctgccccacaggggggttcccccacaaaactccagcgtggcgggagtgctccagagggggcgacttacgctgcaccaagggggagcagccctaagcagtcaccatcccggctcgccaagtcttatagtaccagttctcccattaacatcgtggtgtcctccgccggactgtctcccatccgcgttacgagtccaccgaccgtgcaatctacaatctcgtcaagccccatacaccagctctcctccacaatcggtacttatgctacactgtcccctactaagaggctggttcacgcttccgaacagtacagcaagcatagccaggagttgtacgccaccgccactcttcaacgtccaggcagcctggccgctggatcccgggctagctattcctcccagcatgggcatctggggcctgagctgagagctctgcaatccccagaacaccatatcgacccgatctatgaggacagggtgtatcagaagcctcccatgcgctctctgtctcagtcacagggtgatcccctacctcccgcccacacagggacttatcgcacaagtactgctcccagctccccaggtgtggacagcgtaccccttcagcggacggggtcacaacatgggccacaaaatgccgcagccgcaacatttcagagagctagctacgctgccgggccagcctccaactacgccgatccctatcgtcagctccagtactgcccaagtgttgagagcccgtattccaagtcgggcccagcactgccccccgaaggaaccttggcgaggagcccgtctattgacagcattcagaaagatcctagagaattcggatggagggaccccgagctgccagaagtgatccagatgctgcagcaccagttcccatccgtgcagagcaacgccgcagcatacctccaacacctgtgttttggcgacaataagatcaaagctgaaattagaaggcagggaggtattcaactgctggtggacctccttgatcatcgcatgaccgaagttcataggtcagcatgtggagcgctgaggaacctcgtctatggtaaggccaatgacgataacaaaatagcactcaaaaactgtggagggatcccagcactagtgagactgctgaggaagaccacagacctggagatccgtgaactggtgactggtgtcctgtggaatctgtcctcatgcgatgcccttaaaatgcctatcatccaggacgccttggctgtcctgactaatgcagtcatcattccgcactccggttgggaaaatagccccctgcaggatgatcgaaagatacagcttcacagctcgcaggttctccgaaatgccaccgggtgccttcggaacgtgagcagcgcaggtgaagaggctcgcagaaggatgagagaatgtgacgggcttaccgacgctctgttgtatgttattcagtcagccttaggctcttctgaaatcgattccaagacagttgaaaactgtgtctgtattctgcggaacctgtcatacagattggccgcagagaccagtcagggacagcacatgggaacagatgagcttgacggcctgctgtgtggggaagctaatggcaaagacgccgagtccagcgggtgctggggcaaaaaaaagaaaaagaaaaagtctcaagatcagtgggatggtgtcggtccacttccagactgcgccgagcccccaaagggtatacagatgttatggcatcctagtattgttaagccttacctgactttattgtccgaatgcagtaatccagataccctggaaggagcagccggcgccctgcagaatctcgccgcagggagttggaaatggtccgtgtacatccgagcggccgtgaggaaggagaaggggctgcctatcctcgtggaactactgaggattgataatgaccgagtcgtgtgcgctgtggctacagctctacggaatatggcactggacgtacggaacaaagaattgattgggaaatatgctatgcgggatctggtgcaccggctcccaggaggcaataactctaacaacaccgcctccaaggcaatgtctgacgacacagtgactgcggtttgttgtactctgcacgaggtgattaccaaaaatatggagaacgcaaaagccctacgggacgccggaggtatcgaaaaactggttggcatttccaaaagtaaaggcgacaagcattccccaaaagtcgtgaaggccgcgtcccaagtgctcaattcaatgtggcagtacagagatctcaggagtttgtataagaaagatggctggagccagtatcatttcgtggcctcctcctcgacaatcgaacgtgatagacaaaggccctacagctcttctcggaccccctccatttccccagtacgagtgtccccgaataatagaagcgcttcggcacctgctagcccacgggaaatgatcagcctcaaggagagaaagaccgactacgaatgcacaggcagcaatgctacctaccacggcgctaagggggagcacaccagccgcaaggacgccatgacagcacagaacaccggcatcagtactctatacagaaacagttacggcgcccctgccgaagatattaagcacaatcaagtttcagcacagcccgtgccacaggaaccgtcacgtaaggattatgagacctaccaaccattccagaatagtacaaggaactacgacgaaagtttttttgaggatcaggtgcaccaccgacctcctgctagcgagtacaccatgcatttagggctcaagagtaccggtaactacgtcgatttctatagcgcagcgcggccttactccgagctaaactatgagacttcccattaccctgccagcccagactcctgggtgtag

SEQ ID NO: 116919 - DNA, 3504 bp, Artificial Sequence
  derived and/or modified sequence
atgttcgcccggaagccccccggcgccgcccccctgggcgccatgcccgtacccgatcagcccagctccgcctcagagaagaccagttcattatcaccagggctgaatactagtaatggagacggaagcgaaacggaaaccacaagtgctatcctggcgtcagtcaaggaacaggagttgcagttcgaacgcctgacccgggagttagaagccgaaaggcagatcgtcgcttcacaattggagaggtgcaagctcggtagtgagacaggttccatgtcctccatgtcatcagccgaagagcagtttcagtggcagtctcaggatggccagaaggacatcgaagacgagctaaccacaggtctagagctagtcgattcatgcatcaggtccctgcaggaatcgggcattctggatccgcaggactattcaaccggcgagcgccctagcttactctcgcaatcagctctgcagctcaattcgaaaccggagggctcctttcagtatcccgcaagctaccactcaaaccagaccctggcattgggggagaccactccctctcagcttcccgcccgcggaacacaggcccgggctacagggcaatctttttctcaaggtacaacatcccgggctggtcacctagccggccctgagcccgccccgccaccaccaccgccccctcgggagcccttcgctccatccctgggtagcgcgttccacctgcctgacgcacctcctgccgccgccgccgcagcactctattactctagttccacactccctgctccacctcgaggggggtcaccgcttgctgctccacagggaggcagcccgactaaactgcagcggggaggcagtgctccggagggggccacctatgctgccccgcggggcagtagcccaaaacaatcaccctcacgactcgccaagtcttactcaacttcctcccctatcaacattgtcgtgtccagtgcaggtctgtctcctatcagggtgacatcaccgcctactgtgcaaagtacgattagcagcagccctatccaccagttgagttcaaccattggtacgtatgcaacactctcacccacaaagcgtctggttcacgcaagtgaacagtattctaaacacagccaggagctgtacgctactgcaacacttcaaagacccggctcccttgcagccgggtcaagagcatcatactcctcccagcacggccatttaggtcccgaactgcgcgcccttcagagccccgagcaccacattgacccgatctacgaagaccgagtttaccagaaacctcctatgcgatctctgagccagagtcaaggggaccccctacctccggcacatactggtacttacaggacatctactgctccatccagccccggggtagacagcgtcccgttgcagcgtactgggtcccagcacgggccccagaatgccgccgcagctacctttcagcgggcctcatatgcggccgggcccgcttccaactacgccgacccttaccggcagcttcagtactgtccatcagtggagtcgccatattcaaagtccgggccggccctgcctcccgagggtaccctggctcgctcacccagtatagattccatacagaaagacccccgcgaattcggatggagagaccccgagttacccgaggtgatccagatgctacagcaccagtttccttctgtgcaatcaaatgcagccgcctacctgcagcacctgtgtttcggtgacaacaagatcaaagctgaaatacggcggcaaggcggaattcagttacttgtggacctcctcgatcacaggatgaccgaagtacataggtctgcatgcggcgccctgagaaacctagtatatggcaaggccaatgatgacaataagattgccctgaaaaactgcggtggcatccctgcactggtccggttattgcgaaagactactgatctggaaatccgggaattggtgaccggagtgttgtggaacctcagcagttgtgacgcacttaaaatgcccatcatccaggacgcccttgctgtgttaaccaacgccgtaattatacctcattctgggtgggaaaactcccccctccaggatgaccgcaaaatacagttgcatagctcacaggtgctgcgaaacgcgactggatgcttgagaaacgtgtcgtctgccggtgaagaagcgcggcgcagaatgcgcgagtgcgatggacttaccgatgccctgctttatgttattcaatctgccctcgggagtagcgagatagactccaaaaccgtggagaactgcgtgtgcatcttgcgaaacctgtcatacagacttgctgcggaaacttctcaagggcagcacatgggaacagatgaactggatgggctcctctgcggtgaagccaacgggaaagacgctgaaagctcgggctgctggggaaagaagaaaaagaagaaaaaaagccaggaccagtggtctgtgtacatcagagcagccgtgaggaaagagaaggggttaccaattttggtggagctgctgcggatcgataatgacagggtggtgtgtgccgttgcgactgcactgcggaatatggcgctcgacgtaaggaataaagagttgatcggtaaatatgcaatgagagatcttgttcacaggctacccggtgggaataattccaataacactgctagcaaggcgatgtccgacgatacagttactgcagtgtgctgtaccctgcacgaagtgataaccaagaatatggaaaacgccaaagcactccgagacgctggaggcattgaaaagctggttggcatctcaaagtcgaagggcgacaaacatagtcccaaggtggtcaaagcggcaagtcaggtactgaactctatgtggcaatacagagacctgagatccctgtataaaaaggatggctggagtcaatatcatttcgtagccagctcctcaaccattgagagagatagacaaaggccctacagcagttcacgcacaccttccatcagcccagttcgtgtgtcgcccaataaccgcagcgcctccgcacctgcttcacccagggagatgatttcgttaaaagagaggaagaccgattacgagtgcaccgggtccaatgcaacctaccacggcgccaagggcgagcacacgtccagaaaggatgcaatgactgcccagaatactggtattagcaccctctatcgcaattcatatggcgccccagctgaagacattaagcacaaccaggtgagcgcgcagcctgtcccccaggagccatcgcgaaaggactatgaaacgtaccagccatttcaaaattcaacgagaaattatgatgagtcctttttcgaagatcaggttcaccacaggcctcctgccagcgaatacaccatgcacctgggcctgaaaagcacagggaactatgtggacttttacagcgccgcacgcccttattccgagcttaattatgagacttcacactaccctgcgtcccccgatagttgggtgtag

SEQ ID NO: 116920 - DNA, 2379 bp, Artificial Sequence
  derived and/or modified sequence
atgcggagcctgagccagagccagggcgaccccctgccccccgcccacacaggcacctatagaacttcaacagccccgagctctcccggcgtcgactcggtgccactccaacgtacagggtcccagcacggtcctcagaatgccgcagcggccacattccagagggcaagctacgccgctggacctgccagtaactacgcggacccatatagacagttgcagtactgtccatctgtggagagtccctatagtaaaagtgggcccgcattgccgcctgaaggaaccctggcacgcagtcctagcatcgattccatccagaaggaccccagagaattcgggtggagagatcccgagctgccggaggtgatccagatgcttcagcatcaatttccaagcgtgcagtccaatgcggcagcatatcttcaacacctttgttttggcgacaacaaaatcaaagcagagatccggaggcaggggggaatccagctgctggtggatctgttggaccatcggatgacagaagtgcataggtctgcgtgcggcgcactcagaaaccttgtttatggaaaggccaacgacgataacaagattgctctgaagaactgcggaggcattcccgccctcgttagactgctccggaagactactgaccttgagatcagagagttagtaacaggggtcctatggaatctcagctcgtgtgacgccctaaagatgcccattatccaggacgctctagctgtcctaacaaacgccgtgattatccctcacagcggctgggaaaactcacccttgcaagatgatcggaaaatacaactgcactcatcccaggttctccggaacgctaccggatgcttgcgaaacgtgtcctctgccggagaggaggcccgcagaaggatgcgtgaatgcgatggcctaaccgatgccttactgtatgtcatacagagcgctctggggtcctccgagatcgacagtaaaactgttgagaactgtgtttgcatcctcaggaacctttcttaccggctggcagctgagaccagccaggggcagcacatgggcaccgatgaacttgatggcctgttgtgcggggaagccaatggcaaggatgcggaatccagcggttgctggggcaaaaaaaaaaaaaagaagaaatcacaagatcagtgggatggggtggggcccctgcccgattgcgccgagccccccaaaggcatccaaatgctctggcatccctcaattgtgaaaccctacctcactctgctcagtgagtgctccaatcctgatacgctggagggggcagccggagctctgcagaatctggccgctggttcgtggaagtggtctgtttatatccgcgcagctgtgagaaaagagaaggggctgccaatcttggttgagctcctgcgtatcgacaacgatcgcgtggtttgtgccgttgccaccgctctccgcaacatggccttggatgtacgcaacaaggaattgattggcaagtatgctatgcgcgacctggtgcaccgccttcctggcggcaacaactcaaacaacaccgcgtctaaggccatgtcggacgacactgtcaccgcggtctgttgcaccttacatgaggtgatcacaaagaatatggaaaatgctaaggctttgcgagacgctggagggatcgagaaacttgtgggtatatccaaatcaaaaggagacaaacatagcccgaaggttgtgaaggccgcctctcaggtcctgaactcaatgtggcaatatagggatctaaggtctctctataagaaagacgggtggtcgcagtaccacttcgttgcttcttcctcaaccattgagagagatcgtcagagaccctattcatcgtcacgtaccccctctatctctccagtacgagtatcacctaacaacagaagtgctagcgcacccgcctccccgcgagagatgatctcgttgaaagagcggaaaaccgactatgaatgcaccgggtccaacgccacatatcatggggcaaaaggagagcacacatcaagaaaggacgcaatgaccgctcagaacacaggcattagtacgctttatcgcaacagctatggtgcccccgccgaggacatcaaacataatcaggtgtccgcacagcctgtgccacaggagcccagccgaaaggattatgaaacataccaaccattccagaattccacaaggaattatgacgagtctttctttgaagaccaggtgcatcaccgtcctcccgcgagcgaatacaccatgcatctgggcctcaaatctactggcaactatgtggacttttactcagccgccagaccatattcagaactgaattacgagacttcccattatcccgcctcgccagattcatgggtctag

SEQ ID NO: 116921 - DNA, 3678 bp, Artificial Sequence
  derived and/or modified sequence
atgttcgcccgaaaacctccgggtgccgcacctcttggcgctatgcctgtgccagatcaaccatcctcagcttccgaaaagaccagtagcctgtcccctggactcaatacatcaaatggcgatgggtccgaaaccgagactaccagcgccatcctggccagtgtgaaggaacaagagctccagtttgaaaggttgactagggaactggaggccgaaaggcagatagtggcctcccagctcgaacgctgcaaactagggagcgagacaggctcaatgagtagcatgtctagcgcggaggagcaatttcagtggcagtctcaggacgggcagaaagacatagaggacgaattaaccactgggttggaactggtagacagctgcatacgctcgcttcaagaaagtgggatcctggacccgcaggattacagcacaggagagcgaccctcacttctgtcccagagcgcgttgcaactcaacagtaagcctgagggctcctttcagtatccagcaagctaccacagcaatcagaccctagctttaggggagactacacccagtcaactcccagcccgtggcacgcaggctcgggcaaccggacagtctttttcccaagggactacatcccgagcaggacatctcgccggacccgaacctgcccctccccctccaccaccccctagggagccctttgctccatcactaggcagcgcttttcatcttcctgatgcgccaccagccgctgcggctgcagccctatactactcttcatccaccttgcccgcacctccgagggggggaagccctctggccgctcctcagggtggatccccgacaaagctgcagcgaggcggttccgctccggagggtgctacctacgcagccccacgcggttcctctcctaagcagtccccaagcagactcgcaaaatcttactccacctctagtccaatcaatattgttgtgagcagtgcagggctgtcgccaattcgggtgacttcgcctccaaccgtgcagagtacaatttctagttctcccattcatcagctgagctcaacaattggcacctacgccaccctcagccccaccaaacgtctggttcacgcaagcgaacagtattcaaaacatagtcaagaattgtacgcaactgccacactgcagagacccggatccctagctgcaggaagcagagcctcttactcttcccagcacggacatttaggaccagagctaagagctcttcagtcccctgagcaccatatagacccaatctacgaagatagggtatatcaaaagccacccatgcgatctctgagccaaagccagggagaccccctgcccccagcgcacactggtacctacagaactagcaccgcgcctagctcacccggtgtggactcagtgcccttgcagcgaacgggcagtcagcacggaccacagaacgccgcagccgctaccttccaacgggcttcctacgccgctgggccagccagcaattatgccgatccttaccgacagcttcaatattgtcctagcgtggagagcccttattctaaaagcgggccagcgttaccaccagaggggactttggctcgcagcccttctatcgattctatccaaaaagatcccagagaatttggctggcgcgaccctgagctccccgaagttatccagatgctgcagcaccaattcccttccgtacagagtaatgctgcagcatatttgcagcacctctgtttcggtgataataagataaaggccgagattcggaggcagggcggaatccagctgttggtggatctgctggaccatcgcatgaccgaggtgcacaggagcgcatgcggagcgctgcggaatctggtctatgggaaggccaacgacgataataagatcgccctgaagaactgtggaggaattccggcattagtgcgtttgctgagaaagacaacggatctggagatccgcgaacttgtaacaggcgtactgtggaatctcagctcctgtgatgccctgaaaatgccaatcatccaggatgccctggcagtgttgaccaatgcagtgataatccctcactcagggtgggaaaactctcccttgcaagatgacaggaaaatccagctgcacagtagccaagtgctgcggaatgctaccgggtgcctgcggaacgtatcgtccgcgggtgaagaagccagacgaaggatgcgggagtgtgacggattgaccgacgctctcctatacgtgatccagtccgccctgggatctagtgaaatagactctaaaaccgtcgaaaattgcgtgtgcatactccgcaacctgagttaccgattagctgccgaaacgagtcagggacaacacatgggcaccgatgagctggatggcctgttatgtggagaggcaaatgggaaagacgccgaatcgagtggctgttgggggaagaaaaaaaaaaaaaaaaaaagtcaggaccagtgggacggcgttggcccactccccgattgtgccgaaccacctaagggcattcaaatgctgtggcacccttcaatcgttaagccatatctgactttgttaagcgagtgctctaatccagataccctggagggtgccgcaggcgcactacagaacctggccgctggtagttggaaatggtcagtctatatcagagctgcagtgcgtaaggaaaagggcctgccaatacttgttgagctacttcgcattgacaacgatcgggtagtatgtgcggttgcgacagccttaagaaacatggccttagatgtgaggaataaagagttaataggtaaatatgccatgagggatctggtccaccgcctgcccggaggaaacaacagtaacaatactgcctccaaagccatgagtgacgatacggttaccgctgtgtgttgtacattgcatgaggtgatcactaagaacatggaaaatgccaaggccctgagggatgccggtggcattgagaagctcgtgggaatcagcaagtctaagggagacaaacactcaccaaaagtagtgaaggccgcatctcaggtattgaacagtatgtggcagtatcgggacttacgctccctctacaagaaggacggctggtcgcagtatcactttgtggctagtagttctacaattgagagggatcgccagcggccttacagcagctctaggacaccctccatcagtcctgtccgtgtctcccccaataaccgaagtgccagcgcccctgcctccccacgagaaatgatttccctcaaagaaaggaagacagactacgagtgcacaggtagtaacgctacataccacggtgcaaaaggcgaacatacgagtcggaaagatgctatgaccgctcaaaacacaggcatctccacgctgtacagaaacagctacggtgcacccgctgaggatatcaagcataatcaggtcagcgctcagcctgttccccaggagccatctcggaaggactacgaaacctaccagccatttcaaaatagcacccggaactacgacgagtccttctttgaggaccaagtgcaccatcgacctcccgctagcgaatataccatgcacctgggccttaaatccactggcaattatgtagatttttatagcgccgcacgaccgtactctgaattgaactacgaaacgtcacattatcccgcatctcccgactcatgggtgtag

SEQ ID NO: 116922 - DNA, 3504 bp, Artificial Sequence
  derived and/or modified sequence
atgtttgctaggaagcctcccggagcggctcctctcggcgctatgcccgtgcctgaccagccatcaagtgcctctgagaagacatccagcttatcccctggattaaatacgtctaatggggacgggagcgagacagaaacaacctctgctatcctggcatccgtgaaggagcaggaactgcagtttgaaagattgacaagagagctggaggcagagagacagatcgttgccagccaattagagagatgtaagctgggtagcgagacgggatcaatgtccagcatgtcgtctgctgaagagcaatttcaatggcagtctcaggatggacagaaggatatcgaggacgagttgacaactggcttggagctcgtggattcctgcatacggagtctccaggaaagcggcatcttagacccccaagactatagtaccggggagaggccaagcctgctctcccagtccgccctgcaacttaatagtaaaccggagggttctttccaatacccggcatcctaccactctaaccagactctagctctcggcgagaccacccctagccaactgccagccagaggaacccaggcccgagctacaggccagtcttttagccagggtaccacttcccgcgcaggccatctagccggtcccgaacctgcccctccaccgccaccccctcccagggaaccctttgcgccatctctgggatccgcattccatctgccggatgctccaccggcagcagcagccgctgccctttactatagttcatccacactccccgctcccccacggggtggaagtcctcttgccgcaccacaaggcggatcacctacaaagctgcagagaggcggatctgcccctgagggcgcaacatacgccgctccgcgtgggagtagccccaagcagtccccgtctagactggctaaatcctattctactagttcccccatcaacatagtcgtgtcttcagccggactgagcccaatccgggtcacatccccaccgaccgtccagagcacaatctcctcctcacccattcaccagctgtcctctactattggaacttatgccactctctcaccgacaaagcggctcgtgcatgctagcgaacagtattcaaaacactcacaagagctgtacgctaccgcaacactgcagcgcccagggagtttagccgctggatccagggcttcgtattcctctcagcacggacacctgggacctgaacttagggcgctgcagagcccagagcaccatatcgaccctatttatgaagacagagtctatcaaaagccccctatgaggagtctaagtcagtcacaaggtgaccctcttcctcccgcacacaccggtacctacagaactagcacggccccttcctctcctggcgtcgattccgtccccttgcaaaggacaggcagccagcacggcccacagaacgccgcagctgccacctttcagcgcgcatcttacgctgcaggacccgcttctaactacgccgatccatacaggcagcttcagtattgcccttctgttgaaagtccatacagcaagagcgggccagcgctgcctcctgagggaaccttggcaagatcgcctagtatcgactccatccaaaaggatcctcgcgagtttggctggcgcgatcctgagcttccggaagtgatacagatgcttcagcaccaattcccatctgtgcagtctaatgcagcggcttatcttcagcatttgtgctttggtgacaataagataaaagcagaaatccgtcgccagggcggaattcagctgttggttgacttgctggaccatagaatgacagaagtccaccgatctgcctgcggtgccctaaggaatctggtgtatggtaaagcgaacgatgataacaagatagcattgaaaaactgcggcggtatcccagctctggtgcgcctgctacgcaaaaccaccgatctggagattcgtgagctggttaccggtgtcctgtggaatctgagcagctgtgacgcactgaagatgccaattatccaggatgccctcgcagttctgactaatgcggtaataattcctcactcaggctgggagaatagcccactgcaagatgatcgtaagattcagctgcattcatcacaggtcttgcgtaacgccactgggtgcctgagaaatgtgtcaagcgccggtgaggaggccaggcgtcgaatgcgcgagtgcgacgggttaacagacgccctgctttacgtgattcagagtgccctcggctcttccgagatcgatagcaaaacagttgagaattgcgtgtgtattctgagaaacttaagttatcgtctggcggctgagacgagccagggacaacatatgggtacagacgagctcgatggcctcctttgtggggaagccaacggaaaagatgcagagagtagcgggtgctgggggaagaaaaagaagaaaaagaagtcccaggaccaatggtccgtgtatatcagagcagccgtgcgcaaggagaagggcctgccgatcttggtggagctattacgcatcgacaacgacagagttgtctgtgccgtggccacagctttaaggaatatggcactggacgtccgcaataaagaacttattggaaagtacgcaatgcgggacttggtgcaccgactgccgggtggtaataatagcaacaacactgcttcgaaggcaatgagtgatgacaccgtgaccgctgtgtgttgcactctgcacgaggtgatcacaaaaaatatggaaaacgctaaagctctccgcgatgcagggggtatcgaaaaattagtcgggatttctaagtcaaaaggcgacaagcacagtcccaaagtagttaaggctgctagtcaggtgctgaactcaatgtggcagtatcgcgatctaaggtcactttataagaaagacggatggagtcagtatcattttgtggcctcatcgtctactatagaacgcgaccggcagcggccatattcaagcagccggaccccttctatatctcctgtgcgggttagtccgaacaaccgaagcgctagtgctcccgcatctcctcgggagatgatctccttgaaagagaggaagaccgattacgagtgcaccggttctaacgcaacctaccacggggctaaaggtgagcacacaagtcgcaaggacgcaatgacagcacagaataccggtattagtacactgtaccgcaacagctacggggctcccgcagaggacatcaaacacaatcaagtgtctgctcaaccggtgccccaggaaccatcacggaaggactacgagacgtatcagccctttcaaaatagcaccagaaactatgatgagtcttttttcgaggatcaggtgcaccaccggcctcccgcatctgagtataccatgcacttaggcctaaagtcaaccggtaattacgtggatttttatagcgcggcaaggccttattcagaattaaactacgaaacaagccactaccctgcgtctcccgactcttgggtgtag

SEQ ID NO: 116923 - DNA, 2379 bp, Artificial Sequence
  derived and/or modified sequence
atgcgttccctttcccagtctcagggcgatccccttccccctgctcatacagggacctacaggacctccaccgcacccagtagcccaggtgtagatagcgtgcccctccaaaggactggttctcagcacgggcctcagaacgccgctgcagctacttttcaaagggccagctatgcggctgggcctgcttcaaattatgccgacccatatcgacaattacagtactgcccttccgtggaaagcccttattctaagagtgggccagctctccccccagaaggtacactggccagatcccccagcatagattctatccagaaggaccctagggagttcggctggcgagatcctgagttgcctgaagtcatccaaatgcttcagcatcaattcccctccgttcagagcaacgcagccgcatatctccagcacctttgcttcggagacaacaaaatcaaagccgagatcagaaggcagggcggaatccaactcctggtagatttgttggatcacagaatgacggaggttcacagatcagcctgtggggctctacggaacctcgtgtacggcaaggcaaacgacgataacaaaatcgcgctgaagaattgtggcggaatcccagctctagtgcgactgctcaggaagacaactgatctagagatccgtgagctggtgaccggtgtcctgtggaatctgtcatcatgcgacgcactgaaaatgccaatcattcaagatgccctggccgtattgaccaatgccgttatcatcccacattccggctgggagaacagtcctctccaggatgatcggaagatccagcttcattcttcacaagtgctcaggaacgctactggctgcctccggaacgtaagctccgccggagaggaagcacgtcgcagaatgcgagagtgcgacggtctcaccgacgccctattatacgtcatacagtccgcactggggagcagcgagatcgattccaaaaccgtggaaaactgtgtttgcattctgaggaacctgagctaccgactggccgcagagacctcccaggggcagcatatggggacggacgaactagatgggctcttgtgtggggaggctaatgggaaagatgccgaatcaagcggatgttgggggaaaaaaaaaaaaaaaaagaaatcccaggaccagtgggatggggtaggccctctgcccgactgcgccgaacctccgaaagggatacaaatgttgtggcacccaagtattgtgaagccttacctgaccctgctgtccgagtgcagcaatccagatacactcgagggtgctgccggtgccctgcagaaccttgccgcaggtagctggaagtggtctgtctacatacgtgcagccgtacgcaaggagaagggactcccaattctcgtagagctactacgcatcgataacgaccgcgtcgtgtgcgcagttgccacagccctgcgaaatatggccctggatgtgcgcaataaggaactaattggtaagtatgccatgagggatctggtacaccgcctccctggcggaaataactctaataatactgccagcaaagccatgagcgatgacacagtgaccgcggtttgttgcactttgcatgaggtgattaccaaaaatatggaaaatgccaaggccctgagagacgctggaggcatagagaaacttgtggggatcagtaaaagcaagggagataaacacagtcccaaggtcgtaaaagccgcttcacaggtcttgaattcaatgtggcagtacagagatttgcggtctctatataagaaggatggttggtcccagtaccatttcgtagcctccagctcgaccattgagcgggataggcaaaggccctactccagcagccgaaccccttccatatctccagtgcgagtctcacctaataataggtccgcttccgctcccgcttcccctagggaaatgatctcactcaaagagcgtaaaactgactatgaatgtactgggtctaatgccacatatcatggggctaagggggagcatacatccaggaaagatgcgatgaccgctcaaaatacaggaatcagtactctctacagaaactcttacggtgcaccagccgaggacatcaaacacaatcaggtgtcagcacagcccgtacctcaggagccctcccgcaaagactatgaaacctatcagccatttcagaacagcacccggaactacgatgaaagcttcttcgaggatcaagtgcaccatcggccaccagcgtcagagtacacaatgcatcttgggctgaagtctacaggaaattacgtggatttctattctgcagccagaccttactccgagctgaactacgaaacctcccactaccccgcttcacctgattcatgggtgtag

SEQ ID NO: 116924 - DNA, 5481 bp, Artificial Sequence
  derived and/or modified sequence
gcgtcgggagccgcctctcgcccgcggcgctcgcccctgccgcccgccagcatcccttgtcccgcggccgcgctcagacaacaaaagcggaagatgctgcagttgggcaaggtcaggaccttgccctgaagccgggcggcgccgcgcacgcctcttcccggactgaggagctgtcgccggcggagggtgcatgtttgcgaggaagccgccgggcgccgcgcctttgggagctatgcctgttccagaccagccttcatcagcctcagagaagacgagttccctgagccccggcttaaacacctccaacggggatggctctgaaacagaaaccacctctgccatcctcgcctcagtcaaagaacaggaattacagtttgaaaggctgacccgagagctggaggctgaacggcagatcgtagccagccagctggagcgatgcaagctcggatccgagactggcagcatgagcagcatgagttcagcagaagagcagtttcagtggcagtcacaagatggtcaaaaagatatcgaagatgagcttacaacaggtctcgagctggtggactcctgtattaggtcactacaggaatcaggaatacttgacccacaggattattctacaggtgaaaggcccagcctgctctcccagagtgcacttcagctcaattccaaacctgaagggtctttccagtatccggccagctaccatagcaaccagaccctggccctgggggaaaccaccccttcacagctcccggcccgaggcacacaagcccgagctacgggccagagcttcagccagggcacgaccagccgcgccggccacctggcggggcccgagcccgcgccgccgccgccgccgccgccgcgggagccgttcgcgcccagcctgggcagcgccttccacctgcccgacgcgccgcccgccgccgccgccgccgcgctctactactccagctccacgctgcccgcgccgccgcgcgggggctccccgctggccgcgccccagggcggttcgcccaccaagctgcagcgcggcggctcggcccccgagggcgccacctacgccgcgccgcgcggctcctcgcccaagcagtcgcccagccgcctggccaagtcctacagcaccagctcgcccatcaacatcgtcgtgtcctcggccggcctgtccccgatccgcgtgacctcgccccccaccgtgcagtccaccatctcctcctcgcccatccaccagctgagctccaccatcggcacgtacgccaccctgtcgcccaccaagcgcctggtccacgcgtccgagcagtacagcaagcactcgcaggagctgtatgccacggccaccctccagaggccgggcagcctggcagctggttcccgagcctcatacagcagccagcatgggcacctgggcccagagttgcgggccctgcagtccccagaacaccacatagatcccatctatgaagaccgcgtctatcagaagccccctatgaggagtctcagccagagccagggggaccctctgccgccagcacacaccggcacctaccgcacgagcacagccccatcttcccctggtgtcgactccgtccccttgcagcgcacaggcagccagcacggcccacagaatgccgccgcggccaccttccagagggccagctatgccgccggcccagcctccaattacgcggacccctaccgacagctgcagtattgtccctctgttgagtctccatacagcaaatccggccctgctctcccgcctgaaggcaccttggccaggtccccgtccattgatagcattcagaaagatcccagagaatttggatggagagacccggaactgccggaagtgattcagatgttgcagcaccagtttccctcggtccagtctaacgcggcagcctacttgcaacacctctgttttggagacaacaaaattaaagccgagataaggagacaaggaggcatccagctcctggtggacctgttggatcatcggatgaccgaagtccaccgtagtgcctgtggagctctgagaaacctggtgtatgggaaggccaacgatgataacaaaattgccctgaaaaactgtggtggcatcccagcactggtgaggttactccgcaagacgactgacctggagatccgggagctggtcacaggagtcctttggaacctctcctcatgcgatgcactcaaaatgccaatcatccaggatgccctagcagtactgaccaacgcggtgattatcccccactcaggctgggaaaattcgcctcttcaggatgatcggaaaatacagctgcattcatcacaggtgctgcgtaacgccaccgggtgcctaaggaatgttagttcggccggagaggaggcccgcagaaggatgagagagtgtgatgggcttacggatgccttgctgtacgtgatccagtctgcgctggggagcagtgagatcgatagcaagaccgttgaaaactgtgtgtgcattttaaggaacctctcgtaccggctggcggcagaaacgtctcagggacagcacatgggcacggacgagctggacgggctactctgtggcgaggccaatggcaaggatgctgagagctctgggtgctggggcaagaagaagaagaaaaagaaatcccaagatcagtgggatggagtaggacctcttccagactgtgctgaaccaccaaaagggatccagatgctgtggcacccatcaatagtcaaaccctacctcacactgctctctgagtgctcaaatccagacacgctggaaggggcggcaggcgccctgcagaacttggctgcagggagctggaagtggtcagtatatatccgagccgctgtccgaaaagagaaaggcctgcccatcctcgtggagctgctccgaatagacaatgaccgtgtggtgtgcgcggtggccactgcgctgcggaacatggccttggacgtcagaaataaggagctcatcggcaaatacgccatgcgagacctagtccacaggcttccaggagggaacaacagcaacaacactgcaagcaaggccatgtcggatgacacagtgacagctgtctgctgcacactgcacgaagtgattaccaagaacatggagaacgccaaggccttacgggatgccggtggcatcgagaagttggtcggcatctccaaaagcaaaggagataaacactctccaaaagtggtcaaggctgcatctcaggtcctcaacagcatgtggcagtaccgagatctgaggagtctctacaaaaaggatggatggtcacaataccactttgtagcctcgtcttcaaccatcgagagggaccggcaaaggccctactcctcctcccgcacgccctccatctcccctgtgcgcgtgtctcccaacaaccgctcagcaagtgccccagcttcacctcgggaaatgatcagcctcaaagaaaggaaaacagactacgagtgcaccggcagcaacgccacctaccacggagctaaaggcgaacacacttccaggaaagatgccatgacagctcaaaacactggaatttcaactttgtataggaattcttatggtgcgcccgctgaagacatcaaacacaaccaggtttcagcacagccagtcccacaggagcccagcagaaaagattacgagacctaccagccatttcagaattccacaagaaattacgatgagtccttcttcgaggaccaggtccaccatcgccctcccgccagcgagtacaccatgcacctgggtctcaagtccaccggcaactacgttgacttctactcagctgcccgtccctacagtgaactgaactatgaaacgagccactacccggcctcccccgactcctgggtgtgaggagcagggcacaggcgctccgggaacagtgcatgtgcatgcataccacaagacatttctttctgttttgtttttttctcctgcaaatttagtttgttaaagcctgttccataggaaggctgtgataaccagtaaggaaatattaagagctattttagaaagctaaatgaatcgcaagttaacttggaaatcagtagaaagctaaagtgatcctaaatatgacagtgggcagcacctttctagcgtgagctgtagagtaacgagaagtgctttatactgaacgtggttgatgggaggagagacgaggcattcgggccggtggggcgtaagggttatcgttaagcacaagacacagaatagtttacacactgtgtgggggacggcttctcacgctttgtttactctcttcatccgttgtgactctaggcttcaggttgcattggggttcctctgtacagcaagatgtttcttgccttttgttaatgcattgttgtaaagtatttgatgtacattacagattaaagaagaaaagcgcgttgtgtatattacaccaatgccgccgtgtttcctcatctatggttctaaatattgcttcaatttcaaacttttgaaagatgtatggatttccagtttttctttactttctcccagtatgttttaacaaaaaaaaaaaaaagcaggaaaaaaggaatatttagcagtattgttcgttctgatatgtgaatttgtttgtgacaactaaacaaggcattcagcagtttctgacaattaacatacatcattccacactccttgtcaacaaagtgctttttcactgcctaaaattttagatgtagatatttgaaatagattttttcatttataccagttttctttatgatgatacagtgttaaaagaaaataaattacaattgatctgtcatccatatttgctaagaatgtctatttccaagaacctatatcttacaaaatacacattcttgcttgtgtgtctgtgtgtgtgggtgtatgtatgtccacgtactagaaaaattacctgtgtgagattttattttgacagaagctatttcatttgctgttcatcttgtacaaactttgtttttggttttttagtataaatgtacatcagtttgttccttttgtactgtatctattcttctgaccatctagtgactcaggatattaggccagttgaagtggagttataggattttcacacattcacgcatacttggatatcaaccctctctacaggtccgtttccttacacattttatcccctcagaacacgataaaccatggccaattcagtttcactttggggccaattacttgaagtatccacagaaaatgtaaactgctcgccttattcccccaaactttttgttcatgtggcagggagcagtacacaactatggaatagattattaaaactgaacttgaagctaacgttagaatagtggttaacagagctaagaaataaggctaaccatcgaaaagaacatgggccgcgggtaaactagctttgctctttagatgcaagtggctgaggccaataggtgcctagtaaatgttaactgttcttggaaaaaataaaaacatcagtaacaaaa

SEQ ID NO: 116925 - DNA, 5236 bp, Artificial Sequence
  derived and/or modified sequence
gccagcatcccttgtcccgcggccgcgctcagacaacaaaagcggaagatgctgcagttgggcaaggtcaggaccttgccctgaagccgggcggcgccgcgcacgcctcttcccggactgaggagctgtcgccggcggagggtgcatgtttgcgaggaagccgccgggcgccgcgcctttgggagctatgcctgttccagaccagccttcatcagcctcagagaagacgagttccctgagccccggcttaaacacctccaacggggatggctctgaaacagaaaccacctctgccatcctcgcctcagtcaaagaacaggaattacagtttgaaaggctgacccgagagctggaggctgaacggcagatcgtagccagccagctggagcgatgcaagctcggatccgagactggcagcatgagcagcatgagttcagcagaagagcagtttcagtggcagtcacaagatggtcaaaaagatatcgaagatgagcttacaacaggtctcgagctggtggactcctgtattaggtcactacaggaatcaggaatacttgacccacaggattattctacaggtgaaaggcccagcctgctctcccagagtgcacttcagctcaattccaaacctgaagggtctttccagtatccggccagctaccatagcaaccagaccctggccctgggggaaaccaccccttcacagctcccggcccgaggcacacaagcccgagctacgggccagagcttcagccagggcacgaccagccgcgccggccacctggcggggcccgagcccgcgccgccgccgccgccgccgccgcgggagccgttcgcgcccagcctgggcagcgccttccacctgcccgacgcgccgcccgccgccgccgccgccgcgctctactactccagctccacgctgcccgcgccgccgcgcgggggctccccgctggccgcgccccagggcggttcgcccaccaagctgcagcgcggcggctcggcccccgagggcgccacctacgccgcgccgcgcggctcctcgcccaagcagtcgcccagccgcctggccaagtcctacagcaccagctcgcccatcaacatcgtcgtgtcctcggccggcctgtccccgatccgcgtgacctcgccccccaccgtgcagtccaccatctcctcctcgcccatccaccagctgagctccaccatcggcacgtacgccaccctgtcgcccaccaagcgcctggtccacgcgtccgagcagtacagcaagcactcgcaggagctgtatgccacggccaccctccagaggccgggcagcctggcagctggttcccgagcctcatacagcagccagcatgggcacctgggcccagagttgcgggccctgcagtccccagaacaccacatagatcccatctatgaagaccgcgtctatcagaagccccctatgaggagtctcagccagagccagggggaccctctgccgccagcacacaccggcacctaccgcacgagcacagccccatcttcccctggtgtcgactccgtccccttgcagcgcacaggcagccagcacggcccacagaatgccgccgcggccaccttccagagggccagctatgccgccggcccagcctccaattacgcggacccctaccgacagctgcagtattgtccctctgttgagtctccatacagcaaatccggccctgctctcccgcctgaaggcaccttggccaggtccccgtccattgatagcattcagaaagatcccagagaatttggatggagagacccggaactgccggaagtgattcagatgttgcagcaccagtttccctcggtccagtctaacgcggcagcctacttgcaacacctctgttttggagacaacaaaattaaagccgagataaggagacaaggaggcatccagctcctggtggacctgttggatcatcggatgaccgaagtccaccgtagtgcctgtggagctctgagaaacctggtgtatgggaaggccaacgatgataacaaaattgccctgaaaaactgtggtggcatcccagcactggtgaggttactccgcaagacgactgacctggagatccgggagctggtcacaggagtcctttggaacctctcctcatgcgatgcactcaaaatgccaatcatccaggatgccctagcagtactgaccaacgcggtgattatcccccactcaggctgggaaaattcgcctcttcaggatgatcggaaaatacagctgcattcatcacaggtgctgcgtaacgccaccgggtgcctaaggaatgttagttcggccggagaggaggcccgcagaaggatgagagagtgtgatgggcttacggatgccttgctgtacgtgatccagtctgcgctggggagcagtgagatcgatagcaagaccgttgaaaactgtgtgtgcattttaaggaacctctcgtaccggctggcggcagaaacgtctcagggacagcacatgggcacggacgagctggacgggctactctgtggcgaggccaatggcaaggatgctgagagctctgggtgctggggcaagaagaagaagaaaaagaaatcccaagatcagtggtcagtatatatccgagccgctgtccgaaaagagaaaggcctgcccatcctcgtggagctgctccgaatagacaatgaccgtgtggtgtgcgcggtggccactgcgctgcggaacatggccttggacgtcagaaataaggagctcatcggcaaatacgccatgcgagacctagtccacaggcttccaggagggaacaacagcaacaacactgcaagcaaggccatgtcggatgacacagtgacagctgtctgctgcacactgcacgaagtgattaccaagaacatggagaacgccaaggccttacgggatgccggtggcatcgagaagttggtcggcatctccaaaagcaaaggagataaacactctccaaaagtggtcaaggctgcatctcaggtcctcaacagcatgtggcagtaccgagatctgaggagtctctacaaaaaggatggatggtcacaataccactttgtagcctcgtcttcaaccatcgagagggaccggcaaaggccctactcctcctcccgcacgccctccatctcccctgtgcgcgtgtctcccaacaaccgctcagcaagtgccccagcttcacctcgggaaatgatcagcctcaaagaaaggaaaacagactacgagtgcaccggcagcaacgccacctaccacggagctaaaggcgaacacacttccaggaaagatgccatgacagctcaaaacactggaatttcaactttgtataggaattcttatggtgcgcccgctgaagacatcaaacacaaccaggtttcagcacagccagtcccacaggagcccagcagaaaagattacgagacctaccagccatttcagaattccacaagaaattacgatgagtccttcttcgaggaccaggtccaccatcgccctcccgccagcgagtacaccatgcacctgggtctcaagtccaccggcaactacgttgacttctactcagctgcccgtccctacagtgaactgaactatgaaacgagccactacccggcctcccccgactcctgggtgtgaggagcagggcacaggcgctccgggaacagtgcatgtgcatgcataccacaagacatttctttctgttttgtttttttctcctgcaaatttagtttgttaaagcctgttccataggaaggctgtgataaccagtaaggaaatattaagagctattttagaaagctaaatgaatcgcaagttaacttggaaatcagtagaaagctaaagtgatcctaaatatgacagtgggcagcacctttctagcgtgagctgtagagtaacgagaagtgctttatactgaacgtggttgatgggaggagagacgaggcattcgggccggtggggcgtaagggttatcgttaagcacaagacacagaatagtttacacactgtgtgggggacggcttctcacgctttgtttactctcttcatccgttgtgactctaggcttcaggttgcattggggttcctctgtacagcaagatgtttcttgccttttgttaatgcattgttgtaaagtatttgatgtacattacagattaaagaagaaaagcgcgttgtgtatattacaccaatgccgccgtgtttcctcatctatggttctaaatattgcttcaatttcaaacttttgaaagatgtatggatttccagtttttctttactttctcccagtatgttttaacaaaaaaaaaaaaaagcaggaaaaaaggaatatttagcagtattgttcgttctgatatgtgaatttgtttgtgacaactaaacaaggcattcagcagtttctgacaattaacatacatcattccacactccttgtcaacaaagtgctttttcactgcctaaaattttagatgtagatatttgaaatagattttttcatttataccagttttctttatgatgatacagtgttaaaagaaaataaattacaattgatctgtcatccatatttgctaagaatgtctatttccaagaacctatatcttacaaaatacacattcttgcttgtgtgtctgtgtgtgtgggtgtatgtatgtccacgtactagaaaaattacctgtgtgagattttattttgacagaagctatttcatttgctgttcatcttgtacaaactttgtttttggttttttagtataaatgtacatcagtttgttccttttgtactgtatctattcttctgaccatctagtgactcaggatattaggccagttgaagtggagttataggattttcacacattcacgcatacttggatatcaaccctctctacaggtccgtttccttacacattttatcccctcagaacacgataaaccatggccaattcagtttcactttggggccaattacttgaagtatccacagaaaatgtaaactgctcgccttattcccccaaactttttgttcatgtggcagggagcagtacacaactatggaatagattattaaaactgaacttgaagctaacgttagaatagtggttaacagagctaagaaataaggctaaccatcgaaaagaacatgggccgcgggtaaactagctttgctctttagatgcaagtggctgaggccaataggtgcctagtaaatgttaactgttcttgg

SEQ ID NO: 116926 - DNA, 3567 bp, Artificial Sequence
  derived and/or modified sequence
gcgtcgggagccgcctctcgcccgcggcgctcgcccctgccgcccgccagcatcccttgtcccgcggccgcgctcagacaacaaaagcggaagatgctgcagttgggcaaggtcaggaccttgccctgaagccgggcggcgccgcgcacgcctcttcccggactgaggagctgtcgccggcggagggtgcatgtttgcgaggaagccgccgggcgccgcgcctttgggagctatgcctgttccagaccagccttcatcagcctcagagaagacgagttccctgagccccggcttaaacacctccaacggggatggctctgaaacagaaaccacctctgccatcctcgcctcagtcaaagaacaggaattacagtttgaaaggctgacccgagagctggaggctgaacggcagatcgtagccagccagctggagcgatgcaagctcggatccgagactggcagcatgagcagcatgagttcagcagaagagcagtttcagtggcagtcacaagatggtcaaaaagatatcgaagatgagcttacaacaggtctcgagctggtggactcctgtattaggtcactacaggaatcaggaatacttgacccacaggattattctacaggtgaaaggcccagcctgctctcccagagtgcacttcagctcaattccaaacctgaagggtctttccagtatccggccagctaccatagcaaccagaccctggccctgggggaaaccaccccttcacagctcccggcccgaggcacacaagcccgagctacgggccagagcttcagccagctggttcccgagcctcatacagcagccagcatgggcacctgggcccagagttgcgggccctgcagtccccagaacaccacatagatcccatctatgaagaccgcgtctatcagaagccccctatgaggagtctcagccagagccagggggaccctctgccgccagcacacaccggcacctaccgcacgagcacagccccatcttcccctggtgtcgactccgtccccttgcagcgcacaggcagccagcacggcccacagaatgccgccgcggccaccttccagagggccagctatgccgccggcccagcctccaattacgcggacccctaccgacagctgcagtattgtccctctgttgagtctccatacagcaaatccggccctgctctcccgcctgaaggcaccttggccaggtccccgtccattgatagcattcagaaagatcccagagaatttggatggagagacccggaactgccggaagtgattcagatgttgcagcaccagtttccctcggtccagtctaacgcggcagcctacttgcaacacctctgttttggagacaacaaaattaaagccgagataaggagacaaggaggcatccagctcctggtggacctgttggatcatcggatgaccgaagtccaccgtagtgcctgtggagctctgagaaacctggtgtatgggaaggccaacgatgataacaaaattgccctgaaaaactgtggtggcatcccagcactggtgaggttactccgcaagacgactgacctggagatccgggagctggtcacaggagtcctttggaacctctcctcatgcgatgcactcaaaatgccaatcatccaggatgccctagcagtactgaccaacgcggtgattatcccccactcaggctgggaaaattcgcctcttcaggatgatcggaaaatacagctgcattcatcacaggtgctgcgtaacgccaccgggtgcctaaggaatgttagttcggccggagaggaggcccgcagaaggatgagagagtgtgatgggcttacggatgccttgctgtacgtgatccagtctgcgctggggagcagtgagatcgatagcaagaccgttgaaaactgtgtgtgcattttaaggaacctctcgtaccggctggcggcagaaacgtctcagggacagcacatgggcacggacgagctggacgggctactctgtggcgaggccaatggcaaggatgctgagagctctgggtgctggggcaagaagaagaagaaaaagaaatcccaagatcagtgggatggagtaggacctcttccagactgtgctgaaccaccaaaagggatccagatgctgtggcacccatcaatagtcaaaccctacctcacactgctctctgagtgctcaaatccagacacgctggaaggggcggcaggcgccctgcagaacttggctgcagggagctggaagtggtcagtatatatccgagccgctgtccgaaaagagaaaggcctgcccatcctcgtggagctgctccgaatagacaatgaccgtgtggtgtgcgcggtggccactgcgctgcggaacatggccttggacgtcagaaataaggagctcatcggcaaatacgccatgcgagacctagtccacaggcttccaggagggaacaacagcaacaacactgcaagcaaggccatgtcggatgacacagtgacagctgtctgctgcacactgcacgaagtgattaccaagaacatggagaacgccaaggccttacgggatgccggtggcatcgagaagttggtcggcatctccaaaagcaaaggagataaacactctccaaaagtggtcaaggctgcatctcaggtcctcaacagcatgtggcagtaccgagatctgaggagtctctacaaaaaggatggatggtcacaataccactttgtagcctcgtcttcaaccatcgagagggaccggcaaaggccctactcctcctcccgcacgccctccatctcccctgtgcgcgtgtctcccaacaaccgctcagcaagtgccccagcttcacctcgggaaatgatcagcctcaaagaaaggaaaacagactacgagtgcaccggcagcaacgccacctaccacggagctaaaggcgaacacacttccaggaaagatgccatgacagctcaaaacactggaatttcaactttgtataggaattcttatggtgcgcccgctgaagacatcaaacacaaccaggtttcagcacagccagtcccacaggagcccagcagaaaagattacgagacctaccagccatttcagaattccacaagaaattacgatgagtccttcttcgaggaccaggtccaccatcgccctcccgccagcgagtacaccatgcacctgggtctcaagtccaccggcaactacgttgacttctactcagctgcccgtccctacagtgaactgaactatgaaacgagccactacccggcctcccccgactcctgggtgtgaggagcagggcacaggcgctccgggaacagtgcatgtgcatgcataccacaagacatttctttctgttttgtttttttctcctgcaaatttagtttgttaaagcctgttccataggaaggctgtgataaccagtaaggaaatattaagagctattttagaaagctaaatgaatcgcaagttaacttggaaatcagtagaaagctaaagtgatcctaaatatgacagtgggcagcacctttctagcgtgagctgtagagtaacgag

SEQ ID NO: 116927 - DNA, 720 bp, Artificial Sequence
  derived and/or modified sequence
gggactagtcgtcttgtttgcctagactacagttttcaagtatttaaggaccatttatttcaaaaggtacagtaaaggaattacagtttgaaaggctgacccgagagctggaggctgaacggcagatcgtagccagccagctggagcgatgcaagctcggatccgagactggcagcatgagcagcatgagttcagcagaagagcagtttcagtggcagtcacaagatggtcaaaaagatatcgaagatgagcttacaacaggtctcgagctggtggactcctgtattaggtcactacaggaatcaggaatacttgacccacaggattattctacaggtgaaaggcccagcctgctctcccagagtgcacttcagctcaattccaaacctgaagggtctttccagtatccggccagctaccatagcaaccagaccctggccctgggggaaaccaccccttcacagctcccggcccgaggcacacaagcccgagctacgggccagagcttcagccagggcacgaccagccgcgccggccacctggcggggcccgagcccgcgccgccgccgccgccgccgccgcgggagccgttcgcgcccagcctgggcagcgccttccacctgcccgacgcgccgcccgccgccgccgccgccgcgctctactactccagctccacgctgcccgcgccgccgcgcgggggctccccgctggccgcgcccc

SEQ ID NO: 116928 - DNA, 1962 bp, Artificial Sequence
  derived and/or modified sequence
cgtgatccagtctgcgctggggagcagtgagatcgatagcaagaccgttgaaaactgtgtgtgcattttaaggaacctctcgtaccggctggcggcagaaacgtctcagggacagcacatgggcacggacgagctggacgggctactctgtggcgaggccaatggcaaggatgctgagagctctgggtgctggggcaagaagaagaagaaaaagaaatcccaagatcagtgggatggagtaggacctcttccagactgtgctgaaccaccaaaagggatccagatgctgtggcacccatcaatagtcaaaccctacctcacactgctctctgagtgctcaaatccagacacgctggaaggggcggcaggcgccctgcagaacttggctgcagggagctggaagtggtcagtatatatccgagccgctgtccgaaaagagaaaggcctgcccatcctcgtggagctgctccgaatagacaatgaccgtgtggtgtgcggtggccactgcgctgcggaacatggccttggacgtcagaaataaggagctcatcggcaaatacgccatgcgagacctagtccacaggcttccaggagggaacaacagcaacaacactgcaagcaaggccatgtcggatgacacagtgacagctgtctgctgcacactgcacgaagtgattaccaagaacatggagaacgccaaggccttacgggatgccggtggcatcgagaagttggtcggcatctccaaaagcaaaggagataaacactctccaaaagtggtcaaggctgcatctcaggtcctcaacagcatgtggcagtaccgagatctgaggagtctctacaaaaaggatggatggtcacaataccactttgtagcctcgtcttcaaccatcgagagggaccggcaaaggccctactcctcctcccgcacgccctccatctcccctgtgcgcgtgtctcccaacaaccgctcagcaagtgccccagcttcacctcgggaaatgatcagcctcaaagaaaggaaaacagactacgagtgcaccggcagcaacgccacctaccacggagctaaaggcgaacacacttccaggaaagatgccatgacagctcaaaacactggaatttcaactttgtataggaattcttatggtgcgcccgctgaagacatcaaacacaaccaggtttcagcacagccagtcccacaggagcccagcagaaaagattacgagacctaccagccatttcagaattccacaagaaattacgatgagtccttcttcgaggaccaggtccaccatcgccctcccgccagcgagtacaccatgcacctgggtctcaagtccaccggcaactacgttgacttctactcagctgcccgtccctacagtgaactgaactatgaaacgagccactacccggcctcccccgactcctgggtgtgaggagcagggcacaggcgctccgggaacagtgcatgtgcatgcataccacaagacatttctttctgttttgtttttttctcctgcaaatttagtttgttaaagcctgttccataggaaggctgtgataaccagtaaggaaatattaagagctattttagaaagctaaatgaatcgcaagttaacttggaaatcagtagaaagctaaagtgatcctaaatatgacagtgggcagcacctttctagcgtgagctgtagagtaacgagaagtgctttatactgaacgtggttgatgggaggagagacgaggcattcgggccggtggggcgtaagggttatcgttaagcacaagacacagaatagtttacacactgtgtgggggacggcttctcacgctttgtttactctcttcatccgttgtgactctaggcttcaggttgcattggggttcctctgtacagcaagatgtttcttgccttttgttaatgcattgttgtaaagtatttgatgtacattacagatt

SEQ ID NO: 116929 - DNA, 3678 bp, Artificial Sequence
  derived and/or modified sequence
atgttcgccagaaagccccccggcgccgcccccctgggcgccatgcccgtgcccgaccagcccagcagcgccagcgagaagaccagcagcctgagccccggcctgaacaccagcaacggcgacggcagcgagaccgagaccaccagcgccatcctggccagcgtgaaggagcaggagctgcagttcgagagactgaccagagagctggaggccgagagacagatcgtggccagccagctggagagatgcaagctgggcagcgagaccggcagcatgagcagcatgagcagcgccgaggagcagttccagtggcagagccaggacggccagaaggacatcgaggacgagctgaccaccggcctggagctggtggacagctgcatcagaagcctgcaggagagcggcatcctggacccccaggactacagcaccggcgagagacccagcctgctgagccagagcgccctgcagctgaacagcaagcccgagggcagcttccagtaccccgccagctaccacagcaaccagaccctggccctgggcgagaccacccccagccagctgcccgccagaggcacccaggccagagccaccggccagagcttcagccagggcaccaccagcagagccggccacctggccggccccgagcccgcccccccccccccccccccccccagagagcccttcgcccccagcctgggcagcgccttccacctgcccgacgccccccccgccgccgccgccgccgccctgtactacagcagcagcaccctgcccgccccccccagaggcggcagccccctggccgccccccagggcggcagccccaccaagctgcagagaggcggcagcgcccccgagggcgccacctacgccgcccccagaggcagcagccccaagcagagccccagcagactggccaagagctacagcaccagcagccccatcaacatcgtggtgagcagcgccggcctgagccccatcagagtgaccagcccccccaccgtgcagagcaccatcagcagcagccccatccaccagctgagcagcaccatcggcacctacgccaccctgagccccaccaagagactggtgcacgccagcgagcagtacagcaagcacagccaggagctgtacgccaccgccaccctgcagagacccggcagcctggccgccggcagcagagccagctacagcagccagcacggccacctgggccccgagctgagagccctgcagagccccgagcaccacatcgaccccatctacgaggacagagtgtaccagaagccccccatgagaagcctgagccagagccagggcgaccccctgccccccgcccacaccggcacctacagaaccagcaccgcccccagcagccccggcgtggacagcgtgcccctgcagagaaccggcagccagcacggcccccagaacgccgccgccgccaccttccagagagccagctacgccgccggccccgccagcaactacgccgacccctacagacagctgcagtactgccccagcgtggagagcccctacagcaagagcggccccgccctgccccccgagggcaccctggccagaagccccagcatcgacagcatccagaaggaccccagagagttcggctggagagaccccgagctgcccgaggtgatccagatgctgcagcaccagttccccagcgtgcagagcaacgccgccgcctacctgcagcacctgtgcttcggcgacaacaagatcaaggccgagatcagaagacagggcggcatccagctgctggtggacctgctggaccacagaatgaccgaggtgcacagaagcgcctgcggcgccctgagaaacctggtgtacggcaaggccaacgacgacaacaagatcgccctgaagaactgcggcggcatccccgccctggtgagactgctgagaaagaccaccgacctggagatcagagagctggtgaccggcgtgctgtggaacctgagcagctgcgacgccctgaagatgcccatcatccaggacgccctggccgtgctgaccaacgccgtgatcatcccccacagcggctgggagaacagccccctgcaggacgacagaaagatccagctgcacagcagccaggtgctgagaaacgccaccggctgcctgagaaacgtgagcagcgccggcgaggaggccagaagaagaatgagagagtgcgacggcctgaccgacgccctgctgtacgtgatccagagcgccctgggcagcagcgagatcgacagcaagaccgtggagaactgcgtgtgcatcctgagaaacctgagctacagactggccgccgagaccagccagggccagcacatgggcaccgacgagctggacggcctgctgtgcggcgaggccaacggcaaggacgccgagagcagcggctgctggggcaagaagaagaagaagaagaagagccaggaccagtgggacggcgtgggccccctgcccgactgcgccgagccccccaagggcatccagatgctgtggcaccccagcatcgtgaagccctacctgaccctgctgagcgagtgcagcaaccccgacaccctggagggcgccgccggcgccctgcagaacctggccgccggcagctggaagtggagcgtgtacatcagagccgccgtgagaaaggagaagggcctgcccatcctggtggagctgctgagaatcgacaacgacagagtggtgtgcgccgtggccaccgccctgagaaacatggccctggacgtgagaaacaaggagctgatcggcaagtacgccatgagagacctggtgcacagactgcccggcggcaacaacagcaacaacaccgccagcaaggccatgagcgacgacaccgtgaccgccgtgtgctgcaccctgcacgaggtgatcaccaagaacatggagaacgccaaggccctgagagacgccggcggcatcgagaagctggtgggcatcagcaagagcaagggcgacaagcacagccccaaggtggtgaaggccgccagccaggtgctgaacagcatgtggcagtacagagacctgagaagcctgtacaagaaggacggctggagccagtaccacttcgtggccagcagcagcaccatcgagagagacagacagagaccctacagcagcagcagaacccccagcatcagccccgtgagagtgagccccaacaacagaagcgccagcgcccccgccagccccagagagatgatcagcctgaaggagagaaagaccgactacgagtgcaccggcagcaacgccacctaccacggcgccaagggcgagcacaccagcagaaaggacgccatgaccgcccagaacaccggcatcagcaccctgtacagaaacagctacggcgcccccgccgaggacatcaagcacaaccaggtgagcgcccagcccgtgccccaggagcccagcagaaaggactacgagacctaccagcccttccagaacagcaccagaaactacgacgagagcttcttcgaggaccaggtgcaccacagaccccccgccagcgagtacaccatgcacctgggcctgaagagcaccggcaactacgtggacttctacagcgccgccagaccctacagcgagctgaactacgagaccagccactaccccgccagccccgacagctgggtgtag

SEQ ID NO: 116930 - DNA, 3504 bp, Artificial Sequence
  derived and/or modified sequence
atgttcgccagaaagccccccggcgccgcccccctgggcgccatgcccgtgcccgaccagcccagcagcgccagcgagaagaccagcagcctgagccccggcctgaacaccagcaacggcgacggcagcgagaccgagaccaccagcgccatcctggccagcgtgaaggagcaggagctgcagttcgagagactgaccagagagctggaggccgagagacagatcgtggccagccagctggagagatgcaagctgggcagcgagaccggcagcatgagcagcatgagcagcgccgaggagcagttccagtggcagagccaggacggccagaaggacatcgaggacgagctgaccaccggcctggagctggtggacagctgcatcagaagcctgcaggagagcggcatcctggacccccaggactacagcaccggcgagagacccagcctgctgagccagagcgccctgcagctgaacagcaagcccgagggcagcttccagtaccccgccagctaccacagcaaccagaccctggccctgggcgagaccacccccagccagctgcccgccagaggcacccaggccagagccaccggccagagcttcagccagggcaccaccagcagagccggccacctggccggccccgagcccgcccccccccccccccccccccccagagagcccttcgcccccagcctgggcagcgccttccacctgcccgacgccccccccgccgccgccgccgccgccctgtactacagcagcagcaccctgcccgccccccccagaggcggcagccccctggccgccccccagggcggcagccccaccaagctgcagagaggcggcagcgcccccgagggcgccacctacgccgcccccagaggcagcagccccaagcagagccccagcagactggccaagagctacagcaccagcagccccatcaacatcgtggtgagcagcgccggcctgagccccatcagagtgaccagcccccccaccgtgcagagcaccatcagcagcagccccatccaccagctgagcagcaccatcggcacctacgccaccctgagccccaccaagagactggtgcacgccagcgagcagtacagcaagcacagccaggagctgtacgccaccgccaccctgcagagacccggcagcctggccgccggcagcagagccagctacagcagccagcacggccacctgggccccgagctgagagccctgcagagccccgagcaccacatcgaccccatctacgaggacagagtgtaccagaagccccccatgagaagcctgagccagagccagggcgaccccctgccccccgcccacaccggcacctacagaaccagcaccgcccccagcagccccggcgtggacagcgtgcccctgcagagaaccggcagccagcacggcccccagaacgccgccgccgccaccttccagagagccagctacgccgccggccccgccagcaactacgccgacccctacagacagctgcagtactgccccagcgtggagagcccctacagcaagagcggccccgccctgccccccgagggcaccctggccagaagccccagcatcgacagcatccagaaggaccccagagagttcggctggagagaccccgagctgcccgaggtgatccagatgctgcagcaccagttccccagcgtgcagagcaacgccgccgcctacctgcagcacctgtgcttcggcgacaacaagatcaaggccgagatcagaagacagggcggcatccagctgctggtggacctgctggaccacagaatgaccgaggtgcacagaagcgcctgcggcgccctgagaaacctggtgtacggcaaggccaacgacgacaacaagatcgccctgaagaactgcggcggcatccccgccctggtgagactgctgagaaagaccaccgacctggagatcagagagctggtgaccggcgtgctgtggaacctgagcagctgcgacgccctgaagatgcccatcatccaggacgccctggccgtgctgaccaacgccgtgatcatcccccacagcggctgggagaacagccccctgcaggacgacagaaagatccagctgcacagcagccaggtgctgagaaacgccaccggctgcctgagaaacgtgagcagcgccggcgaggaggccagaagaagaatgagagagtgcgacggcctgaccgacgccctgctgtacgtgatccagagcgccctgggcagcagcgagatcgacagcaagaccgtggagaactgcgtgtgcatcctgagaaacctgagctacagactggccgccgagaccagccagggccagcacatgggcaccgacgagctggacggcctgctgtgcggcgaggccaacggcaaggacgccgagagcagcggctgctggggcaagaagaagaagaagaagaagagccaggaccagtggagcgtgtacatcagagccgccgtgagaaaggagaagggcctgcccatcctggtggagctgctgagaatcgacaacgacagagtggtgtgcgccgtggccaccgccctgagaaacatggccctggacgtgagaaacaaggagctgatcggcaagtacgccatgagagacctggtgcacagactgcccggcggcaacaacagcaacaacaccgccagcaaggccatgagcgacgacaccgtgaccgccgtgtgctgcaccctgcacgaggtgatcaccaagaacatggagaacgccaaggccctgagagacgccggcggcatcgagaagctggtgggcatcagcaagagcaagggcgacaagcacagccccaaggtggtgaaggccgccagccaggtgctgaacagcatgtggcagtacagagacctgagaagcctgtacaagaaggacggctggagccagtaccacttcgtggccagcagcagcaccatcgagagagacagacagagaccctacagcagcagcagaacccccagcatcagccccgtgagagtgagccccaacaacagaagcgccagcgcccccgccagccccagagagatgatcagcctgaaggagagaaagaccgactacgagtgcaccggcagcaacgccacctaccacggcgccaagggcgagcacaccagcagaaaggacgccatgaccgcccagaacaccggcatcagcaccctgtacagaaacagctacggcgcccccgccgaggacatcaagcacaaccaggtgagcgcccagcccgtgccccaggagcccagcagaaaggactacgagacctaccagcccttccagaacagcaccagaaactacgacgagagcttcttcgaggaccaggtgcaccacagaccccccgccagcgagtacaccatgcacctgggcctgaagagcaccggcaactacgtggacttctacagcgccgccagaccctacagcgagctgaactacgagaccagccactaccccgccagccccgacagctgggtgtag

SEQ ID NO: 116931 - DNA, 2379 bp, Artificial Sequence
  derived and/or modified sequence
atgagaagcctgagccagagccagggcgaccccctgccccccgcccacaccggcacctacagaaccagcaccgcccccagcagccccggcgtggacagcgtgcccctgcagagaaccggcagccagcacggcccccagaacgccgccgccgccaccttccagagagccagctacgccgccggccccgccagcaactacgccgacccctacagacagctgcagtactgccccagcgtggagagcccctacagcaagagcggccccgccctgccccccgagggcaccctggccagaagccccagcatcgacagcatccagaaggaccccagagagttcggctggagagaccccgagctgcccgaggtgatccagatgctgcagcaccagttccccagcgtgcagagcaacgccgccgcctacctgcagcacctgtgcttcggcgacaacaagatcaaggccgagatcagaagacagggcggcatccagctgctggtggacctgctggaccacagaatgaccgaggtgcacagaagcgcctgcggcgccctgagaaacctggtgtacggcaaggccaacgacgacaacaagatcgccctgaagaactgcggcggcatccccgccctggtgagactgctgagaaagaccaccgacctggagatcagagagctggtgaccggcgtgctgtggaacctgagcagctgcgacgccctgaagatgcccatcatccaggacgccctggccgtgctgaccaacgccgtgatcatcccccacagcggctgggagaacagccccctgcaggacgacagaaagatccagctgcacagcagccaggtgctgagaaacgccaccggctgcctgagaaacgtgagcagcgccggcgaggaggccagaagaagaatgagagagtgcgacggcctgaccgacgccctgctgtacgtgatccagagcgccctgggcagcagcgagatcgacagcaagaccgtggagaactgcgtgtgcatcctgagaaacctgagctacagactggccgccgagaccagccagggccagcacatgggcaccgacgagctggacggcctgctgtgcggcgaggccaacggcaaggacgccgagagcagcggctgctggggcaagaagaagaagaagaagaagagccaggaccagtgggacggcgtgggccccctgcccgactgcgccgagccccccaagggcatccagatgctgtggcaccccagcatcgtgaagccctacctgaccctgctgagcgagtgcagcaaccccgacaccctggagggcgccgccggcgccctgcagaacctggccgccggcagctggaagtggagcgtgtacatcagagccgccgtgagaaaggagaagggcctgcccatcctggtggagctgctgagaatcgacaacgacagagtggtgtgcgccgtggccaccgccctgagaaacatggccctggacgtgagaaacaaggagctgatcggcaagtacgccatgagagacctggtgcacagactgcccggcggcaacaacagcaacaacaccgccagcaaggccatgagcgacgacaccgtgaccgccgtgtgctgcaccctgcacgaggtgatcaccaagaacatggagaacgccaaggccctgagagacgccggcggcatcgagaagctggtgggcatcagcaagagcaagggcgacaagcacagccccaaggtggtgaaggccgccagccaggtgctgaacagcatgtggcagtacagagacctgagaagcctgtacaagaaggacggctggagccagtaccacttcgtggccagcagcagcaccatcgagagagacagacagagaccctacagcagcagcagaacccccagcatcagccccgtgagagtgagccccaacaacagaagcgccagcgcccccgccagccccagagagatgatcagcctgaaggagagaaagaccgactacgagtgcaccggcagcaacgccacctaccacggcgccaagggcgagcacaccagcagaaaggacgccatgaccgcccagaacaccggcatcagcaccctgtacagaaacagctacggcgcccccgccgaggacatcaagcacaaccaggtgagcgcccagcccgtgccccaggagcccagcagaaaggactacgagacctaccagcccttccagaacagcaccagaaactacgacgagagcttcttcgaggaccaggtgcaccacagaccccccgccagcgagtacaccatgcacctgggcctgaagagcaccggcaactacgtggacttctacagcgccgccagaccctacagcgagctgaactacgagaccagccactaccccgccagccccgacagctgggtgtag

SEQ ID NO: 116932 - protein, 321 aa, Artificial Sequence
  derived and/or modified sequence
MDVRALPWLPWLLWLLCRGGGDADSRAPFTPTWPRSREREAAAFRESLNRHRYLNSLFPSENSTAFYGINQFSYLFPEEFKAIYLRSKPSKFPRYSAEVHMSIPNVSLPLRFDWRDKQVVTQVRNQQMCGGCWAFSVVGAVESAYAIKGKPLEDLSVQQVIDCSYNNYGCNGGSTLNALNWLNKMQVKLVKDSEYPFKAQNGLCHYFSGSHSGFSIKGYSAYDFSDQEDEMAKALLTFGPLVVIVDAVSWQDYLGGIIQHHCSSGEANHAVLITGFDKTGSTPYWIVRNSWGSSWGVDGYAHVKMGSNVCGIADSVSSIFV

SEQ ID NO: 116933 - DNA, 966 bp, Artificial Sequence
  derived and/or modified sequence
atggacgtgagagccctgccctggctgccctggctgctgtggctgctgtgcagaggcggcggcgacgccgacagcagagcccccttcacccccacctggcccagaagcagagagagagaggccgccgccttcagagagagcctgaacagacacagatacctgaacagcctgttccccagcgagaacagcaccgccttctacggcatcaaccagttcagctacctgttccccgaggagttcaaggccatctacctgagaagcaagcccagcaagttccccagatacagcgccgaggtgcacatgagcatccccaacgtgagcctgcccctgagattcgactggagagacaagcaggtggtgacccaggtgagaaaccagcagatgtgcggcggctgctgggccttcagcgtggtgggcgccgtggagagcgcctacgccatcaagggcaagcccctggaggacctgagcgtgcagcaggtgatcgactgcagctacaacaactacggctgcaacggcggcagcaccctgaacgccctgaactggctgaacaagatgcaggtgaagctggtgaaggacagcgagtaccccttcaaggcccagaacggcctgtgccactacttcagcggcagccacagcggcttcagcatcaagggctacagcgcctacgacttcagcgaccaggaggacgagatggccaaggccctgctgaccttcggccccctggtggtgatcgtggacgccgtgagctggcaggactacctgggcggcatcatccagcaccactgcagcagcggcgaggccaaccacgccgtgctgatcaccggcttcgacaagaccggcagcaccccctactggatcgtgagaaacagctggggcagcagctggggcgtggacggctacgcccacgtgaagatgggcagcaacgtgtgcggcatcgccgacagcgtgagcagcatcttcgtgtag

SEQ ID NO: 116934 - DNA, 966 bp, Artificial Sequence
  derived and/or modified sequence
atggacgtcagggccttgccttggctcccatggctgttgtggttactatgccggggaggaggcgacgccgactcgcgcgcaccctttactccaacctggccaaggtcacgcgaacgtgaggccgcggcttttagggaaagcctgaaccgccatcggtacttaaactccctcttccccagcgaaaactccaccgccttttacggtattaaccaattttcatatctgtttccagaagagtttaaagcaatttatcttcgtagcaagcccagtaaatttcctagatattcagcagaggtgcacatgtccatcccgaacgtctccctgccactgcggtttgactggcgggataaacaggtcgtgactcaggttcgtaatcaacagatgtgcggagggtgctgggcgtttagcgtggtgggagccgtcgagtctgcctacgctattaaggggaagcctctagaagacctgagcgttcagcaggtgattgattgctcatataacaactacgggtgcaacggcggatcgaccctgaacgccctaaattggttgaacaaaatgcaggtgaagctggtaaaagactctgagtaccctttcaaagcccagaatggactttgtcattacttctccgggtctcacagtggctttagcattaaaggatactccgcttacgatttttctgatcaggaggatgagatggccaaggcccttttgactttcggaccccttgttgtgatcgttgacgctgtgtcctggcaggattacttgggaggtataattcagcaccattgttcttccggagaggccaatcacgcggttttgataactggctttgacaagactggctctacaccctattggatcgtaaggaactcatggggcagcagttggggcgtcgacggttacgcgcatgttaaaatgggatcaaacgtatgtggaatcgccgatagcgtgagctccatctttgtgtag

SEQ ID NO: 116935 - DNA, 966 bp, Artificial Sequence
  derived and/or modified sequence
atggatgtgcgggccctgccctggctgccctggctgctgtggctgctgtgccggggcggcggagatgctgacagccgggcccccttcacccccacctggcccaggagccgggagcgggaggccgccgccttccgggagagcctgaacagacaccgctacctgaacagcctcttccccagcgagaacagcacagccttctacggcatcaaccagttctcctacctgtttcctgaggagttcaaggccatctacctgcggagcaagcccagcaagttcccccgctacagcgctgaggtgcacatgagcatccccaacgtgtccctgcccctgcgctttgactggagggacaagcaggtggtgacccaggtgaggaaccagcagatgtgtggcggctgctgggccttctctgtggtgggcgctgtggagagcgcctatgccatcaagggcaagcccctggaggacctgtctgtgcagcaggtgattgactgcagctacaacaactacggctgcaatggaggcagcaccctgaatgccctgaactggctgaacaagatgcaggtgaagctggtgaaggacagcgagtaccccttcaaggcccagaatggcctgtgccactacttcagcggcagccacagcggcttcagcatcaagggctacagcgcctatgacttcagtgaccaggaggatgagatggccaaggccctgctgaccttcggccccctggtggtgattgtggatgctgtgtcctggcaggactacctgggcggcatcatccagcaccactgcagcagcggggaggccaaccacgctgtgctgatcaccggctttgacaagacaggcagcaccccctactggatcgtgaggaacagctggggcagctcctggggcgtggatggctacgcccacgtgaagatgggcagcaatgtgtgtggcattgctgacagcgtgagcagcatctttgtgtag

SEQ ID NO: 116936 - DNA, 966 bp, Artificial Sequence
  derived and/or modified sequence
atggacgtgcgggccctgccctggctgccctggctgctgtggctgctgtgtaggggggggggtgatgcagattctagagcacctttcacccctacgtggcccaggtcacgggaacgggaggccgcggcattccgcgaaagcctcaaccggcatcggtatctgaatagcctgtttccttcagagaacagtacggccttctacggcatcaatcagttttcttacctgttcccagaggagtttaaagccatttacctcaggagcaaaccttccaagttccctagatactccgccgaggttcacatgagcatccccaacgtgagtctcccactgaggttcgactggcgggataagcaggtcgtgacacaagtccggaatcagcaaatgtgcggtgggtgctgggctttttccgtcgtgggcgcagtggagtctgcgtacgcaattaagggaaagcctctagaggatttgagcgtccaacaggtgattgactgttcctataacaattacggctgtaacggcgggagtacactcaatgccttaaattggttaaataaaatgcaagtcaaactggtaaaggactccgaatatcccttcaaggcccaaaatggcctgtgccactacttttctggttcacactccggattcagtataaaagggtatagcgcatatgatttttccgaccaagaagatgaaatggctaaagccctcttaacgttcggcccactggtggtgattgtcgacgccgtctcttggcaggactatctgggggggatcatccaacaccattgctcctctggggaagccaaccacgcggttctcattaccgggtttgataagacgggctctactccatattggatcgtgagaaactcatggggatcgtcgtggggcgtggatgggtatgctcacgtgaagatgggatctaatgtgtgtggtatcgccgactctgtgtcctccatctttgtttag

SEQ ID NO: 116937 - DNA, 966 bp, Artificial Sequence
  derived and/or modified sequence
atggacgtgcgggcattgccatggcttccgtggctactatggctcctctgtagaggcggaggggatgcggacagtagggcgccttttactccgacatggcccagatctagggaacgcgaagcggctgcctttagagaatccctgaataggcatcggtacttgaatagtttattcccctcagaaaactcaacagctttctacgggatcaaccagtttagttatttgtttcctgaggaattcaaagctatttacctgcgctcaaaacccagcaaatttccaaggtactcagcagaggtgcatatgtcaatccctaatgtgtctctgccactccgattcgactggagagacaagcaagttgtgactcaggtgagaaatcaacagatgtgcggtggatgctgggccttttctgtcgtgggtgccgtggagtccgcatacgctataaaaggaaagccccttgaggatctgagcgtccaacaggtgatcgactgctcctataacaactatggctgcaacggaggtagcacactcaacgctttgaactggttaaacaagatgcaggttaagcttgtcaaggattcagagtatccattcaaggcacagaacggcttatgccactatttttccggaagtcacagtgggttttctattaaggggtacagcgcctacgacttttcagaccaggaggacgaaatggccaaggctctccttaccttcgggcctctggtggtaattgtggacgctgtgtcttggcaggactatctggggggaatcatccagcaccactgtagttcaggagaagccaaccatgcagtattgatcacagggtttgataagacaggcagcactccctattggatcgtccgcaattcttggggatcgtcctggggtgttgacgggtatgcgcatgttaagatgggtagtaacgtgtgtggaattgcagacagcgtttcttccatcttcgtgtag

SEQ ID NO: 116938 - DNA, 2954 bp, Artificial Sequence
  derived and/or modified sequence
aggctgggaggagccgaggaaccgaaagagaaaacaggccgcgcgggcggcagaggagccgggcgccgcaatggacgtgcgggcgctgccgtggctgccgtggctgctgtggctgctgtgccggggcggcggcgatgcggactcccgcgcccccttcaccccgacctggccgcggagccgcgagcgtgaagccgccgccttccgggaaagtcttaatagacatcgatacttgaattctttatttcccagtgaaaactccaccgccttctatggaataaatcagttttcctatttgtttcctgaagagtttaaagccatttatttaagaagcaaaccttccaagtttcccagatactcagcagaagtacatatgtccatccccaatgtgtctttgccgttaagatttgactggagggacaagcaggttgtgacacaagtgagaaaccagcagatgtgtggaggatgctgggccttcagcgtggtgggggcagtggaatctgcttatgcaataaaggggaagcccctggaagacctaagtgtccagcaggtcattgactgttcgtataataattatggctgcaatggaggctctactctcaatgctttgaactggttaaacaagatgcaagtaaaactggtgaaagattcagaatatccttttaaagcacaaaatggtctgtgccattacttttctggttcacattctggattttcaatcaaaggttattctgcatatgacttcagtgaccaagaagatgaaatggcaaaagcacttcttacctttggccctttggtagtcatagtagatgcagtgagctggcaagattatctgggaggcattatacagcatcactgctctagtggagaagcaaatcatgcagttctcataactgggtttgataaaacaggaagcactccatattggattgtgcggaattcctggggaagttcttggggagtagatggttatgcccatgtcaaaatgggaagtaatgtttgtggtattgcagattccgtttcttctatatttgtgtgacatgttgggcagatcaagagacagctacaaaaatgaaggttttcataatgcaatgtaacatagtacttcaaagtattattcaacttcaagtttcagcaactacctacaaaagattctaaggcctagtagtatttaaactaagtttcagaatgttcccttcttgtagagagatggacaaccaaagtcagtgggacaaactccagcacagaagcctgcgaggaagcctatggaatagtttcctgtcctgagacgaaattcagattaggagatattttaggcccctgcaactggggaaggctactgtttgtttttgtttgcttattatttatttgtttgtttattgtgagatatttcaggtgggatcaaagaggtcataagaatttattttcttttgtggggtgtaactactagctttagattacccctatacacaagaatggccaacctaaaattatgtgtgtcttgtacagttagttatattagcagccctctgagatggcgtatctatcggaaggatttcaaacaccaattgctttacctgaacaaatggtgcttaccctttgaacagcagagtgaccacgtagaaggaaggaaaagggcaaaatcgcttcagttaaactgaaattaaatgaacaataaggcaactatataagtaacttctagtagcattgcctgagagacaaattattgtttgataattttcattgtgaataggaatccaatagatcatattgcttactttgttctttttatactatagaataatattttgttctctagtatatcaaaataccaaaatattatctcatattttctccctctttctcttactctttaccaagttttcctggtggcttggcttccctgactaaagaattaagtctcatttttactttccatttctattttcttaccacttggttggctccctttgtctctgtacctttaccaacattaggatctcacctctttcttcctcccttaattcataagcaccactcctatcaaagtcccatctcttaaccctgggtatcaaacaaactgtgagttttccagaatctgtttcccagttttcccctcagctttcctggtctcccatccgaactgcttctttgtgcacctcttgttctttctcttggctcccagtcttgattcctgtgatcactcttgcatcactaattgcacaagtgatttcaggtgcaattctgattagcctgcgtccacacagtgatcgatgatcctatgtgcctagaaaggacactgtgtgctgctcatgacctgcaacaggaaaaaagccatttcttgttagcagtgtaagaaccttagagcaaaggagttgaccttctgattgaatataagcacaaccatattaaatgaatcaatacaagaaaattatttctgatactatgtatgtacatatttcttctctaaaatgtatcattcttttctaatgtatatgatctaacaaaaatgaaacatgaaatgcagtagcaaccactaaaaaaaaaaattcaaggacatctaactttttctctcacttttgccctttgtttatccttccctgtgattagataaacaaaataaaaaacaaaatgctgtatttctcttcttacgccagtcagaaccaatccgaaaagaatgtgtgttgactcaggtttggagttatttcaggaagacagatattgaccttttaattgataaatattcttattatcctggaatgccagaaaagaactatgtcctgcttgtctagtttgtattcgctgactttctatgtgatatagatgcatttgtaatactctttttcaagtgctaaaggatttctaaaatttcaaactgattaatatgtttctgctgttctggattttgatgacatttacaataaaacaacctacatttgactttggtttaaaaagaa

SEQ ID NO: 116939 - protein, 376 aa, Artificial Sequence
  derived and/or modified sequence
MALTAHPSCLLALLVAGLAQGIRGPLRAQDLGPQPLELKEAFKLFQIQFNRSYLSPEEHAHRLDIFAHNLAQAQRLQEEDLGTAEFGVTPFSDLTEEEFGQLYGYRRAAGGVPSMGREIRSEEPEESVPFSCDWRKVASAISPIKDQKNCNCCWAMAAAGNIETLWRISFWDFVDVSVQELLDCGRCGDGCHGGFVWDAFITVLNNSGLASEKDYPFQGKVRAHRCHPKKYQKVAWIQDFIMLQNNEHRIAQYLATYGPITVTINMKPLQLYRKGVIKATPTTCDPQLVDHSVLLVGFGSVKSEEGIWAETVSSQSQPQPPHPTPYWILKNSWGAQWGEKGYFRLHRGSNTCGITKFPLTARVQKPDMKPRVSCPP

SEQ ID NO: 116940 - DNA, 1131 bp, Artificial Sequence
  derived and/or modified sequence
atggccctgactgctcatccttcttgtctcctcgcactcctagtggccggcctcgcccagggcatccgcggacctctgagggcgcaagatctgggtcctcagcctttggagttgaaagaagcgttcaaactctttcagatccagtttaacaggagctacctgagtcccgaggagcatgcacaccggcttgatattttcgcacacaacctggcccaggctcaaagactccaagaggaagacctgggcacagcagagtttggggtcacgcctttcagcgatctgaccgaagaagaattcggtcagttatatggctatcgacgagctgccgggggcgtgccaagcatggggcgtgagatccgctcagaagaacctgaggaatcagtgccatttagctgcgattggcgaaaggttgcttccgctatatctccgatcaaggaccaaaagaattgtaattgctgctgggctatggcggctgccggaaacatcgaaactttatggagaatatccttttgggattttgtagatgtgtctgtccaagagctgctggactgtggcaggtgcggggacggatgtcacggtggtttcgtctgggatgcgtttatcacagtactgaataatagcggcttggcgtcagaaaaagactatcctttccagggtaaggttagggctcatcgatgtcaccccaagaaataccagaaagtggcatggatccaagatttcatcatgctgcagaacaacgagcaccgaatagcccagtatctcgcaacttacggccccattactgtaacgattaacatgaagccactgcagctctaccggaagggagttattaaagccactccaactacttgtgacccacagctggtggatcactctgtcttgctggtggggttcggcagcgttaagtcagaagagggaatttgggctgagaccgttagtagtcagagccaaccgcagcccccgcaccctaccccatactggattttaaagaattcttggggcgcccagtggggagagaagggttattttcggttgcatcgcggctccaatacttgcggcattaccaagtttccccttacagcgcgggttcagaagcctgacatgaagccacgggtctcttgcccgccttag

SEQ ID NO: 116941 - DNA, 1131 bp, Artificial Sequence
  derived and/or modified sequence
atggccctgacagcccaccccagctgcctgctggccctgctggtggccggcctggcccagggcatccggggccccctgcgggcccaggacctgggcccccagcccctggagctgaaggaggccttcaagctgttccagatccagttcaacagaagctacctgagccctgaggagcacgcccaccggctggacatctttgcccacaacctggcccaggcccagaggctgcaggaggaggacctgggcacagctgagtttggagtgacccccttcagtgacctgacagaggaggagtttggccagctgtatggctaccgccgggctgctggaggagtgcccagcatgggccgggagatccgctctgaggagcctgaggagagcgtgcccttcagctgtgactggaggaaggtggccagcgccatcagccccatcaaggaccagaagaactgcaactgctgctgggccatggctgctgctggcaacatcgagaccctgtggaggatctccttctgggactttgtggatgtgtctgtgcaggagctgctggactgtggccgctgtggagatggctgccacggcggctttgtgtgggatgccttcatcaccgtgctgaacaacagcggcctggccagcgagaaggactaccccttccagggcaaggtgcgggcccaccgctgccaccccaagaagtaccagaaggtggcctggatccaggacttcatcatgctgcagaacaatgagcaccgcatcgcccagtacctggccacctacggccccatcaccgtgaccatcaacatgaagcccctgcagctgtacaggaagggcgtcatcaaggccacccccaccacctgtgacccccagctggtggaccacagcgtgctgctggtgggcttcggctctgtgaagtctgaggagggcatctgggccgagaccgtgagcagccagagccagccccagcccccccaccccaccccctactggatcctgaagaacagctggggcgcccagtggggcgagaagggctacttccggctgcaccggggcagcaacacctgtggcatcaccaagttccccctgacagcccgggtgcagaagccagacatgaagccccgggtgtcctgccccccatag

SEQ ID NO: 116942 - DNA, 1131 bp, Artificial Sequence
  derived and/or modified sequence
atggccctgaccgcccaccccagctgcctgctggccctgctggtggctggcttggctcagggcattaggggtcctcttcgcgcccaggacctagggccacagcctctggagctaaaggaggctttcaagcttttccaaatacagtttaatcgctcctacttgtcaccagaggaacatgcccacagactcgacattttcgcccataatctagcccaagctcagagacttcaggaagaggacctcggtacagccgagtttggggtcacacccttcagcgacttgactgaagaagagttcggccagctctatggctaccggcgagcggccgggggagtaccttcaatgggcagagaaataaggtcagaggaacctgaggaatccgtacctttctcatgtgactggagaaaggtggcttctgcgatttctcctattaaagaccaaaagaattgcaactgctgttgggctatggcagccgccggaaacatcgaaaccttgtggcgcatcagcttttgggatttcgttgatgtttcagtacaagagctgctggattgtggaaggtgcggagatggatgtcacggtggctttgtttgggacgccttcatcactgtgctgaacaactccggtcttgcctctgaaaaggactatccctttcaaggcaaagttagagcccaccggtgtcatccaaagaagtaccagaaagttgcgtggattcaggactttattatgctgcaaaacaacgagcacagaattgctcagtacctggcaacatacggacctattaccgtaaccatcaacatgaagcctctgcagttatacagaaagggcgtgatcaaagctactcccacgacctgtgacccacagctggtcgatcactctgttctcctggttgggttcggatcagtaaagtcggaagaaggtatatgggcggagactgtctcatcccagtcacaaccccagccgccccacccgaccccttattggatacttaaaaacagttggggggcacagtggggcgagaagggctactttagactccaccggggatctaacacctgcggaatcaccaaatttccgttgaccgctcgggtgcaaaaaccagacatgaagccaagagtttcttgtcctccctag

SEQ ID NO: 116943 - DNA, 1131 bp, Artificial Sequence
  derived and/or modified sequence
atggctctcacagcccaccctagttgcctgcttgcactcttggtcgccggactggcacaaggaatacggggtccactgcgcgctcaggatctcggaccccaacctctggagttgaaagaagcatttaaactgtttcagatccagttcaatcgctcttacctgtccccagaggagcatgcccatagactcgacatcttcgctcataacctagcgcaggctcaaagactgcaggaggaagacttaggcacagcagaatttggagtaaccccgttctctgacctgacagaggaggagtttggacaactgtatggataccgccgagctgcgggtggtgtgccctctatggggcgagagatcagatccgaggaacctgaagaatccgtgcccttctcctgtgactggcgcaaagtcgcatctgctatcagccctatcaaggaccagaagaattgcaactgttgttgggccatggcagcggcaggcaatatagaaacgctatggcgcatctccttttgggatttcgtggacgtgagcgtgcaagagcttctggattgcgggaggtgtggcgatggctgccacgggggttttgtctgggatgcctttataaccgtcctaaataattcgggcttggcttctgaaaaggattatccctttcaggggaaggtcagggctcatagatgtcacccaaagaagtaccagaaggtggcttggattcaggatttcataatgctccagaacaacgagcaccgcatcgcacagtacttggccacatatggcccaatcacagttaccattaatatgaagcccctgcagttgtacagaaagggggtgattaaagccaccccaaccacctgtgatccccagttagttgaccattccgtcttactggtcggttttgggtccgtgaaaagcgaggagggaatctgggctgaaacagtgtcctcacaaagccagccccagccccctcatcccaccccatattggatccttaagaattcttggggcgcacagtggggcgagaagggatactttcggctacatcgaggctcaaatacttgtggtatcacaaagttccctcttacagcacgggtgcagaaaccggacatgaagcctcgtgttagctgccccccttag

SEQ ID NO: 116944 - DNA, 1300 bp, Artificial Sequence
  derived and/or modified sequence
gatctgcgcggcttcctgcctccatgccactccagactgcaccggcatggcactgactgcccacccctcctgcctcctggccctgttggtggcaggcctagcccaaggcatcagaggcccccttagggcccaggacctaggtccccagccgctagagctgaaagaggccttcaagttgttccagatccagttcaaccggagttacctgagcccagaagagcatgctcaccgcctggacatctttgcccacaacctggcccaggctcagaggctgcaggaggaggacttgggcacagctgagtttggggtgactccattcagtgacctcacagaggaggagtttggccagctctatggctatcggagggcagctggaggggtccccagcatgggcagagaaataaggtctgaagagccagaggagtcagtacctttcagctgtgactggcggaaggtggccagcgccatctcacccatcaaggaccagaaaaactgcaactgctgctgggccatggcagcggcaggcaacatagagaccctgtggcgcatcagtttctgggattttgtggatgtctccgtgcaggaactgctggactgtggccgctgtggggatggctgccacggtggcttcgtctgggacgcgttcataactgtcctcaacaacagcggcctggccagtgaaaaggactacccgttccagggcaaagtcagagcccacaggtgccaccccaagaagtaccagaaggtggcctggatccaggacttcatcatgctgcagaacaacgagcacagaattgcgcagtacctggccacttatggccccatcaccgtgaccatcaacatgaagccccttcagctataccggaaaggtgtgatcaaggccacacccaccacctgtgacccccagcttgtggaccactctgtcctgctggtgggttttggcagcgtcaagtcagaggaggggatatgggcagagacagtctcatcgcagtctcagcctcagcctccacaccccaccccatactggatcctgaagaactcctggggggcccaatggggagagaagggctatttccggctgcaccgagggagcaatacctgtggcatcaccaagttcccgctcactgcccgtgtgcagaaaccggatatgaagccccgagtctcctgccctccctgaacccacctggccccctcagctctgtcctgttaggccaactgcctccttgccagccccacccccaggtttttgcccatcctcccaatctcaatacagcctgaataaaccaagacaagacctctg

SEQ ID NO: 116945 - DNA, 1131 bp, Artificial Sequence
  derived and/or modified sequence
atggccctgaccgcccaccccagctgcctgctggccctgctggtggccggcctggcccagggcatcagaggccccctgagagcccaggacctgggcccccagcccctggagctgaaggaggccttcaagctgttccagatccagttcaacagaagctacctgagccccgaggagcacgcccacagactggacatcttcgcccacaacctggcccaggcccagagactgcaggaggaggacctgggcaccgccgagttcggcgtgacccccttcagcgacctgaccgaggaggagttcggccagctgtacggctacagaagagccgccggcggcgtgcccagcatgggcagagagatcagaagcgaggagcccgaggagagcgtgcccttcagctgcgactggagaaaggtggccagcgccatcagccccatcaaggaccagaagaactgcaactgctgctgggccatggccgccgccggcaacatcgagaccctgtggagaatcagcttctgggacttcgtggacgtgagcgtgcaggagctgctggactgcggcagatgcggcgacggctgccacggcggcttcgtgtgggacgccttcatcaccgtgctgaacaacagcggcctggccagcgagaaggactaccccttccagggcaaggtgagagcccacagatgccaccccaagaagtaccagaaggtggcctggatccaggacttcatcatgctgcagaacaacgagcacagaatcgcccagtacctggccacctacggccccatcaccgtgaccatcaacatgaagcccctgcagctgtacagaaagggcgtgatcaaggccacccccaccacctgcgacccccagctggtggaccacagcgtgctgctggtgggcttcggcagcgtgaagagcgaggagggcatctgggccgagaccgtgagcagccagagccagccccagcccccccaccccaccccctactggatcctgaagaacagctggggcgcccagtggggcgagaagggctacttcagactgcacagaggcagcaacacctgcggcatcaccaagttccccctgaccgccagagtgcagaagcccgacatgaagcccagagtgagctgccccccctag

SEQ ID NO: 116946 - protein, 303 aa, Artificial Sequence
  derived and/or modified sequence
MARRGPGWRPLLLLVLLAGAAQGGLYFRRGQTCYRPLRGDGLAPLGRSTYPRPHEYLSPADLPKSWDWRNVDGVNYASITRNQHIPQYCGSCWAHASTSAMADRINIKRKGAWPSTLLSVQNVIDCGNAGSCEGGNDLSVWDYAHQHGIPDETCNNYQAKDQECDKFNQCGTCNEFKECHAIRNYTLWRVGDYGSLSGREKMMAEIYANGPISCGIMATERLANYTGGIYAEYQDTTYINHVVSVAGWGISDGTEYWIVRNSWGEPWGERGWLRIVTSTYKDGKGARYNLAIEEHCTFGDPIV

SEQ ID NO: 116947 - DNA, 912 bp, Artificial Sequence
  derived and/or modified sequence
atggccagaagaggccccggctggagacccctgctgctgctggtgctgctggccggcgccgcccagggcggcctgtacttcagaagaggccagacctgctacagacccctgagaggcgacggcctggcccccctgggcagaagcacctaccccagaccccacgagtacctgagccccgccgacctgcccaagagctgggactggagaaacgtggacggcgtgaactacgccagcatcaccagaaaccagcacatcccccagtactgcggcagctgctgggcccacgccagcaccagcgccatggccgacagaatcaacatcaagagaaagggcgcctggcccagcaccctgctgagcgtgcagaacgtgatcgactgcggcaacgccggcagctgcgagggcggcaacgacctgagcgtgtgggactacgcccaccagcacggcatccccgacgagacctgcaacaactaccaggccaaggaccaggagtgcgacaagttcaaccagtgcggcacctgcaacgagttcaaggagtgccacgccatcagaaactacaccctgtggagagtgggcgactacggcagcctgagcggcagagagaagatgatggccgagatctacgccaacggccccatcagctgcggcatcatggccaccgagagactggccaactacaccggcggcatctacgccgagtaccaggacaccacctacatcaaccacgtggtgagcgtggccggctggggcatcagcgacggcaccgagtactggatcgtgagaaacagctggggcgagccctggggcgagagaggctggctgagaatcgtgaccagcacctacaaggacggcaagggcgccagatacaacctggccatcgaggagcactgcaccttcggcgaccccatcgtgtag

SEQ ID NO: 116948 - DNA, 912 bp, Artificial Sequence
  derived and/or modified sequence
atggcaaggcgaggtcccgggtggaggcccttgttgttacttgttcttctcgccggggctgctcagggcgggctgtatttccgacgaggtcagacttgctatcgtcctctccggggagacgggctagcaccactgggaagatccacgtaccccagaccccatgaatacctcagtcctgccgatctaccgaagtcctgggactggcgcaatgtggatggtgtcaattatgcctccattacgcgcaaccagcatatcccacagtattgtggctcttgttgggcgcacgccagcacatctgccatggccgacaggattaacatcaagaggaagggcgcctggcccagcacactgctgagtgtccagaatgtcattgactgcggaaatgctggatcttgcgaaggcggaaatgacctgagtgtttgggattacgctcaccaacatggaatccccgatgagacatgcaataattaccaggccaaagaccaagagtgtgataaatttaaccagtgtgggacctgtaatgaatttaaagagtgccacgccattcggaactacacgctttggcgggtgggcgactacgggtctctctccggcagagagaaaatgatggcggagatctacgccaacgggccgattagttgcggcattatggccacagaaaggcttgccaattacactggaggaatctatgctgagtaccaggacaccacctatatcaatcatgtcgtctcagtggcgggctggggaatcagcgatggaaccgagtattggattgtccggaattcatggggtgagccctggggggaaaggggatggctgaggattgtgacctcaacatacaaggacggaaagggggcccgctacaatttggccatagaggagcattgcacattcggcgacccaattgtgtag

SEQ ID NO: 116949 - DNA, 912 bp, Artificial Sequence
  derived and/or modified sequence
atggcccggcggggccctggctggaggcccctgctgctgctggtgctgctggccggggccgcccagggcggcctgtacttccggcggggccagacctgctaccggcccctgcggggagatggcctggcccccctgggccgcagcacctacccccggccccatgagtacctgagccctgctgacctgcccaagtcctgggactggagaaatgtggatggagtgaactatgccagcatcaccaggaaccagcacatcccccagtactgcggcagctgctgggcccacgccagcaccagcgccatggctgaccgcatcaacatcaagaggaagggggcctggcccagcaccctgctgtctgtgcagaatgtcatcgactgtggaaatgccggcagctgtgagggcggcaatgacctgtctgtgtgggactatgcccaccagcacggcatcccagatgagacctgcaacaactaccaggccaaggaccaggagtgtgacaagttcaaccagtgtggcacctgcaatgagttcaaggagtgccacgccatccggaactacaccctgtggagggtgggggactatggcagcctgagcggccgggagaagatgatggccgagatctatgccaacggccccatcagctgtggcatcatggccacagagcggctggccaactacacaggaggcatctatgcagagtaccaggacaccacctacatcaaccacgtggtgtctgtggccggctggggcatcagtgatggaacagagtactggatcgtgaggaacagctggggcgagccctggggcgagcggggctggctgagaattgtgaccagcacctacaaggatggcaagggggcccgctacaacctggccatcgaggagcactgcaccttcggggaccccatcgtgtag

SEQ ID NO: 116950 - DNA, 912 bp, Artificial Sequence
  derived and/or modified sequence
atggcccggcggggccccggctggcggcccctgctgctgctggtgcttctcgccggagcagcccaggggggactgtacttcagaagggggcagacctgctacaggccactgaggggcgatggccttgcaccactgggacggtcaacttacccacgaccgcacgaatacctctcacctgccgatctgcccaagtcctgggactggcggaatgttgacggggtgaattacgcctccatcacaagaaaccagcacattccacagtactgtgggagctgctgggcacatgcctctacaagcgctatggccgacagaataaacatcaaaaggaagggtgcctggcctagcacgctcctgtctgtgcagaatgttatcgactgtggtaatgctgggtcctgtgagggcggcaatgacctcagcgtgtgggattatgctcatcagcacggaattccggacgagacctgtaacaactaccaggctaaggatcaggaatgcgataagttcaatcagtgtggcacatgtaatgaattcaaggagtgccatgccattaggaactacacgctttggagagtaggggactacggcagcctgagcggccgggaaaaaatgatggcagaaatctacgcaaacgggccaattagctgcgggatcatggccaccgagcgacttgccaactacacaggaggcatctacgctgagtatcaggacacaacctatatcaatcatgtagtcagcgtagccgggtgggggatctctgacggcactgaatactggatcgtgaggaatagctggggagaaccctggggagagaggggctggttacgcatagtcactagtacttataaggacggaaaaggtgcccggtacaatctggcgattgaggagcattgcacctttggcgaccctatagtgtag

SEQ ID NO: 116951 - DNA, 912 bp, Artificial Sequence
  derived and/or modified sequence
atggccagacgaggcccaggctggagaccacttctcctgttggtgcttctcgccggagctgcacagggaggcctctactttcgcagagggcagacgtgttatagaccactcagaggggatgggctagctccgctcggacgctccacatatccaagacctcatgaatacctaagccctgccgaccttccgaaaagctgggactggcgcaacgtggacggcgtaaactacgcaagcatcactcgaaaccagcacatcccacagtattgtggcagctgctgggctcatgcatccacctcagcgatggctgatcggattaacatcaagcgaaagggagcctggcctagcaccctgctcagcgtgcagaatgttatcgactgcggcaacgccggtagttgtgaggggggaaacgatttatccgtatgggactacgcccatcaacatggtatcccagatgagacttgtaataattaccaggctaaagaccaggagtgtgataagtttaaccagtgcggcacatgcaacgagtttaaagagtgccacgccattcgcaattataccctttggcgagtcggcgactacgggtccctgtccggcagagagaagatgatggcagaaatctatgccaatgggccaatttcctgtggtatcatggccacagagcgcctggcaaactatacaggcggaatctatgcggagtaccaggatactacttatatcaatcatgttgtgtccgtggccggatgggggatctccgacgggaccgagtattggatcgtgaggaactcctggggagagccatggggtgagcggggatggctgcggattgttacgtccacctataaggatgggaaaggggcacgctacaatctggcaatcgaagaacactgcacctttggagaccccatcgtttag

SEQ ID NO: 116952 - DNA, 1495 bp, Artificial Sequence
  derived and/or modified sequence
ggggtcggccgggtgctgggccgaggccgaggccggggcgggatccagagcgggagccggcgcgggatctgggactcggagcgggatccggagcgggacccaggagccggcgcggggccatggcgaggcgcgggccagggtggcggccgcttctgctgctcgtgctgctggcgggcgcggcgcagggcggcctctacttccgccggggacagacctgctaccggcctctgcggggggacgggctggctccgctggggcgcagcacatacccccggcctcatgagtacctgtccccagcggatctgcccaagagctgggactggcgcaatgtggatggtgtcaactatgccagcatcacccggaaccagcacatcccccaatactgcggctcctgctgggcccacgccagcaccagcgctatggcggatcggatcaacatcaagaggaagggagcgtggccctccaccctcctgtccgtgcagaacgtcatcgactgcggtaacgctggctcctgtgaagggggtaatgacctgtccgtgtgggactacgcccaccagcacggcatccctgacgagacctgcaacaactaccaggccaaggaccaggagtgtgacaagtttaaccaatgtgggacatgcaatgaattcaaagagtgccacgccatccggaactacaccctctggagggtgggagactacggctccctctctgggagggagaagatgatggcagaaatctatgcaaatggtcccatcagctgtggaataatggcaacagaaagactggctaactacaccggaggcatctatgccgaataccaggacaccacatatataaaccatgtcgtttctgtggctgggtggggcatcagtgatgggactgagtactggattgtccggaattcatggggtgaaccatggggcgagagaggctggctgaggatcgtgaccagcacctataaggatgggaagggcgccagatacaaccttgccatcgaggagcactgtacatttggggaccccatcgtttaaggccatgtcactagaagcgcagtttaagaaaaggcatggtgacccatgaccagaggggatcctatggttatgtgtgccaggctggctggcaggaactggggtggctatcaatattggatggcgaggacagcgtggcactggctgcgagtgttcctgagagttgaaagtgggatgacttatgacacttgcacagcatggctctgcctcacaatgatgcagtcagccacctggtgaagaagtgacctgcgacacaggaaacgatgggacctcagtcttcttcagcagaggacttgatattttgtatttggcaactgtgggcaataatatggcatttaagaggtgaaagagttcagacttatcaccattcttatgtcactttagaatcaagggtgggggagggagggagggagttggcagtttcaaatcgcccaagtgatgaataaagtatctggctctgcacgaga

SEQ ID NO: 116953 - protein, 106 aa, Artificial Sequence
  derived and/or modified sequence
MDQFPESVTENFEYDDLAEACYIGDIVVFGTVFLSIFYSVIFAIGLVGNLLVVFALTNSKKPKSVTDIYLLNLALSDLLFVATLPFWTHYLINEKGLHNAMCKFTT

SEQ ID NO: 116954 - protein, 363 aa, Artificial Sequence
  derived and/or modified sequence
MASGKAFTMDQFPESVTENFEYDDLAEACYIGDIVVFGTVFLSIFYSVIFAIGLVGNLLVVFALTNSKKPKSVTDIYLLNLALSDLLFVATLPFWTHYLINEKGLHNAMCKFTTAFFFIGFFGSIFFITVISIDRYLAIVLAANSMNNRTVQHGVTISLGVWAAAILVAAPQFMFTKQKENECLGDYPEVLQEIWPVLRNVETNFLGFLLPLLIMSYCYFRIIQTLFSCKNHKKAKAIKLILLVVIVFFLFWTPYNVMIFLETLKLYDFFPSCDMRKDLRLALSVTETVAFSHCCLNPLIYAFAGEKFRRYLYHLYGKCLAVLCGRSVHVDFSSSESQRSRHGSVLSSNFTYHTSDGDALLLL

SEQ ID NO: 116955 - DNA, 1068 bp, Artificial Sequence
  derived and/or modified sequence
atggatcagttccccgagtcagtcaccgagaacttcgagtacgatgacctggccgaggcttgctatattggagacatcgtcgtttttgggaccgtgttcttatctatattctactccgtgattttcgccattggcctagtgggcaacttgctcgttgtgtttgcgttgactaatagcaaaaaacccaaatccgtcacagacatatacctgttgaacttagctctctccgatctcctcttcgtcgccaccttgcctttctggactcactacttgatcaacgaaaaagggcttcataacgcaatgtgcaaattcaccactgcttttttctttattggcttcttcggttctatctttttcataaccgtcatttcaatcgacagatatctggctattgtcctggccgctaattctatgaacaacaggaccgtacagcacggggtgaccatcagcttgggagtttgggcagcagccatcctggtcgccgcgcctcagttcatgtttacaaaacaaaaagaaaacgaatgtctcggcgattaccctgaggttttgcaggaaatctggcccgttctgcggaacgtagagaccaactttttgggctttctgttacccctgctgatcatgagttactgctattttcggatcattcagactctgttttcatgcaaaaatcataaaaaggccaaggcaataaagctgatcctgctggtagtcatagtcttcttcctgttctggaccccttataatgtcatgatattcctcgagactctgaaattatacgacttcttcccaagctgcgatatgcgaaaggatcttcggctggcgctctcagtgaccgagactgtggcttttagccactgctgtctgaaccctctgatctacgcgtttgccggcgagaagttccgcagatacctgtatcatctgtacggcaaatgtttggctgttctctgcgggagatctgtacacgtggatttttcttcttcagaaagtcaaagatcacgacacggttccgttctgagctcgaactttacttaccatacatcagacggcgatgccctcctcctcctgtag

SEQ ID NO: 116956 - DNA, 321 bp, Artificial Sequence
  derived and/or modified sequence
atggatcagtttcctgaaagcgtcacagagaacttcgagtacgacgacctggctgaggcttgctatatcggtgatattgtggtttttgggaccgttttcctgtcaattttttactcagttatctttgcaattggtttagtgggcaatttgctcgttgtctttgctctgaccaattccaaaaagcccaagtcagttaccgacatatacctgctgaacctggccctgtctgacctgctcttcgttgcaactttaccgttctggacccactaccttataaatgagaaaggacttcacaacgccatgtgcaagttcacaacttag

SEQ ID NO: 116957 - DNA, 501 bp, Artificial Sequence
  derived and/or modified sequence
atggaccagtttcctgagagtgtgacagagaattttgaatatgatgatctcgcagaggcttgctacattggagacatcgttgtctttgggactgttttcctgtccatattttactccgtgatcttcgccattgggctggtcgggaacctgctagtggtcttcgctctgactaatagcaaaaagccaaagtctgtgaccgacatttatcttctgaatctcgccctgtcagatttactcttcgtggcaacacttcctttttggactcactacctgattaacgaaaagggcttacacaatgcaatgtgtaagttcaccaccgccttcttcttcatcggtttcttcggctccatcttttttattacggtcattagcatcgatcgatatctggctatcgtcttggctgccaatagcatgaacaaccggaccgtgcagcacggagtgacaatcagcctgggcgtctgggccgccgccatcttagttgctgcgccccaattcatgtag

SEQ ID NO: 116958 - DNA, 1068 bp, Artificial Sequence
  derived and/or modified sequence
atggaccagttccctgagagtgtcacagagaatttcgaatacgacgacctcgctgaagcctgctacattggcgacatcgttgtgtttgggacggttttcctgtccattttttactcagttatcttcgctattggactcgtggggaacttgcttgttgttttcgctttaacaaattccaaaaagccaaagagcgtgaccgatatctatctactcaaccttgctctaagcgatctccttttcgtcgccacacttccattctggacacattacttaattaatgaaaagggcctccacaatgccatgtgcaagttcactacagccttcttctttattggcttttttggatctatattcttcattaccgtgatttctatagaccggtatctggctatcgttctcgcagccaactccatgaacaataggactgttcagcacggcgtgacaattagcctcggtgtctgggccgctgcaatcctagtggctgcgccacagtttatgttcacaaagcagaaggaaaacgaatgtctaggcgattatcctgaggttcttcaggaaatttggcctgtcctgcgtaatgttgagaccaactttctcgggtttttgctgccgttactgattatgtcctattgttactttagaattatccagactctatttagctgtaagaatcacaagaaggctaaagccatcaaactgatcctcctcgtggtgatcgtcttctttttgttctggaccccttacaacgtaatgatcttcctcgaaacgctgaaactgtacgatttcttcccttcctgcgatatgcgcaaggacctgcgcctggccctgagcgtcactgagaccgtcgccttttcccactgctgcctcaacccactcatttatgcattcgccggggagaagtttaggcgatatctgtaccacctgtatggaaagtgcttagctgtattatgtggacggtcagtgcacgtggatttttcctctagcgagagccagcgtagccgacacggctccgtgttgtctagtaacttcacgtatcatacttccgacggggatgcactccttttgctatag

SEQ ID NO: 116959 - DNA, 1068 bp, Artificial Sequence
  derived and/or modified sequence
atggaccagttccctgagagcgttacggagaattttgagtatgacgacctggcagaggcttgctatatcggcgacatagtggtgttcggaacagtctttctatccatcttttacagtgtcatcttcgctatcggcctagttgggaatctcctcgtggttttcgcacttacaaatagcaagaaaccaaagtcagtcaccgatatttacctgttaaacttagcactgagcgacctgctattcgtcgcaactcttcctttttggacccactaccttatcaacgagaaggggctgcacaacgctatgtgcaagtttacaacggcttttttctttatcgggttttttgggtcaattttctttattacggtgatctcaatcgacaggtacctggcgatcgtgctggctgcaaactccatgaataaccgcactgtacagcatggtgtgacgatctcgcttggggtctgggctgcagccatactggttgcggctcctcagtttatgttcaccaagcagaaggaaaacgagtgtctgggagactaccctgaagtactacaggagatctggcctgtgctgagaaacgtcgagacaaatttcttgggctttctgcttccccttctgattatgtcttactgctacttcaggattatccagaccttgttctcctgtaaaaatcacaagaaggctaaggctattaagttgatcttgttggtggttattgtttttttccttttttggaccccatacaatgtcatgattttcctcgaaaccctaaagctgtacgattttttcccaagctgcgacatgcggaaggacttgcggctggctctgagcgtcactgagaccgtggccttctctcattgttgccttaacccgctgatttacgccttcgctggggaaaagttcagaaggtatttgtaccacctttatggcaagtgcctggccgtcttgtgcggacggagcgtgcacgtggacttttcctcatccgagagtcagagatcacgccacggctctgttttgtcaagtaacttcacttaccatacgagcgatggggatgcgcttctgttgttgtag

SEQ ID NO: 116960 - DNA, 1068 bp, Artificial Sequence
  derived and/or modified sequence
atggaccagtttcctgagagcgtgacagagaactttgaatatgatgacctggccgaggcctgctacatcggggacatcgtggtgtttggaacagtgttcctgagcatcttctacagcgtcatctttgccatcggcctggtgggcaacctgctggtggtgtttgccctgaccaacagcaagaagcccaagtctgtgacagacatctacctgctgaacctggccctgagtgacctgctgtttgtggccaccctgcccttctggacccactacctgatcaatgagaagggcctgcacaatgccatgtgcaagttcaccacagccttcttcttcatcggcttcttcggcagcatcttcttcatcaccgtcatcagcattgaccgctacctggccatcgtgctggccgccaacagcatgaacaacagaacagtgcagcacggcgtgaccatcagcctgggcgtgtgggccgccgccatcctggtggccgccccccagttcatgttcaccaagcagaaggaaaatgaatgtctgggggactacccagaggtgctgcaggagatctggcctgtgctgagaaatgtggagaccaacttcctgggcttcctgctgcccctgctgatcatgagctactgctacttccgcatcatccagaccctcttcagctgcaagaaccacaagaaggccaaggccatcaagctgatcctgctggtggtgattgtgttcttcctgttctggaccccctacaacgtgatgatcttcctggagaccctgaagctgtatgacttcttccccagctgtgacatgaggaaggacctgcggctggccctgtctgtgacagagaccgtggccttcagccactgctgcctgaaccccctcatctatgcctttgctggggagaagttccgccgctacctgtaccacctgtatggcaagtgcctggccgtgctgtgtggccgctctgtgcacgtggacttcagcagcagcgagagccagaggagccgccacggctctgtgctgagcagcaacttcacctaccacaccagtgatggagatgccctgctgctgctgtag

SEQ ID NO: 116961 - DNA, 321 bp, Artificial Sequence
  derived and/or modified sequence
atggaccagtttcctgagagcgtgacagagaactttgaatatgatgacctggccgaggcctgctacatcggggacatcgtggtgtttggaacagtgttcctgagcatcttctacagcgtcatctttgccatcggcctggtgggcaacctgctggtggtgtttgccctgaccaacagcaagaagcccaagtctgtgacagacatctacctgctgaacctggccctgagtgacctgctgtttgtggccaccctgcccttctggacccactacctgatcaatgagaagggcctgcacaatgccatgtgcaagttcaccacctag

SEQ ID NO: 116962 - DNA, 501 bp, Artificial Sequence
  derived and/or modified sequence
atggaccagtttcctgagagcgtgacagagaactttgaatatgatgacctggccgaggcctgctacatcggggacatcgtggtgtttggaacagtgttcctgagcatcttctacagcgtcatctttgccatcggcctggtgggcaacctgctggtggtgtttgccctgaccaacagcaagaagcccaagtctgtgacagacatctacctgctgaacctggccctgagtgacctgctgtttgtggccaccctgcccttctggacccactacctgatcaatgagaagggcctgcacaatgccatgtgcaagttcaccacagccttcttcttcatcggcttcttcggcagcatcttcttcatcaccgtcatcagcattgaccgctacctggccatcgtgctggccgccaacagcatgaacaacagaacagtgcagcacggcgtgaccatcagcctgggcgtgtgggccgccgccatcctggtggccgccccccagttcatgtag

SEQ ID NO: 116963 - DNA, 1068 bp, Artificial Sequence
  derived and/or modified sequence
atggaccagttccccgagagcgtgaccgagaacttcgagtacgacgacctcgcagaagcttgctacattggcgatatcgtagtgtttgggactgtcttcctgtctattttctactctgttattttcgccattggacttgtgggtaatctgctggtagtgttcgcattgaccaactctaagaaacctaagtcagtgaccgatatctatctgctgaacctggcgctttcagacctgctcttcgttgctacactgcccttctggactcattacctcattaacgaaaagggtctgcacaacgccatgtgcaaattcaccactgcatttttttttatcggatttttcggatccattttttttatcacggtgatttccatcgaccgctatctggccatcgtgttagccgccaattccatgaacaaccgaactgtgcagcacggagtgactattagcttaggggtatgggcagctgctatcctcgtcgcagccccacagtttatgtttaccaagcaaaaagaaaacgagtgcctgggggattaccctgaagtgctgcaggagatttggccagtgctgcgcaatgtggagaccaatttcttggggttcttactgccactgctcatcatgagctactgttacttcaggattatccagactttgttttcttgtaagaatcacaagaaggccaaggctattaagcttatcttgctggtcgtgattgtcttctttctcttttggactccttataacgtgatgatcttcttagagacacttaagctgtacgactttttcccatcttgcgacatgcgcaaggacctgcgcctggcactgtccgtaactgagacggttgcttttagtcactgttgcctaaaccctctgatctacgccttcgccggagagaaatttagaagatatctgtaccatctgtatggcaaatgcctcgctgtgctgtgcggtcggtcggtccacgtggatttttccagttctgagagccagaggtccaggcatggttcagtactgagcagcaacttcacttaccacacctctgatggcgatgctctcttactcctgtag

SEQ ID NO: 116964 - DNA, 321 bp, Artificial Sequence
  derived and/or modified sequence
atggaccagttccccgagagcgtgaccgagaacttcgagtacgacgacttagctgaggcgtgctatattggcgacattgtggtattcggaacagtgtttttgtcaatattttattccgtaatattcgctataggactggtgggaaatctgttggtcgtattcgccctgactaacagcaaaaaacctaaatctgtgactgacatctatctgctcaatctggcactgagcgacctgctgttcgtggccacccttcccttctggacgcactacctaattaacgagaagggtttgcacaatgcgatgtgtaaattcactacatag

SEQ ID NO: 116965 - DNA, 501 bp, Artificial Sequence
  derived and/or modified sequence
atggaccagttccccgagagcgtgaccgagaacttcgagtacgacgatctggcagaagcttgctatattggggatatcgtggtgttcgggactgtgtttttaagcattttctatagcgtgatatttgctataggcctggtgggcaatctcctcgtggtatttgcgctcacgaatagtaaaaagccaaaaagtgtcaccgatatctacctactcaacttggcactgagtgacttgctttttgtagcaacgttacccttttggacccactacctgattaacgagaagggcctccataatgcgatgtgtaagttcaccactgccttcttctttatcggcttcttcggctcgatctttttcattactgtgatcagcatagacaggtacctggccatcgtgcttgccgcaaatagcatgaacaaccggacggttcagcacggtgtgacaatcagtctgggagtgtgggcggccgccatcctggtggcagcgccccagttcatgtag

SEQ ID NO: 116966 - DNA, 1068 bp, Artificial Sequence
  derived and/or modified sequence
atggaccagttccccgagagcgtgaccgagaacttcgagtacgacgacctggccgaggcctgttatatcggtgatatcgtcgtgttcggtaccgtgtttttaagtatcttctactccgtaatcttcgccatcgggctggtgggtaatctgcttgtagttttcgccctcacaaattcaaagaaaccgaaaagcgtgaccgacatttacctgctgaacctggcattatcagatctgctgttcgtcgccaccttgcccttctggacacattatctgatcaatgaaaaaggactccacaacgcaatgtgtaagttcacgaccgcctttttcttcattggtttctttggttccatttttttcatcacagtcatcagcatcgatcgttacctggcgattgtgttagcagccaattccatgaataatagaactgtccagcacggagtgacgatttcgctgggcgtgtgggccgctgctattcttgtcgctgcgccgcagtttatgttcacgaaacagaaggaaaatgaatgtttaggcgattatcccgaggtgctccaagaaatttggccggtgctccgcaacgttgagactaatttcctagggtttctgctgcccctcctgataatgtcatactgctatttccgaattatccaaactctgttcagctgcaaaaatcataagaaggcaaaggcaattaagctgatcctacttgttgtgatcgtgttctttctcttctggactccctataatgtaatgatcttcctagagacactcaagctgtatgacttttttcccagttgcgacatgcgcaaggacttgagacttgcactcagcgtcaccgagacagtcgctttcagccactgctgcttgaacccactgatatatgcctttgccggagaaaaattcagacgctacctttatcacttgtacggcaaatgtctggcagttctgtgtggtagaagtgtccacgtggacttttccagttccgaatcccaacgatcacggcacgggtccgtcctgtcttctaatttcacatatcatacctcggacggcgacgccttactgctgttgtag

SEQ ID NO: 116967 - DNA, 1068 bp, Artificial Sequence
  derived and/or modified sequence
atggaccagttccccgagagcgtgaccgagaacttcgagtacgacgatcttgctgaggcttgttacatcggcgacattgtagtgtttgggactgtttttctatcaatcttctactcagttatctttgctatcggactggtggggaacctcctcgtcgtcttcgccttgactaacagtaagaaacccaaatccgttaccgatatatacctgttgaacctggcactttccgatctgctatttgtcgcaaccctgcctttctggacccattacttgattaatgagaagggcctacacaatgccatgtgcaaatttactaccgctttcttcttcattggattcttcggcagcattttttttatcacagtcatttcaattgatcgttatctggccatcgtgctagctgcaaactctatgaacaacagaaccgtgcaacatggagttacaatttccctcggcgtgtgggcagccgccattctggtcgcggcccctcaatttatgtttacaaaacagaaagagaacgagtgtctgggtgactaccctgaggtgttacaagagatttggcccgtgctgcggaacgttgagacaaattttctcggttttttattgcccctcctaatcatgtcctattgctactttaggatcatccagaccctcttttcgtgtaaaaatcacaaaaaggccaaggctattaagcttatcctccttgtggtgatcgtatttttccttttctggaccccatataacgttatgatatttttggagacactgaaactatacgacttcttcccgtcctgcgacatgcggaaggatctgcgactggctctttccgtcactgagacagtcgcttttagtcattgctgcttgaacccgttaatctacgccttcgctggggagaagtttcgcagatatctttaccacttgtatggcaaatgcctggctgtgctttgcggacggtccgttcatgttgattttagttctagtgagtctcagaggtccaggcatggttcagtgttaagtagtaacttcacctaccacacctcagacggcgacgctctccttctcttatag

SEQ ID NO: 116968 - DNA, 1068 bp, Artificial Sequence
  derived and/or modified sequence
atggaccagtttcccgaaagcgtcacagagaactttgaatatgatgacttggcggaggcctgctacattggcgacattgtggtctttggaaccgtctttctgtccattttttattccgtgatattcgcaatcggccttgtcggcaacctgctcgttgtgttcgctctgaccaattccaagaagcctaaaagcgtgaccgacatatacttattaaacttggccctgtcagatttgctcttcgtagccacgctgcccttctggacacactatctcatcaacgagaagggtctccacaatgcaatgtgcaaattcactaccgctttcttctttattggcttctttggatccatattctttattactgttatctcaattgaccgataccttgcaatcgtactggcagccaactcaatgaataataggactgtgcaacatggagtgacaatcagcctgggagtttgggccgctgctattcttgtagctgcaccacagttcatgtttaccaaacagaaggagaacgagtgtttgggcgactatccagaggtgctgcaagagatctggcctgtgctgcgcaacgtggagactaactttttgggttttttactgccactgctcatcatgtcctattgctatttccgcattatacagacactattctcatgcaagaaccataaaaaagctaaagcaattaaactgattctgctggtcgttatagtgttcttcttgttctggaccccctataatgtgatgatcttcctcgaaaccctgaagctctacgatttcttcccctcgtgtgacatgcggaaggacctcaggctggccctgtccgttactgaaaccgtggctttttcccactgttgtctcaacccgttaatctacgcctttgccggagaaaaattccgaaggtacctctatcacctgtacggaaagtgcctcgctgtgctgtgtggcagatccgtgcacgttgatttttccagcagcgagtctcagcggtcccggcatggctcagtgctttctagtaacttcacctaccacacctcagacggcgatgcactgctattgctatag

SEQ ID NO: 116969 - DNA, 321 bp, Artificial Sequence
  derived and/or modified sequence
atggaccagtttcctgagagtgtgacggagaatttcgagtatgacgacttagccgaggcctgctacatcggggatattgtggtcttcggaacagttttcctctcaatcttctattcagtgatttttgccatcggcctggtaggtaatctcctggttgtgtttgccctgacaaactcaaagaaacccaaaagcgttacggatatttacctcctgaacctggccctgtcagacctgctcttcgtagccactctgcccttttggacccattacctcatcaacgaaaaaggtttacacaatgccatgtgtaagtttactacttag

SEQ ID NO: 116970 - DNA, 501 bp, Artificial Sequence
  derived and/or modified sequence
atggatcagtttcccgaatctgtcacggaaaacttcgaatatgatgacctggccgaggcttgttacatcggcgacattgtagtcttcggaaccgtgtttctgtcaatcttctattccgtgatctttgcaataggcctcgtgggaaatctgttggtcgttttcgccctcaccaacagtaagaagcctaagtcggtgacagacatctatctcctgaacctcgccttgtccgacctgttatttgtggctaccctgcccttttggacccactacctgatcaatgaaaaaggcctgcacaacgccatgtgtaagttcaccacggcattttttttcatcgggttctttgggtctatattttttataacggtgatctccattgacagatatctggcaatcgtgctggccgcaaactccatgaataaccgaaccgtgcagcacggcgttactatatctttgggagtctgggccgctgctatcttggtggcagccccacagtttatgtag

SEQ ID NO: 116971 - DNA, 1068 bp, Artificial Sequence
  derived and/or modified sequence
atggatcagttccccgaatccgttaccgaaaatttcgaatacgacgacctggccgaggcttgttacattggggacatcgtagtcttcggtactgtgttcctaagcatcttctactccgtgatcttcgcgatcggtcttgtgggcaacctccttgtcgtattcgcacttaccaattctaagaaacccaagagtgtaaccgacatctacttgctgaacctggccctgagtgatctgcttttcgtagctacgctgcctttttggacacactatctgataaatgaaaagggtctacataacgcaatgtgtaagttcacgacagcattcttcttcattgggttttttggatccatcttttttataaccgtgatttctattgataggtatctggccatagtgctggcggcaaactctatgaataacagaactgttcagcacggggtgactattagtcttggggtctgggcagccgcaatcctggtcgctgctccacagttcatgttcaccaaacaaaaggagaacgaatgtctgggagactacccagaggttcttcaggagatctggccagttctaaggaatgtagagaccaactttttaggctttctcttaccactgcttatcatgtcttactgctattttcggatcatccaaacattattcagttgtaaaaaccataagaaagccaaggccatcaaactcattctgttagtggtcatagtgttttttctgttttggacaccatacaacgttatgatcttccttgaaactttgaaactatatgacttctttccatcttgcgacatgaggaaagatctccggctggccctcagtgtgacggaaacagtggctttctcccactgttgcctcaacccactcatctacgcctttgccggtgagaaatttcggcgatacctgtatcatctgtatggcaaatgtctcgcagtcctgtgtggtcgctctgtgcatgtggactttagttcttcagaaagccagcgatcacgccacggctctgtgctgtcctctaacttcacttaccatactagtgacggggacgcgctgctgttactttag

SEQ ID NO: 116972 - DNA, 1068 bp, Artificial Sequence
  derived and/or modified sequence
atggaccagtttccggagagcgtgaccgagaatttcgagtacgacgacttggccgaggcctgctacatcggtgacatagtggtgtttggaacagtgttcctctccatcttctattcggtgattttcgcgatcggcctggtagggaatctgctggtggtgttcgcattgaccaatagtaagaaacctaagtccgttaccgatatatacctactcaatttggcccttagtgacttgttatttgtcgccactctaccattttggacccattaccttatcaatgagaagggccttcataacgctatgtgcaaatttactacggcctttttcttcattggattctttggttccattttctttattacagtgatatcaatcgataggtatctggccattgttctggcagctaacagcatgaacaatcgaactgtgcaacacggcgttactatctctctcggggtgtgggccgcagctatactggtggccgcaccacagtttatgtttaccaaacagaaggagaacgagtgtctgggtgactatccagaagtccttcaggagatttggcctgtactgcggaacgtggagaccaacttcctaggctttctgctgcccctcctgattatgtcatattgctacttccgcatcatccagacactgttctcatgcaaaaatcacaaaaaagcaaaagctattaagttgatcttgctggtggtgatcgttttctttctgttttggactccttacaacgtgatgatcttcctggaaaccctcaagctgtacgatttctttccaagctgcgacatgagaaaggatctgagattagcgctttctgtcactgaaaccgtggccttcagccactgttgtctcaatcctcttatatatgcctttgcgggtgagaaatttcgccgatacctctatcatctctatggcaaatgtctggcggtgctgtgtggaagaagtgtgcacgtggacttctcaagcagcgagtcacagaggagccgacatgggagcgtgctgtcttcgaacttcacctaccacacatctgatggcgatgccttgctcctcctctag

SEQ ID NO: 116973 - DNA, 1068 bp, Artificial Sequence
  derived and/or modified sequence
atggaccagttccccgagagcgtgaccgagaacttcgagtacgacgacctggccgaggcctgctacatcggcgacatcgtggtgttcggcaccgtgttcctgagcatcttctacagcgtgatcttcgccatcggcctggtgggcaacctgctggtggtgttcgccctgaccaacagcaagaagcccaagagcgtgaccgacatctacctgctgaacctggccctgagcgacctgctgttcgtggccaccctgcccttctggacccactacctgatcaacgagaagggcctgcacaacgccatgtgcaagttcaccaccgccttcttcttcatcggcttcttcggcagcatcttcttcatcaccgtgatcagcatcgacagatacctggccatcgtgctggccgccaacagcatgaacaacagaaccgtgcagcacggcgtgaccatcagcctgggcgtgtgggccgccgccatcctggtggccgccccccagttcatgttcaccaagcagaaggagaacgagtgcctgggcgactaccccgaggtgctgcaggagatctggcccgtgctgagaaacgtggagaccaacttcctgggcttcctgctgcccctgctgatcatgagctactgctacttcagaatcatccagaccctgttcagctgcaagaaccacaagaaggccaaggccatcaagctgatcctgctggtggtgatcgtgttcttcctgttctggaccccctacaacgtgatgatcttcctggagaccctgaagctgtacgacttcttccccagctgcgacatgagaaaggacctgagactggccctgagcgtgaccgagaccgtggccttcagccactgctgcctgaaccccctgatctacgccttcgccggcgagaagttcagaagatacctgtaccacctgtacggcaagtgcctggccgtgctgtgcggcagaagcgtgcacgtggacttcagcagcagcgagagccagagaagcagacacggcagcgtgctgagcagcaacttcacctaccacaccagcgacggcgacgccctgctgctgctgtag

SEQ ID NO: 116974 - DNA, 321 bp, Artificial Sequence
  derived and/or modified sequence
atggaccagttccccgagagcgtgaccgagaacttcgagtacgacgacctggccgaggcctgctacatcggcgacatcgtggtgttcggcaccgtgttcctgagcatcttctacagcgtgatcttcgccatcggcctggtgggcaacctgctggtggtgttcgccctgaccaacagcaagaagcccaagagcgtgaccgacatctacctgctgaacctggccctgagcgacctgctgttcgtggccaccctgcccttctggacccactacctgatcaacgagaagggcctgcacaacgccatgtgcaagttcaccacctag

SEQ ID NO: 116975 - DNA, 501 bp, Artificial Sequence
  derived and/or modified sequence
atggaccagttccccgagagcgtgaccgagaacttcgagtacgacgacctggccgaggcctgctacatcggcgacatcgtggtgttcggcaccgtgttcctgagcatcttctacagcgtgatcttcgccatcggcctggtgggcaacctgctggtggtgttcgccctgaccaacagcaagaagcccaagagcgtgaccgacatctacctgctgaacctggccctgagcgacctgctgttcgtggccaccctgcccttctggacccactacctgatcaacgagaagggcctgcacaacgccatgtgcaagttcaccaccgccttcttcttcatcggcttcttcggcagcatcttcttcatcaccgtgatcagcatcgacagatacctggccatcgtgctggccgccaacagcatgaacaacagaaccgtgcagcacggcgtgaccatcagcctgggcgtgtgggccgccgccatcctggtggccgccccccagttcatgtag

SEQ ID NO: 116976 - protein, 365 aa, Artificial Sequence
  derived and/or modified sequence
MALLLCFVLLCGVVDFARSLSITTPEEMIEKAKGETAYLPCKFTLSPEDQGPLDIEWLISPADNQKVDQVIILYSGDKIYDDYYPDLKGRVHFTSNDLKSGDASINVTNLQLSDIGTYQCKVKKAPGVANKKIHLVVLVKPSGARCYVDGSEEIGSDFKIKCEPKEGSLPLQYEWQKLSDSQKMPTSWLAEMTSSVISVKNASSEYSGTYSCTVRNRVGSDQCLLRLNVVPPSNKAGLIAGAIIGTLLALALIGLIIFCCRKKRREEKYEKEVHHDIREDVPPPKSRTSTARSYIGSNHSSLGSMSPSNMEGYSKTQYNQVPSEDFERTPQSPTLPPAKVAAPNLSRMGAIPVMIPAQSKDGSIV

SEQ ID NO: 116977 - protein, 324 aa, Artificial Sequence
  derived and/or modified sequence
MALLLCFVLLCGVVDFARSLSITTPEEMIEKAKGETAYLPCKFTLSPEDQGPLDIEWLISPADNQKVDQVIILYSGDKIYDDYYPDLKGRVHFTSNDLKSGDASINVTNLQLSDIGTYQCKVKKAPGVANKKIHLVVLVKPSGARCYVDGSEEIGSDFKIKCEPKEGSLPLQYEWQKLSDSQKMPTSWLAASNKAGLIAGAIIGTLLALALIGLIIFCCRKKRREEKYEKEVHHDIREDVPPPKSRTSTARSYIGSNHSSLGSMSPSNMEGYSKTQYNQVPSEDFERTPQSPTLPPAKVAAPNLSRMGAIPVMIPAQSKDGSIV

SEQ ID NO: 116978 - DNA, 1098 bp, Artificial Sequence
  derived and/or modified sequence
atggcacttcttctgtgcttcgttctcctttgtggcgtggtggatttcgcgaggtccctcagcatcacgactcctgaagagatgatagagaaggccaagggagagaccgcttatctgccttgtaagtttaccttgagccccgaggaccaaggaccccttgatatagagtggctgattagtcccgcagataaccagaaagtggatcaggttatcatactttacagtggcgacaagatctacgacgactattatcccgatctgaaaggtcgcgttcacttcacgtccaatgatttgaagtccggggacgcgagcatcaatgtgaccaatttgcaactgtctgatatcggaacgtatcagtgtaaagtgaagaaggcgcccggtgttgccaacaagaaaatccatctcgtggtcctggtgaagccttctggcgccagatgttacgttgacggctctgaagaaatcggaagcgactttaaaattaaatgcgaaccgaaggagggaagcctgcctctacagtacgagtggcagaagttgtcagacagccagaagatgcctacctcctggctggctgagatgaccagctcagtgattagcgtcaagaacgccagctctgagtactccggaacatactcttgtaccgtccgaaatcgggttggaagcgaccagtgcctgctccggcttaatgtcgtcccccccagcaacaaagctggtctgatcgccggggctatcatcgggacgcttttggccctggctctaatcgggttaattattttctgctgccggaagaaaaggagggaggaaaagtacgaaaaagaggtgcatcacgacatcagggaggatgtgcctcctccgaaatcacggacttcgaccgccagatcctatatcggatcaaaccattcaagcctcggatcgatgtcccctagcaacatggagggatactcaaaaacacaatataaccaggtcccatctgaagattttgagagaaccccacagagcccaacactgccccctgcaaaagttgccgcccccaacttaagcagaatgggcgccatccccgtgatgattccagctcagtccaaggacgggtcaatcgtgtag

SEQ ID NO: 116979 - DNA, 975 bp, Artificial Sequence
  derived and/or modified sequence
atggcgctccttctgtgttttgtgctcctatgcggggtggtcgacttcgctaggtccctatccatcactactcctgaggaaatgatcgagaaagccaagggcgaaacagcttacctcccttgcaaatttacgctgagtccagaagaccaggggccattggatattgaatggctcatatcacctgccgataatcaaaaagtcgatcaggtgataatactgtactccggagacaaaatatacgacgactactaccccgacctcaaggggcgtgtgcactttacgtctaatgacctgaagtctggagacgccagcatcaacgtgacaaatcttcaattgagcgatattggtacatatcaatgcaaagtgaaaaaggcccccggggtcgccaacaaaaaaatacacctggtcgtcctggtcaagcccagcggggctcgctgctatgtggacggtagcgaggaaataggctcagactttaagattaaatgtgaacccaaagaaggctccttgcctctccagtacgagtggcagaaactttcagactctcagaagatgcccaccagctggttagctgcctctaacaaggctgggctgatcgcaggagccataatcggaacacttctcgccctcgccttaattggcttaatcattttttgttgcaggaagaaaaggagagaggagaagtacgaaaaggaagttcaccacgatatacgggaggatgttcctccccctaaatccaggacctccactgccaggtcgtacatcggctcgaatcattcaagccttggaagcatgtctccgtccaacatggaaggctactcaaaaacacagtataatcaagtcccatcagaggactttgaacggactccgcagtccccaaccctaccgccagctaaggtggccgcacctaatctctctcggatgggagcaattcctgtcatgattccggcgcaatccaaggacgggagtatcgtctag

SEQ ID NO: 116980 - DNA, 1098 bp, Artificial Sequence
  derived and/or modified sequence
atggccctgctgctgtgctttgtgctgctgtgtggggtggtggactttgcccggagcctgagcatcaccaccccagaggagatgattgagaaggccaagggggagacagcctacctgccctgcaagttcaccctgagccctgaggaccagggccccctggacatcgagtggctgatcagccctgctgacaaccagaaggtggaccaggtgatcatcctgtacagcggggacaagatctatgatgactactacccagacctgaagggccgggtgcacttcaccagcaatgacctgaagtctggagatgccagcatcaacgtgaccaacctgcagctgagtgacatcggcacctaccagtgcaaggtgaagaaggcccctggggtggccaacaagaagatccacctggtggtgctggtgaagcccagcggggcccgctgctacgtggatggcagcgaggagatcggcagtgacttcaagatcaagtgtgagcccaaggagggcagcctgcccctgcagtatgagtggcagaagctgagtgacagccagaagatgcccacctcctggctggccgagatgaccagcagcgtcatctctgtgaagaatgccagcagcgagtacagcggcacctacagctgcaccgtgaggaacagagtgggcagtgaccagtgcctgctgcggctgaatgtggtgccccccagcaacaaggccggcctgattgctggggccatcatcggcaccctgctggccctggccctgattggcctcatcatcttctgctgcaggaagaagaggcgggaggagaagtatgagaaggaggtgcaccacgacatcagagaagatgtgcccccacccaagagcaggaccagcacagcccggagctacatcggcagcaaccacagcagcctgggctccatgagccccagcaacatggagggctacagcaagacccagtacaaccaggtgcccagcgaggactttgagaggaccccccagagccccaccctgcccccagccaaggtggccgcccccaacctgagcaggatgggcgccatccctgtgatgatcccagcccagagcaaggatggcagcatcgtgtag

SEQ ID NO: 116981 - DNA, 975 bp, Artificial Sequence
  derived and/or modified sequence
atggccctgctgctgtgctttgtgctgctgtgtggggtggtggactttgcccggagcctgagcatcaccaccccagaggagatgattgagaaggccaagggggagacagcctacctgccctgcaagttcaccctgagccctgaggaccagggccccctggacatcgagtggctgatcagccctgctgacaaccagaaggtggaccaggtgatcatcctgtacagcggggacaagatctatgatgactactacccagacctgaagggccgggtgcacttcaccagcaatgacctgaagtctggagatgccagcatcaacgtgaccaacctgcagctgagtgacatcggcacctaccagtgcaaggtgaagaaggcccctggggtggccaacaagaagatccacctggtggtgctggtgaagcccagcggggcccgctgctacgtggatggcagcgaggagatcggcagtgacttcaagatcaagtgtgagcccaaggagggcagcctgcccctgcagtatgagtggcagaagctgagtgacagccagaagatgcccacctcctggctggccgccagcaacaaggccggcctgattgctggggccatcatcggcaccctgctggccctggccctgattggcctcatcatcttctgctgcaggaagaagagaagagaggagaagtatgagaaggaggtgcaccacgacatccgggaggatgtgcccccacccaagagcaggaccagcacagcccggagctacatcggcagcaaccacagcagcctgggctccatgagccccagcaacatggagggctacagcaagacccagtacaaccaggtgcccagtgaagattttgagaggaccccccagagccccaccctgcccccagccaaggtggccgcccccaacctgagcaggatgggcgccatccctgtgatgatcccagcccagagcaaggatggcagcatcgtgtag

SEQ ID NO: 116982 - DNA, 1098 bp, Artificial Sequence
  derived and/or modified sequence
atggccctgctgctgtgcttcgtgctgctgtgcggcgtggtggacttcgcaaggtctctgtccattaccacacctgaggagatgattgagaaggcgaaaggggagacggcataccttccttgcaagttcacattgagcccggaggatcagggccccctggacatcgagtggcttattagtcccgcggacaaccaaaaagtcgaccaagtgataattctttactccggggataaaatctacgacgactattacccggacctgaagggcagggttcacttcacctctaatgatttgaagagcggcgatgcctcaatcaacgtgacaaatctgcagttgagcgatatcggcacataccagtgtaaggtcaagaaggccccaggcgtcgccaacaagaagattcatctcgtggtactcgtcaagccgtcaggcgccagatgttacgtcgatggatctgaggagatcggaagcgactttaagataaaatgtgaacccaaggagggcagtctgcccttgcagtatgaatggcagaaattgagcgattcccagaagatgcccacatcatggttggcagagatgacttcttcagttatcagcgtgaagaacgcctcctcggagtactctgggacttatagttgtacagtgcgaaaccgggtcggtagtgatcagtgcctcctgcgattaaatgtagtaccccctagtaacaaagccggactgatcgccggcgctattattggaacgctgctggctttagccctcatcggcctcattatcttctgctgtcgaaaaaaaagacgcgaggaaaaatacgagaaggaggtccatcacgatattagggaagacgtaccccccccaaaaagccggacctcaaccgctcggagctacatagggagtaaccacagtagcttgggcagcatgagccctagcaatatggaaggttactcgaaaacacagtataatcaggtaccaagcgaggattttgagagaactccccaatcaccgaccttgcctccagccaaagtggccgcccccaacttatctcgtatgggagccatccccgtaatgattccagcacagtcaaaagacgggtctattgtgtag

SEQ ID NO: 116983 - DNA, 975 bp, Artificial Sequence
  derived and/or modified sequence
atggccctgctgctgtgcttcgtgctgctgtgcggcgtggtggactttgccaggagtctctcaataacaacccccgaggagatgattgaaaaagccaaaggcgaaactgcctacctcccgtgtaagttcacactttcgccggaggaccaggggccattggatatcgagtggctgatctcacctgccgataatcagaaggtggatcaggtgataattctgtacagcggcgataagatttacgatgactattacccagacctgaagggtagggtgcatttcacgagcaacgatctgaagagcggcgacgccagcattaacgtgacaaacctccagctgtccgacatcggcacgtaccagtgtaaagttaagaaagcccccggagtcgctaacaagaagatccatttggtggttctggtgaagccttcaggggccagatgctatgtcgacggctccgaggagatcggctctgatttcaagattaagtgcgagcctaaagaagggtcactccccctgcagtatgaatggcagaagttgtccgatagccagaagatgcccacatcatggctagcggcgagcaataaggccggacttatcgcaggagctatcatcggcaccctattggctcttgcccttattggtttaattatcttctgctgtagaaaaaagcgtagagaagagaaatatgagaaagaggtacatcatgacataagggaggacgtcccaccacccaagagccggaccagtacggcacgctcatacatcggatccaatcattcaagtcttgggtccatgtctccaagtaacatggaggggtatagtaaaactcagtacaaccaagtgccgtcagaagatttcgaacggactccacagagccctactctcccacccgctaaggtggctgcccccaacctgtcgcgaatgggtgcaatcccagtgatgattcctgcccaatccaaggatgggagcatcgtgtag

SEQ ID NO: 116984 - DNA, 1098 bp, Artificial Sequence
  derived and/or modified sequence
atggccctgttgctgtgctttgttctgctgtgcggcgtggtagacttcgcacggtctctgagcatcactacccccgaagaaatgatcgaaaaggccaagggtgagaccgcgtacttgccgtgtaagtttacgctcagccctgaggaccagggccctctcgatattgaatggctcatcagccctgcggataaccaaaaggtcgatcaggtgatcatcctctactccggagataagatttacgatgactactatcccgaccttaaagggcgagtccactttacttcaaacgacctcaaaagtggcgatgcttccattaacgtaacgaaccttcaactgtccgatattggtacctaccagtgcaaggtgaagaaggctcccggtgtggccaacaagaagatacatttagtggtcctcgtgaagccttccggcgctagatgctacgtggacggctctgaggaaattgggagcgactttaagatcaagtgtgaaccgaaggaggggtcgcttccacttcaatacgagtggcagaaacttagtgattctcagaaaatgccaaccagttggcttgccgagatgacttcaagtgtaatctccgtcaagaacgcctcttctgagtattccggaacctattcgtgtactgtacggaacagggtgggtagcgaccagtgcctgctgcgtttgaatgtcgtgccacctagcaataaggcagggctgatcgcaggcgctattattggcactcttctcgccctcgcgctgattgggttaatcatattttgttgtcgcaaaaaacgcagagaggaaaagtacgaaaaggaggtgcatcatgacatcagggaggacgtcccacctcctaaatctcgaacttctactgccaggagctatataggtagcaaccacagtagtctggggtctatgagcccatcaaatatggaaggttattcaaaaactcagtacaatcaggtccccagcgaggatttcgagcgcactccacagagtcccaccctccctccggcaaaagttgcagcgccaaacctgtctcggatgggggctatccccgtcatgattcctgcccagtctaaggacggatccatagtgtag

SEQ ID NO: 116985 - DNA, 975 bp, Artificial Sequence
  derived and/or modified sequence
atggccttgcttctatgttttgtgctgctgtgtggcgtcgtggatttcgctcgctcactttctataacaacccccgaggaaatgattgagaaggctaaaggagagacagcttacctgccttgtaaattcactctgtctcctgaggatcagggacctttagacattgagtggctgatctccccagcggacaaccagaaggtagatcaggtgatcatcctgtattcaggcgacaaaatctatgacgactactatcctgatcttaagggacgcgtgcattttacatccaatgatctgaaatccggagatgccagcataaatgtgactaacttacagttatctgatatcggaacctaccagtgcaaagttaaaaaagcacccggagttgccaacaaaaaaatccacttagtagtgctagtgaagccgagcggcgcaaggtgctacgttgatggcagtgaggagataggttctgattttaaaattaagtgcgagcctaaggaaggttcactgcctctgcagtatgagtggcaaaagctctccgacagccaaaagatgcctacatcttggctcgctgcatctaacaaggccggtcttatcgctggcgctattatcggaacgctcctcgcactggctttgattgggttgattatcttctgttgtcgtaaaaaaagaagggaggagaagtatgagaaggaggtgcaccatgacatcagggaggatgtccccccaccgaaaagccggacttccaccgcgaggtcatacatcgggagcaatcacagctccttgggtagtatgtcaccatcgaatatggagggatactccaagacccaatacaatcaggtaccctccgaagatttcgaaagaactccacaatcccccacactgcccccagccaaagtggcagcccctaatttgtcccggatgggcgctatccccgtcatgattccagcacagtctaaggacggatcaattgtttag

SEQ ID NO: 116986 - DNA, 6254 bp, Artificial Sequence
  derived and/or modified sequence
cagggctagaatagcctttctgtgcaagtggaaaaaacctcaggtatttcccaaatcggtagctgcagaggggctctatccctaccagagatggagaaaagccctctcgcgctttttatgtcagccagagcggctcgttaagagagcgaaggccaggggctgcacaggtcgcatcccgtgagcatgaggtcagagaacctgcccctggggcaaaccgcgaggggtgggacgggtgggtgcaggcggggcggagggtaggagccgccctagtggcggcccctgggagtgtcccgtgcctcgccttaaaggagggcgccaacgcaatttcagtatgtgggagacgggctgccccacccccgcgcgcaaaaccctggtttagcttaagggatggaggcggggacccctgcgcaggcttgcggcgtgggaggcggccgcccgcgacctacgacgccgcgcgccgggaggctgagagttcggcgccgggagggtcccggggacagaagagcgcctcgcccggttgccaaggcaaccccacgcggctggagaagccggcgctcgcagcccggcccgggccgctgccggaagtgacgcgagttcacctgccgagcgggggctgggaggaggggcggagggtgcagaggtgccgccgccgccgcgagccagtcgggagcgcgcgaggcgcggggagcctgggaccaggagcgagagccgcctacctgcagccgccgcccacggcacggcagccaccatggcgctcctgctgtgcttcgtgctcctgtgcggagtagtggatttcgccagaagtttgagtatcactactcctgaagagatgattgaaaaagccaaaggggaaactgcctatctgccatgcaaatttacgcttagtcccgaagaccagggaccgctggacatcgagtggctgatatcaccagctgataatcagaaggtggatcaagtgattattttatattctggagacaaaatttatgatgactactatccagatctgaaaggccgagtacattttacgagtaatgatctcaaatctggtgatgcatcaataaatgtaacgaatttacaactgtcagatattggcacatatcagtgcaaagtgaaaaaagctcctggtgttgcaaataagaagattcatctggtagttcttgttaagccttcaggtgcgagatgttacgttgatggatctgaagaaattggaagtgactttaagataaaatgtgaaccaaaagaaggttcacttccattacagtatgagtggcaaaaattgtctgactcacagaaaatgcccacttcatggttagcagaaatgacttcatctgttatatctgtaaaaaatgcctcttctgagtactctgggacatacagctgtacagtcagaaacagagtgggctctgatcagtgcctgttgcgtctaaacgttgtccctccttcaaataaagctggactaattgcaggagccattataggaactttgcttgctctagcgctcattggtcttatcatcttttgctgtcgtaaaaagcgcagagaagaaaaatatgaaaaggaagttcatcacgatatcagggaagatgtgccacctccaaagagccgtacgtccactgccagaagctacatcggcagtaatcattcatccctggggtccatgtctccttccaacatggaaggatattccaagactcagtataaccaagtaccaagtgaagactttgaacgcactcctcagagtccgactctcccacctgctaaggtagctgcccctaatctaagtcgaatgggtgcgattcctgtgatgattccagcacagagcaaggatgggtctatagtatagagcctccatatgtctcatctgtgctctccgtgttcctttcctttttttgatatatgaaaacctattctggtctaaattgtgttactagcctcaaaatacatcaaaaaataagttaatcaggaactgtacggaatatatttttaaaaatttttgtttggttatatcgaaatagttacaggcactaaagttagtaaagaaaagtttaccatctgaaaaagctggattttctttaagaggttgattataaagttttctaaatttatcagtacctaagtaagatgtagcgctttgaatatgaaatcataggtgaagacatgggtgaacttacttgcataccaagttgatacttgaataaccatctgaaagtggtacttgatcatttttaccattatttttaggatgtgtatttcatttatttatggcccaccagtctcccccaaattagtacagaaatatccatgacaaaattacttacgtatgtttgtacttggttttacagctcctttgaaaactctgtgtttggaatatctctaaaaacatagaaaacactacagtggtttagaaattactaattttacttctaagtcattcataaaccttgtctatgaaatgacttcttaaatatttagttgatagactgctacaggtaatagggacttagcaagctcttttatatgctaaaggagcatctatcagattaagttagaacatttgctgtcagccacatattgagatgacactaggtgcaatagcagggatagattttgttggtgagtagtctcatgccttgagatctgtggtggtcttcaaaatggtggccagccagatcaaggatgtagtatctcatagttcccaggtgatatttttcttattagaaaaatattataactcatttgttgtttgacacttatagattgaaatttcctaatttattctaaattttaagtggttctttggttccagtgctttatgttgttgttgtttttggatggtgttacatattatatgttctagaaacatgtaatcctaaatttaccctcttgaatataatccctggatgatattttttatcataaatgcagaataatcaaatacattttaagcaagttaagtgtcctccatcaattctgtattccagacttgggaggatgtacagttgctgttgtgtgatcaaacatgtctctgtgtagttccagcaaatcaagctgagctttgaaaaagtttgtcttagttttgtgaaggtgatttattcttaaaaaaaaaaaagaaagaaaaagaaaaaaagataagaaggaggagtaaagggactactcctccttgccaaatgtgctaaatatcattttaggagaagaaagtgggtttattgtatttcccttaagattgtgagggagtgtggatacagtagaatgagccaacagtttctttataataaatacggtctgcaataaattatttcactagctctaaaacctttccctagattttagtagggagttggtttctgttaatatctttgggtgctgtggtggtaaatgctatattatgaacggtggcatgtatttacagttagagtattgtgtgtacactttttaatggtaaacttaagctgaatgtgtaatggatttgtgtatagttttacatatttggaagcattttaaaaacaggttttaaccttatgtaaaattacttttatactcgtgttaacattttcatctgtgccttttggtaatttaatttctattatgaatttctggtgcctatgagctagctatcacctacctgaaaggtgcttagaggtgaaggtactgtttctaaaaacacatcactgtgatacctttctatcctcacattttcaagcttgcctcttttctgttctttgtggatataacttaagcaattgtgttattcataaaggtttagaaatttcaatattcccaacactctatgtttctgattttataacagtagccatttttgaaagtcagatgtttggcctgttttatatgaataaagtttatttataaaatattataaaaaataagtaaataaacagaacattaataataaagttttggttcttcctattcctgactttcatataatgaaaattatcctattgatctaagtagaagttatcatagaaagtggacacgtataagactttccttcctttttttttttaataacatatgaggaacaagacttctcttcccatatacttcatattttagaggacattgttttaaaggcttatgtctcactgtaaaattctgtcagccaaatagtaccaatacgttttcaagtagttctcactgataatttagttgaaccagagatcaaatatttgctcccgaattactactggtaatcaagtagttgaacaaaaaattactaaagcatttccgttagatcagtcaaggacagtactgcatctttttttttttttttttttttaagacggagtctcggtctgtcacccaggctggagtgcagtggcgggatctcggctcactgcaagctccgcctcccaggttcacgccattctcctgcctcagcctcccgagcagctgggactacaggctcccatcaccacgctcggctaagtttttgtaattttagtagagacagggtttcaccgtgttagccaggatggtctcgatctcctgacctcgtgatctgcctgcctcggcctcccaaagtgctgggattacaggcgtgaaccactgcacccggcccagtactgcatcttaacagcaaagccattttattctactttataactgagagacttgataccatccatctctttaggttacagaggataatttgaagagaaatgttactgtagaatatatagttctgtactttttttttttttttttaagagatagggtttcactattgctcaggctggtctcaaactgctgggctcaggagatcctcctgccttggcctcccaaattgctgggattacaggtgtgagccgcagcatccagccagttctgtactttgaatatggagtagtttacagctatttttttttcttactggtaatcttaactaatatgattcccttgttagagagcctctcactcccccacccccaaaaatgtctactattcatgacagtaaccaattattctggacaaattgcttctttttaatttgagctatctgccatggactttctaaaatggaaacacagcctgagtgtatcttagggagagtttgattgaaaaaatccaaatcactatccatatagatcatggatataaagagatacctgatttttattaaaaagatactttttcaaatttaagagttaatcttggaaatttggaacaagtaaaggggcaagtaaaccttttgatgaaatataaaaggaactcattgcatgaagttgactatcaaattctgtgatgtgtggcttcttaaaaatattctcagtgtcttttgtgtgcgtgcagcatgtacatttgatgttatgtgaatgttgagttttttcttctaattttcacttcagcagtgtttagggctttcagatgccttattccagtgtgaacagaaaaagttcatattttatgtggttaatgctttgatgtgtcacataaagagtagtttgtagaaaatgttggcacaattttaacttcttagtggcttgtgacattatatattatatatatatatgtacatatatctttataacattcctgtgtttagtagtgtaaatgttctgggcaagttttaatattttgaatgcctttggatattccagcaataaaggcatcatgttctgcaataggatttcttactcatttacctattttaacactaaaatagaccacaactgagcacaaattccttttataaatgttatagaagcagggaagaataataaacacatttgtgaattgtggttcagtttatttatctttagggaaggctgatcatttatcttatagcagataaccccagcctcttattcattatggttaacttttataatttatcttattttataatttaagaatatagtacatatcagttgggtttggttttggtcatcgagactaaaagctccatcaaaacagaactttgtgttttctgctaacttatttaatgacacaagttttaagagaaccacaattcattgattcacttattcttttccctaattgtgaattttagtgataaatacacctgtactactgaggaaaatattctgacacttcacgtgtgcaaagtatagaactgacagtgtcagtttcagattttgtatgtacgatttctggcttatatatccaatggtgcagattttgaaatttgtaagaacaaaatttgttaagaaaaacaacttgctctagttttgtgaccttgtgtacttttgaaataaaatcaagaaagcagt

SEQ ID NO: 116987 - DNA, 975 bp, Artificial Sequence
  derived and/or modified sequence
atggcgctcctgctgtgcttcgtgctcctgtgcggagtagtggatttcgccagaagtttgagtatcactactcctgaagagatgattgaaaaagccaaaggggaaactgcctatctgccatgcaaatttacgcttagtcccgaagaccagggaccgctggacatcgagtggctgatatcaccagctgataatcagaaggtggatcaagtgattattttatattctggagacaaaatttatgatgactactatccagatctgaaaggccgagtacattttacgagtaatgatctcaaatctggtgatgcatcaataaatgtaacgaatttacaactgtcagatattggcacatatcagtgcaaagtgaaaaaagctcctggtgttgcaaataagaagattcatctggtagttcttgttaagccttcaggtgcgagatgttacgttgatggatctgaagaaattggaagtgactttaagataaaatgtgaaccaaaagaaggttcacttccattacagtatgagtggcaaaaattgtctgactcacagaaaatgcccacttcatggttagcagcttcaaataaagctggactaattgcaggagccattataggaactttgcttgctctagcgctcattggtcttatcatcttttgctgtcgtaaaaagcgcagagaagaaaaatatgaaaaggaagttcatcacgatatcagggaagatgtgccacctccaaagagccgtacgtccactgccagaagctacatcggcagtaatcattcatccctggggtccatgtctccttccaacatggaaggatattccaagactcagtataaccaagtaccaagtgaagactttgaacgcactcctcagagtccgactctcccacctgctaaggtagctgcccctaatctaagtcgaatgggtgcgattcctgtgatgattccagcacagagcaaggatgggtctatagtatag

SEQ ID NO: 116988 - DNA, 1098 bp, Artificial Sequence
  derived and/or modified sequence
atggccctgctgctgtgcttcgtgctgctgtgcggcgtggtggacttcgccagaagcctgagcatcaccacccccgaggagatgatcgagaaggccaagggcgagaccgcctacctgccctgcaagttcaccctgagccccgaggaccagggccccctggacatcgagtggctgatcagccccgccgacaaccagaaggtggaccaggtgatcatcctgtacagcggcgacaagatctacgacgactactaccccgacctgaagggcagagtgcacttcaccagcaacgacctgaagagcggcgacgccagcatcaacgtgaccaacctgcagctgagcgacatcggcacctaccagtgcaaggtgaagaaggcccccggcgtggccaacaagaagatccacctggtggtgctggtgaagcccagcggcgccagatgctacgtggacggcagcgaggagatcggcagcgacttcaagatcaagtgcgagcccaaggagggcagcctgcccctgcagtacgagtggcagaagctgagcgacagccagaagatgcccaccagctggctggccgagatgaccagcagcgtgatcagcgtgaagaacgccagcagcgagtacagcggcacctacagctgcaccgtgagaaacagagtgggcagcgaccagtgcctgctgagactgaacgtggtgccccccagcaacaaggccggcctgatcgccggcgccatcatcggcaccctgctggccctggccctgatcggcctgatcatcttctgctgcagaaagaagagaagagaggagaagtacgagaaggaggtgcaccacgacatcagagaggacgtgcccccccccaagagcagaaccagcaccgccagaagctacatcggcagcaaccacagcagcctgggcagcatgagccccagcaacatggagggctacagcaagacccagtacaaccaggtgcccagcgaggacttcgagagaaccccccagagccccaccctgccccccgccaaggtggccgcccccaacctgagcagaatgggcgccatccccgtgatgatccccgcccagagcaaggacggcagcatcgtgtag

SEQ ID NO: 116989 - DNA, 975 bp, Artificial Sequence
  derived and/or modified sequence
atggccctgctgctgtgcttcgtgctgctgtgcggcgtggtggacttcgccagaagcctgagcatcaccacccccgaggagatgatcgagaaggccaagggcgagaccgcctacctgccctgcaagttcaccctgagccccgaggaccagggccccctggacatcgagtggctgatcagccccgccgacaaccagaaggtggaccaggtgatcatcctgtacagcggcgacaagatctacgacgactactaccccgacctgaagggcagagtgcacttcaccagcaacgacctgaagagcggcgacgccagcatcaacgtgaccaacctgcagctgagcgacatcggcacctaccagtgcaaggtgaagaaggcccccggcgtggccaacaagaagatccacctggtggtgctggtgaagcccagcggcgccagatgctacgtggacggcagcgaggagatcggcagcgacttcaagatcaagtgcgagcccaaggagggcagcctgcccctgcagtacgagtggcagaagctgagcgacagccagaagatgcccaccagctggctggccgccagcaacaaggccggcctgatcgccggcgccatcatcggcaccctgctggccctggccctgatcggcctgatcatcttctgctgcagaaagaagagaagagaggagaagtacgagaaggaggtgcaccacgacatcagagaggacgtgcccccccccaagagcagaaccagcaccgccagaagctacatcggcagcaaccacagcagcctgggcagcatgagccccagcaacatggagggctacagcaagacccagtacaaccaggtgcccagcgaggacttcgagagaaccccccagagccccaccctgccccccgccaaggtggccgcccccaacctgagcagaatgggcgccatccccgtgatgatccccgcccagagcaaggacggcagcatcgtgtag

SEQ ID NO: 116990 - protein, 348 aa, Artificial Sequence
  derived and/or modified sequence
MSLPRFQRVNFGPYDNYIPVSELSKKSWNQQHFALLFPKPQRPGTKRRSKPSQIRDNTVSIIDEEQLRGDRRQPLWMYRSLMRISERPSVYLAARRQPLKPTRTVEVDSKAAEIGKKGEDKTTQKDTTDSESELKQGKKDSKKGKDIEKGKEEKLDAKKDSKKGKKDAEKGKDSATESEDEKGGAKKDNKKDKKDSNKGKDSATESEGEKGGTEKDSKKGKKDSKKGKDSAIELQAVKADEKKDEDGKKDANKGDESKDAKKDAKEIKKGKKDKKKPSSTDSDSKDDVKKESKKDATKDAKKVAKKDTEKESADSKKDAKKNAKKDAKKDAKKNAKKDEKKDAKKKGK

SEQ ID NO: 116991 - DNA, 1047 bp, Artificial Sequence
  derived and/or modified sequence
atgagcctgcccagattccagagagtgaacttcggcccctacgacaactacatccccgtgagcgagctgagcaagaagagctggaaccagcagcacttcgccctgctgttccccaagccccagagacccggcaccaagagaagaagcaagcccagccagatcagagacaacaccgtgagcatcatcgacgaggagcagctgagaggcgacagaagacagcccctgtggatgtacagaagcctgatgagaatcagcgagagacccagcgtgtacctggccgccagaagacagcccctgaagcccaccagaaccgtggaggtggacagcaaggccgccgagatcggcaagaagggcgaggacaagaccacccagaaggacaccaccgacagcgagagcgagctgaagcagggcaagaaggacagcaagaagggcaaggacatcgagaagggcaaggaggagaagctggacgccaagaaggacagcaagaagggcaagaaggacgccgagaagggcaaggacagcgccaccgagagcgaggacgagaagggcggcgccaagaaggacaacaagaaggacaagaaggacagcaacaagggcaaggacagcgccaccgagagcgagggcgagaagggcggcaccgagaaggacagcaagaagggcaagaaggacagcaagaagggcaaggacagcgccatcgagctgcaggccgtgaaggccgacgagaagaaggacgaggacggcaagaaggacgccaacaagggcgacgagagcaaggacgccaagaaggacgccaaggagatcaagaagggcaagaaggacaagaagaagcccagcagcaccgacagcgacagcaaggacgacgtgaagaaggagagcaagaaggacgccaccaaggacgccaagaaggtggccaagaaggacaccgagaaggagagcgccgacagcaagaaggacgccaagaagaacgccaagaaggacgccaagaaggacgccaagaagaacgccaagaaggacgagaagaaggacgccaagaagaagggcaagtag

SEQ ID NO: 116992 - DNA, 1047 bp, Artificial Sequence
  derived and/or modified sequence
atgtcgctgcctaggttccagcgggtaaatttcgggccctatgacaactatattcctgtatccgaactttccaagaaaagttggaatcaacagcatttcgccctgctgttccccaaaccacagcgccccggcacaaaaagaaggagcaaacccagtcagattagggacaatacagtctccatcatagatgaagagcaactgcggggcgaccggcgtcagcccctctggatgtacaggtccctgatgcggattagtgagcgcccatctgtgtatctcgccgcacgccggcagcctctcaaaccgacacggaccgtcgaggtggactctaaagccgcagaaattggaaagaagggcgaagataagacaacacagaaagatacgaccgacagcgagtccgaacttaaacagggtaaaaaggattccaagaaaggaaaggacattgagaaggggaaggaagagaagttagacgccaagaaggattctaaaaaggggaaaaaggacgcggagaagggcaaggacagcgccactgaatcagaggatgagaagggcggcgcaaagaaggacaataaaaaggataaaaaagatagcaacaaaggcaaagatagcgccactgaatcggaaggagagaaaggtggcacagaaaaagattcaaagaaaggaaaaaaggactctaagaaggggaaagactcggcaatcgaattacaggccgtcaaagctgatgaaaagaaagatgaggatgggaaaaaggacgcgaataagggggatgaatccaaggatgcaaagaaggacgccaaagagattaaaaaggggaagaaagacaagaaaaagccaagctcaacggattctgactccaaggatgacgtgaagaaggaaagtaagaaagatgctaccaaagacgccaaaaaagtggccaagaaagacaccgagaaggagtctgccgacagcaaaaaggatgctaagaagaatgcaaaaaaagatgccaagaaagacgcaaaaaaaaatgccaaaaaggacgaaaaaaaggatgctaaaaagaagggcaagtag

SEQ ID NO: 116993 - DNA, 1047 bp, Artificial Sequence
  derived and/or modified sequence
atgagcttgcctcgctttcaaagagtgaattttgggccctacgataattacatcccagtaagcgaactgtccaagaagagttggaaccagcagcactttgccctcctgtttcctaagcctcaacgacctggtacaaaaagacggtcaaagcctagtcaaattagagataacaccgtcagtattattgacgaagagcagttgcgcggggacaggcggcagcctctctggatgtacaggagtctgatgcgcattagcgaaagaccttccgtttatctggccgcaagacgccaacccctaaaacctacgcgaactgtcgaggtcgactcaaaggctgccgagatcgggaagaaaggagaagataaaaccacacagaaggacacgacagattctgagtcggaattgaaacaggggaagaaagactcaaaaaagggaaaggatatcgagaaaggaaaagaggaaaaactggatgccaagaaagattcaaagaaaggaaaaaaagacgctgagaagggcaaggactccgccacagagagcgaagacgaaaagggcggagctaagaaagacaacaagaaggacaaaaaggactcaaacaaaggcaaagattctgcgacagagtccgagggcgaaaagggagggacagagaaagactctaaaaaaggaaaaaaagactccaaaaaagggaaggatagtgcgatagaactgcaggcggttaaggctgacgagaagaaggacgaagacggaaagaaagatgcaaataaaggggacgaatctaaagacgccaagaaggacgccaaggaaataaagaaaggaaagaaagacaagaaaaaaccctcatccaccgacagtgactcaaaagacgatgtcaagaaagagagcaagaaggatgctaccaaagacgctaagaaagtcgcgaagaaggatactgaaaaagagagtgctgatagcaagaaggacgcgaaaaagaatgccaaaaaggacgccaaaaaagatgccaagaaaaacgccaaaaaggacgaaaaaaaagacgccaaaaagaagggcaaatag

SEQ ID NO: 116994 - DNA, 2171 bp, Artificial Sequence
  derived and/or modified sequence
gatgtcacctttcaacatcaccagtttgaacttacaatacttaagtcctggcaagtcataagtggggaaaatgtctctcccaagattccaaagagtaaactttgggccatatgataattacattccagtcagtgaattaagcaaaaaatcatggaatcagcaacactttgccctgttatttcccaaaccacaacggccaggaaccaaaaggagatcaaaaccttctcaaatacgggacaacacggtttctataattgatgaagaacaattaagaggagatcgtagacaaccattatggatgtaccgttctttaatgagaatttctgagagaccatctgtttatttagctgccaggaggcagcctctcaaaccaactcgtactgtcgaggtggattctaaagcagcagaaattggtaagaaaggtgaagacaagacaacacagaaggacacaacagattcggaatcagaattaaaacaaggaaaaaaagattcaaagaaaggcaaggatatagagaaaggaaaagaagaaaagctagatgcaaagaaagatagcaaaaaaggtaaaaaggatgcagagaagggcaaagactcagcaacagaatctgaagatgaaaaaggaggtgcaaagaaagataacaaaaaagataaaaaggattcaaacaaaggcaaagactcggcaacagaatctgaaggtgaaaaaggaggtacagagaaagatagcaaaaaaggtaaaaaggattcaaagaagggcaaggattcagccatagaattacaagctgtaaaagcagatgaaaagaaggatgaggatggaaaaaaagatgcaaacaaaggtgatgaatcgaaggatgccaagaaagatgcaaaggagattaaaaaaggtaagaaagataagaagaagcccagtagtacagacagtgactcaaaggatgatgtcaagaaagagtctaagaaggacgccacgaaagatgccaagaaagttgccaagaaagatactgagaaagaatctgctgattcaaagaaggatgcaaagaaaaatgctaagaaggatgcaaagaaggatgcaaagaagaatgcaaagaaggatgaaaagaaggatgcaaagaagaagggcaagtaggccttggataagaatttgaaccgaaagaataattcaaaagcatatttgatgaaacaatagtggtagtctgcagctgaatttgtgagaaaacaagaggcctcaaagaattaaataatttttaaaaggtggtaaagaaggatacaaaggagaactcagcagagatttataaaaatatataagaaagatgttaagaaaaattaaggggggatccattgaaagacttgaagaatacatatacttatattcggggatatgaaggattcaatgaatgatctctagaaagatttaaagaagaatattcagataaggatgttgaagataatgacactaaatctatggacacacacacacacacacacacacacacacacacacacacacacacacacacacagtttaatgaaggcttaaagaatccaaggagacagatgttgtatctatagatttaaaataatctcaagctgcatccacagatacaaaaaaatataggagccatgaaatgaagttaaacaccttgtagaaagcctactttcaagtaaatatagcattcctttggcaaaaagaaaaaaaaagtaaaagaaaagaaaaaaaatgtattaccacccgatgagcctacatctttctttctgaagtttaaacaaccacagtcatgtttatggttgttggatgtgccacttccaatccaaaagaagcacacttgtctcgctctgttgccctggctggagttcagtgacatgatctcaggcttactacagcctccaccttcaggttcaagtgattctcctgcctcagcctctctggtagctgggattacagggaaggaaaatagctggcatttcttgctggagaaagttatcacaagtggaaaggttaccctagaaacaaaagatgactaccgtgaggatggattggacattacaccacactggaaaagtgaaacatctcattcagttggtgatcttcctgtcatgaaagttgcttgacagctctaattacgaattgaacacattaaacacctggtgaaattatcaattaaaaacatctagtcaccata

SEQ ID NO: 116995 - DNA, 1047 bp, Artificial Sequence
  derived and/or modified sequence
atgagcctgccccgcttccagagggtgaactttggcccctatgacaactacatccctgtgtctgagctgagcaagaagtcctggaaccagcagcactttgccctgctcttccccaagccccagaggcctggcaccaagagaagaagcaagcccagccagatccgggacaacacagtgtccatcattgatgaggagcagctgcggggggaccggcggcagcccctgtggatgtaccgcagcctgatgaggatcagcgagcggcccagcgtgtacctggccgcccggcggcagcccctgaagcccaccaggacagtggaggtggacagcaaggctgctgagatcggcaagaagggggaggacaagaccacccagaaggacaccacagacagcgagagcgagctgaagcagggcaagaaggacagcaagaagggcaaggacatcgagaagggcaaggaggagaagctggatgccaagaaggacagcaagaagggcaagaaggatgctgagaagggcaaggacagcgccacagaaagtgaagatgagaagggcggggccaagaaggacaacaagaaggacaagaaggacagcaacaagggcaaggacagcgccacagagagcgagggggagaagggcggcacagagaaggacagcaagaagggcaagaaggacagcaagaagggcaaggacagcgccatcgagctgcaggccgtgaaggcagatgagaagaaggatgaagatggcaagaaggatgccaacaagggagatgagagcaaggatgccaagaaggatgccaaggagatcaagaagggcaagaaggacaagaagaagcccagcagcacagacagcgacagcaaggatgatgtgaagaaggagagcaagaaggatgccaccaaggatgccaagaaggtggccaagaaggacacagagaaggagagcgctgacagcaagaaggatgccaagaagaatgccaagaaggatgccaagaaggatgccaagaagaatgccaagaaggatgagaagaaggatgccaagaagaagggcaagtag

SEQ ID NO: 116996 - DNA, 1047 bp, Artificial Sequence
  derived and/or modified sequence
atgagcctgccccggttccagcgggtgaacttcggcccctacgacaattacataccggtgtctgagctctcaaaaaagtcatggaatcagcagcattttgcgctgctgtttcccaagccccagcggcccggcaccaaacgcagatctaaaccttctcaaatccgcgacaacacagtttctattatcgacgaggagcaactgcgcggcgacagacgtcagcccttatggatgtatcgctcattgatgcgaatttccgaacgcccctctgtgtacctagcagcccggagacagcctctcaaaccgacacgcacagtggaagtcgattcgaaggctgcagaaattggcaaaaagggtgaggacaaaacgacacagaaagatacaacggactccgagtcggaactgaaacagggcaaaaaagactccaaaaaaggtaaggacattgagaaaggaaaagaagagaagcttgatgctaagaaagattccaaaaagggaaagaaggacgctgagaaaggcaaggattccgcaactgaatctgaggacgaaaagggtggcgccaaaaaagataacaaaaaagacaaaaaagacagcaataagggtaaggactcagccacagagtccgagggggagaagggggggactgagaaggactccaagaagggaaaaaaagatagcaagaaaggcaaagattccgcaatcgagctacaggctgtcaaagctgacgagaaaaaggatgaagatgggaaaaaggatgccaacaagggagacgaatcgaaagatgccaagaaggatgctaaggagattaaaaaagggaagaaagacaagaagaaacctagctctaccgactcggatagcaaggacgacgttaaaaaggagtctaaaaaagacgcaacaaaagacgcaaagaaagttgccaagaaggacacagaaaaagagtcggccgactccaagaaagacgccaagaagaacgccaaaaaggatgcaaagaaggacgctaagaaaaatgcaaaaaaggatgagaaaaaggatgccaagaagaagggcaaatag

SEQ ID NO: 116997 - DNA, 1047 bp, Artificial Sequence
  derived and/or modified sequence
atgagcctgccccggttccagcgggtgaacttcggcccctacgacaactacattcctgtgtccgaactctcaaagaagtcatggaatcagcagcactttgcgctcttgttccctaagccacagcgccctggaacaaagcggcggagcaagcctagccagatacgcgataacaccgtctctattattgatgaagagcagctgcgaggagacaggagacagcccttgtggatgtatagatctctgatgcgtatcagtgaacgcccttccgtctatctggctgcacgacgccagcccttgaaacccaccaggacggtggaagttgattccaaggcagccgaaatcggcaaaaagggagaggacaaaaccacccagaaggataccacagattcggaatccgagttgaaacagggcaagaaggattcaaaaaaagggaaagacattgagaaaggcaaggaggaaaagctggatgccaaaaaggatagcaaaaaaggcaagaaagacgcggaaaaaggtaaagactctgccacagagtccgaggatgaaaagggaggggccaagaaagataataagaaagacaaaaaagactccaataagggaaaagacagtgctactgagtccgaaggtgagaagggcggcaccgaaaaggactccaagaaggggaagaaagactccaaaaaaggcaaggatagtgccattgaactccaggcagtgaaggccgatgaaaaaaaggatgaagacggaaaaaaggatgccaataagggcgacgaatcaaaggatgccaagaaggacgctaaggagatcaaaaagggcaaaaaggataaaaaaaaacctagtagtactgattccgacagtaaggacgacgtcaaaaaggaaagcaagaaggatgcgaccaaagacgcaaaaaaggtggcaaagaaagacaccgagaaagagtcagcggactcgaagaaggacgcgaaaaagaacgcaaagaaagacgccaaaaaggatgcaaagaagaatgcaaaaaaggacgagaaaaaagatgccaaaaagaaaggcaagtag

SEQ ID NO: 116998 - DNA, 1047 bp, Artificial Sequence
  derived and/or modified sequence
atgtcgttaccccgattccaacgcgtgaacttcggaccgtatgacaattacattcccgtgagcgagctgtccaaaaaatcatggaaccagcaacactttgcactcctctttcccaaaccacaaagacctggcacaaaacgccgatccaagcccagccaaatccgcgataacaccgtgtcaatcattgacgaggaacagctgagaggggatcgcaggcagccattgtggatgtatcgtagcctgatgcgcatctcagagcgtccttctgtgtacttggccgcaaggcgccagcctctaaagccaacaaggactgtagaggtggattccaaggcggctgagatagggaaaaaaggagaagataaaaccacacagaaggatacgacagactcagagtctgaactgaagcagggaaaaaaggattcaaagaagggcaaggacatcgagaaagggaaagaagagaaactggatgcgaaaaaggattctaagaagggcaagaaagacgccgagaaaggaaaggactctgccactgagtcagaggacgagaaaggcggagccaaaaaagacaataaaaaggataagaaagatagcaataagggaaaagactctgccaccgaaagcgaaggagagaaaggcggaacagaaaaggactcaaagaaggggaagaaggactccaaaaaaggcaaagatagtgccatcgaattacaagccgtaaaagctgacgagaaaaaagatgaggacggcaagaaggacgctaataagggcgatgaaagcaaggacgcaaaaaaagatgccaaggagataaaaaagggcaagaaagacaaaaaaaagccgtcgagtacggattcagacagtaaagatgatgtcaagaaagaatcaaagaaagacgccacgaaagatgcgaaaaaagttgccaagaaagacactgagaaggaatcggccgacagcaagaaggatgccaaaaaaaatgccaagaaggatgccaagaaagatgcaaagaaaaatgcaaaaaaggacgaaaaaaaggacgccaagaaaaagggcaagtag

SEQ ID NO: 116999 - DNA, 1047 bp, Artificial Sequence
  derived and/or modified sequence
atgtcgctaccgaggtttcagcgcgttaactttggcccttatgacaactacatacccgtctcagagctgtccaagaaaagctggaaccagcagcatttcgccctgctctttcctaagccgcagcgtcccggaaccaaacgacgctccaaacccagccagattagagacaatacggtgtcaattatagatgaggagcaactgcggggagatcgcagacagcccttatggatgtataggtcgttgatgcgtatatccgaacgcccatctgtgtacctggccgcaaggcgccagccgcttaaaccaactaggaccgtggaggtcgactccaaagcagcagagatcggcaaaaaaggtgaggataagactacccagaaggataccactgactcggaatctgagttgaagcagggaaagaaagattctaagaagggcaaggatatcgaaaagggtaaagaagagaagctcgacgccaagaaagattcgaaaaaaggcaagaaggatgctgaaaaaggcaaggactcagccacagagagcgaggatgagaagggtggcgcaaaaaaagacaacaagaaggacaaaaaggattctaacaagggcaaagattcagcgaccgagagtgaaggagaaaagggcggaaccgagaaggatagtaagaagggcaagaaggacagcaagaaaggtaaggatagtgcaattgaactccaggctgtcaaagcagacgagaagaaggacgaggatggaaagaaagacgctaataagggggacgaaagtaaggatgccaagaaggacgcaaaagaaatcaaaaaagggaagaaggacaaaaagaaaccgagttcaactgattcggacagtaaggatgatgtcaagaaagaatccaagaaggatgcgacgaaggacgcgaaaaaggtggcgaaaaaggacaccgagaaggagtccgccgactccaagaaagacgccaaaaagaatgcaaaaaaagacgcgaagaaggatgccaagaagaacgccaagaaggacgaaaaaaaagatgctaagaaaaaaggcaagtag

SEQ ID NO: 117000 - DNA, 2053 bp, Artificial Sequence
  derived and/or modified sequence
acaatacttaagtcctggcaagtcataagtggggaaaatgtctctcccaagattccaaagagtaaactttgggccatatgataattacattccagtcagtgaattaagcaaaaaatcatggaatcagcaacactttgccctgttatttcccaaaccacaacggccaggaaccaaaaggagatcaaaaccttctcaaatacgggacaacacggtttctataattgatgaagaacaattaagaggagatcgtagacaaccattatggatgtaccgttctttaatgagaatttctgagagaccatctgtttatttagctgccaggaggcagcctctcaaaccaactcgtactgtcgaggtggattctaaagcagcagaaattggtaagaaaggtgaagacaagacaacacagaaggacacaacagattcggaatcagaattaaaacaaggaaaaaaagattcaaagaaaggcaaggatatagagaaaggaaaagaagaaaagctagatgcaaagaaagatagcaaaaaaggtaaaaaggatgcagagaagggcaaagactcagcaacagaatctgaagatgaaaaaggaggtgcaaagaaagataacaaaaaagataaaaaggattcaaacaaaggcaaagactcggcaacagaatctgaaggtgaaaaaggaggtacagagaaagatagcaaaaaaggtaaaaaggattcaaagaagggcaaggattcagccatagaattacaagctgtaaaagcagatgaaaagaaggatgaggatggaaaaaaagatgcaaacaaaggtgatgaatcgaaggatgccaagaaagatgcaaaggagattaaaaaaggtaagaaagataagaagaagcccagtagtacagacagtgactcaaaggatgatgtcaagaaagagtctaagaaggacgccacgaaagatgccaagaaagttgccaagaaagatactgagaaagaatctgctgattcaaagaaggatgcaaagaaaaatgctaagaaggatgcaaagaaggatgcaaagaagaatgcaaagaaggatgaaaagaaggatgcaaagaagaagggcaagtaggccttggataagaatttgaaccgaaagaataattcaaaagcatatttgatgaaacaatagtggtagtctgcagctgaatttgtgagaaaacaagaggcctcaaagaattaaataatttttaaaaggtggtaaagaaggatacaaaggagaactcagcagagatttataaaaatatataagaaagatgttaagaaaaattaaggggggatccattgaaagacttgaagaatacatatacttatattcggggatatgaaggattcaatgaatgatctctagaaagatttaaagaagaatattcagataaggatgttgaagataatgacactaaatctatggacacacacacacacacacacacacacacacacacacacacacacacacacacacagtttaatgaaggcttaaagaatccaaggagacagatgttgtatctatagatttaaaataatctcaagctgcatccacagatacaaaaaaatataggagccatgaaatgaagttaaacaccttgtagaaagcctactttcaagtaaatatagcattcctttggcaaaaagaaaaaaaaagtaaaagaaaagaaaaaaaatgtattaccacccgatgagcctacatctttctttctgaagtttaaacaaccacagtcatgtttatggttgttggatgtgccacttccaatccaaaagaagcacacttgatctactacagaatttaagaaggcagttgttctattcataattgctcacaatcagcctctcctcctactactgttcctactctctataccctttgtgtctgctcagactaccgtgaggatggattggacattacaccacactggaaaagtgaaacatctcattcagttggtgatcttcctgtcatgaaagttgcttgacagctctaattacgaattgaacacattaaacacctggtgaaattatcaattaaaaacatctagtcaccata

SEQ ID NO: 117001 - protein, 770 aa, Artificial Sequence
  derived and/or modified sequence
MSNEVETSATNGQPDQQAAPKAPSKKEKKKGPEKTDEYLLARFKGDGVKYKAKLIGIDDVPDARGDKMSQDSMMKLKGMAAAGRSQGQHKQRIWVNISLSGIKIIDEKTGVIEHEHPVNKISFIARDVTDNRAFGYVCGGEGQHQFFAIKTGQQAEPLVVDLKDLFQVIYNVKKKEEEKKKIEEASKAVENGSEALMILDDQTNKLKSGVDQMDLFGDMSTPPDLNSPTESKDILLVDLNSEIDTNQNSLRENPFLTNGITSCSLPRPTPQASFLPENAFSANLNFFPTPNPDPFRDDPFTQPDQSTPSSFDSLKSPDQKKENSSSSSTPLSNGPLNGDVDYFGQQFDQISNRTGKQEAQAGPWPFSSSQTQPAVRTQNGVSEREQNGFSVKSSPNPFVGSPPKGLSIQNGVKQDLESSVQSSPHDSIAIIPPPQSTKPGRGRRTAKSSANDLLASDIFAPPVSEPSGQASPTGQPTALQPNPLDLFKTSAPAPVGPLVGLGGVTVTLPQAGPWNTASLVFNQSPSMAPGAMMGGQPSGFSQPVIFGTSPAVSGWNQPSPFAASTPPPVPVVWGPSASVAPNAWSTTSPLGNPFQSNIFPAPAVSTQPPSMHSSLLVTPPQPPPRAGPPKDISSDAFTALDPLGDKEIKDVKEMFKDFQLRQPPAVPARKGEQTSSGTLSAFASYFNSKVGIPQENADHDDFDANQLLNKINEPPKPAPRQVSLPVTKSTDNAFENPFFKDSFGSSQASVASSQPVSSEMYRDPFGNPFA

SEQ ID NO: 117002 - protein, 552 aa, Artificial Sequence
  derived and/or modified sequence
MSNEVETSATNGQPDQQAAPKAPSKKEKKKGPEKTDEYLLARFKGDGVKYKAKLIGIDDVPDARGDKMSQDSMMKLKGMAAAGRSQGQHKQRIWVNISLSGIKIIDEKTGVIEHEHPVNKISFIARDVTDNRAFGYVCGGEGQHQFFAIKTGQQAEPLVVDLKDLFQVIYNVKKKEEEKKKIEEASKAVENGSEALMILDDQTNKLKSGVDQMDLFGDMSTPPDLNSPTSSANDLLASDIFAPPVSEPSGQASPTGQPTALQPNPLDLFKTSAPAPVGPLVGLGGVTVTLPQAGPWNTASLVFNQSPSMAPGAMMGGQPSGFSQPVIFGTSPAVSGWNQPSPFAASTPPPVPVVWGPSASVAPNAWSTTSPLGNPFQSNIFPAPAVSTQPPSMHSSLLVTPPQPPPRAGPPKDISSDAFTALDPLGDKEIKDVKEMFKDFQLRQPPAVPARKGEQTSSGTLSAFASYFNSKVGIPQENADHDDFDANQLLNKINEPPKPAPRQVSLPVTKSTDNAFENPFFKDSFGSSQASVASSQPVSSEMYRDPFGNPFA

SEQ ID NO: 117003 - DNA, 2313 bp, Artificial Sequence
  derived and/or modified sequence
atgtccaatgaggtggaaacctccgccactaatgggcagcccgaccagcaggccgccccgaaagcaccctctaagaaagagaaaaagaagggaccggaaaagaccgacgaatatctcctggctcgattcaagggagacggtgtcaagtacaaagcgaaattgataggcatcgatgacgtgccggatgctcggggagataaaatgagtcaggacagtatgatgaagctcaagggtatggctgccgcagggagatcgcagggacaacacaagcagcggatatgggtgaacatatctctctctggtatcaagattattgacgagaaaacgggagtgatcgagcacgagcacccagtcaataagatcagctttattgcgagagatgtgactgataacagggctttcgggtacgtttgcggcggggaaggccagcatcagttttttgcaatcaaaactggtcagcaagctgaacctctggtagtggacctgaaggacctgttccaggttatctacaacgtgaaaaaaaaagaggaggaaaagaaaaagattgaggaagcaagcaaggccgtggagaatggcagcgaagctctgatgattctggatgaccagacaaacaagctcaagagcggagtggatcagatggacttgtttggtgacatgtcgacaccccctgacctgaactcccctacagagagtaaggacatcctgctcgtagacctgaacagtgagattgataccaaccagaattccctccgtgaaaatccatttctcaccaacggcattacatcatgcagcctcccacgcccgactccccaggcttcatttttaccagagaatgcattctccgccaaccttaatttcttccctactcccaaccccgatccgttcagagacgatccctttacccagcccgaccaatctaccccctctagttttgactctctgaaatcccccgaccagaagaaagagaattcttccagtagctctactcctctgtctaacgggccattgaatggagacgtcgactacttcggccagcagtttgaccagatttccaataggacaggcaagcaggaagctcaggcgggcccttggccattctcaagttctcagacccagcctgccgttaggacccaaaacggcgtgtcagagcgtgaacagaacgggttttcagtgaagagcagcccgaacccatttgtcggatctccaccgaagggccttagcatccagaacggagtgaaacaggacctcgagtcatcagtccagagctctcctcacgactcaatcgccataatcccacccccacagtctaccaaaccgggacgcggccggaggacagccaagagcagtgccaacgatctgctggcgagcgatattttcgcccctcccgtaagtgagccgtccggtcaggcctcccccaccgggcagcctactgcattgcagcctaatcctctcgatctctttaagactagcgcgccagcccccgtgggacctcttgtgggccttggtggcgtgacggtaactctccctcaagccgggccctggaataccgcgagcctcgtgtttaaccaaagcccatccatggcacctggggccatgatggggggacagccctctggattttcgcagcccgtgatattcggaacctccccggctgtttcagggtggaaccagccatctccctttgctgcatcgacgccaccaccggtcccagttgtgtggggcccatccgcgagcgttgctcctaacgcctggagcacaacctctcctttaggaaacccctttcagagtaacattttcccggcacccgccgtgtctactcagccaccaagcatgcatagtagtctgctcgtgacccccccacaacccccgcctcgtgctggcccccctaaggacatcagttcggacgcttttactgcgctagatcctctgggcgacaaggagatcaaagacgtcaaggaaatgtttaaagacttccagcttcgtcagccccccgctgtgcctgcaaggaagggcgagcaaacatccagtggcactctgtccgcgttcgcctcttacttcaacagcaaggttggcatcccccaagagaacgcagaccacgacgactttgatgccaatcaactgctgaataagattaatgagccacctaagcctgccccacgccaggtttccttgcctgtgacgaaaagtaccgataatgctttcgaaaatccctttttcaaagacagcttcggcagctcccaagcgagtgttgcgtcctcgcagcccgtatcctcagaaatgtatcgagatcccttcgggaatccttttgcctag

SEQ ID NO: 117004 - DNA, 120 bp, Artificial Sequence
  derived and/or modified sequence
atgtcaaacgaagtggaaacaagtgcaacaaacggacagcctgatcagcaggccgcacccaaagcgccttccaagaaggaaaagaagaaaggccccgaaaaaactgatgagtatttgtag

SEQ ID NO: 117005 - DNA, 2313 bp, Artificial Sequence
  derived and/or modified sequence
atgagcaatgaggtggagaccagcgccaccaacggccagcctgaccagcaggccgcccccaaggcccccagcaagaaggagaagaagaagggccctgagaagacagatgagtacctgctggcccgcttcaagggagatggagtgaagtacaaggccaagctgattggaattgatgatgtgcctgatgcccggggggacaagatgagccaggacagcatgatgaagctgaagggcatggctgctgctggccgcagccagggccagcacaagcagaggatctgggtgaacatcagcctgagcggcatcaagatcattgatgagaagacaggagtcatcgagcacgagcaccctgtgaacaagatctccttcatcgccagagatgtgacagacaacagagccttcggctacgtgtgtggcggggagggccagcaccagttctttgccatcaagacaggccagcaggccgagcccctggtggtggacctgaaggacctcttccaggtgatctacaacgtgaagaagaaggaggaggagaagaagaagattgaggaggccagcaaggctgtggagaatggaagtgaggccctgatgatcctggatgaccagaccaacaagctgaagagcggcgtggaccagatggacctgtttggagacatgagcaccccaccagacctgaacagccccacagagagcaaggacatcctgctggtggacctgaacagcgagattgacaccaaccagaacagcctgcgggagaaccccttcctgaccaacggcatcaccagctgcagcctgccccggcccaccccccaggccagcttcctgcctgaaaatgccttcagcgccaacctgaacttcttccccacccccaacccagaccccttcagagatgaccccttcacccagcctgaccagagcacccccagcagctttgacagcctgaagagcccagaccagaagaaggagaacagcagcagcagcagcacccccctgagcaatggccccctgaatggagatgtggactacttcggccagcagtttgaccagatcagcaacagaacaggcaagcaggaggcccaggccggcccctggcccttcagcagcagccagacccagcctgctgtgaggacccagaatggagtgtctgagcgggagcagaatggcttctctgtgaagagcagccccaacccctttgtgggcagcccccccaagggcctgagcatccagaatggagtgaagcaggacctggagagctctgtgcagagcagcccccatgacagcatcgccatcatccccccaccccagagcaccaagccaggccggggcagaagaacagccaagagcagcgccaatgacctgctggccagtgacatctttgcccctcctgtgtctgagcccagcggccaggccagccccaccggccagcccacagccctgcagcccaaccccctggacctcttcaagaccagcgccccagcccctgtgggccccctggtgggcctgggcggcgtgacagtgaccctgccccaggccggcccctggaacacagccagcctggtgttcaaccagagccccagcatggcccctggggccatgatgggcggccagcccagcggcttcagccagcctgtgatcttcggcaccagccctgctgtgtctggctggaaccagcccagcccctttgctgccagcaccccacctcctgtgcctgtggtgtggggccccagcgcctctgtggccccaaatgcctggagcaccaccagccccctgggcaaccccttccagagcaacatcttccctgccccagctgtgtccacccagccccccagcatgcacagcagcctgctggtgaccccaccccagcccccaccccgggccggcccccccaaggacatcagcagtgatgccttcaccgccctggaccccctgggggacaaggagatcaaggatgtgaaggagatgttcaaggacttccagctgcggcagcccccagctgtgcctgccaggaagggggagcagaccagcagcggcaccctgagcgcctttgccagctacttcaacagcaaggtgggcatcccccaggagaatgctgaccatgatgactttgatgccaaccagctgctgaacaagatcaatgagccccccaagccagccccccggcaggtgtccctgcctgtgaccaagagcacagacaatgcctttgagaaccccttcttcaaggacagctttggcagcagccaggcctctgtggccagcagccagcctgtgagcagcgagatgtacagagacccctttggaaacccctttgcctag

SEQ ID NO: 117006 - DNA, 120 bp, Artificial Sequence
  derived and/or modified sequence
atgagcaatgaggtggagaccagcgccaccaacggccagcctgaccagcaggccgcccccaaggcccccagcaagaaggagaagaagaagggccctgagaagacagatgagtacctgtag

SEQ ID NO: 117007 - DNA, 2313 bp, Artificial Sequence
  derived and/or modified sequence
atgagcaacgaggtggagaccagcgccaccaacggccagcccgaccagcaggccgcccctaaagctccatccaaaaaagaaaaaaaaaaggggcctgaaaagacagacgaatacctcttagcaaggtttaaaggagatggcgtgaagtacaaggccaagctcattggaatagacgatgtccccgatgccagaggagacaaaatgtcacaggactctatgatgaagctcaagggcatggctgccgctgggaggtctcaggggcagcacaagcagaggatctgggtgaacatcagtctctctggtataaagatcatcgacgaaaagactggggtgatagagcacgagcaccccgtgaacaaaatctccttcattgcgcgagatgttactgataacagggctttcgggtacgtctgcggcggcgagggacagcaccaattctttgcaatcaagactggccagcaggctgagcctcttgttgttgacttaaaagatctatttcaggtaatttacaacgtcaaaaaaaaagaagaggaaaagaagaaaattgaagaggctagcaaggcagtggagaacggctcagaagcactgatgatattagatgaccagacaaataagctaaagagcggggtcgaccagatggacctctttggagatatgtctaccccccccgacctgaactctcccacagaaagtaaagacattctcctggtagatctgaactcggagatcgacacgaatcagaatagtcttcgagaaaacccattcctgacaaacggcatcacgagttgctcacttcctaggccgacccctcaagcttcttttctgccagaaaatgctttcagtgccaacttgaatttctttcccactcccaacccagatccgttccgagacgatcctttcacccagcctgatcaatccacacctagcagctttgatagtttaaaatcaccagatcaaaagaaggaaaatagtagttcctcttctacgcctctctccaacgggcctcttaacggcgatgtggactattttgggcagcagttcgaccaaatctctaaccgaacgggaaagcaggaagcccaggccgggccctggccattttcctcctctcaaacacagcctgcagtgagaacacaaaatggagttagcgaacgggaacaaaacgggtttagtgtgaagtctagtcccaaccccttcgtgggctcaccacctaagggcctcagcatccaaaatggggtcaaacaggatcttgagtcaagcgtccagagcagtccccatgacagcatagcgatcatccccccgcctcaatccaccaagccaggtcggggacggcgcacagccaagagctcagcaaatgacctgcttgcctcagatattttcgcaccacccgttagtgaaccctcaggccaggcctctcctactggtcagcccactgctctacagccgaaccccctcgacttattcaagacgtccgcaccggcccctgtggggccacttgttggcctgggtggagtgactgtgaccctgcctcaggcaggaccatggaatacagcatctctcgtgtttaatcagtccccaagtatggcccccggcgccatgatgggcggccaaccttctggatttagtcaacccgtgattttcggtactagccctgccgtctccggctggaaccagccctccccattcgcagcatccacaccaccacccgtccctgtcgtgtgggggccttcggcttcagtggccccaaacgcatggtcaacgaccagtccactggggaatccatttcagtctaacatttttccggccccagccgtcagtacccagccccccagcatgcactcttcacttctggtgacacctccgcagcctcccccccgagccgggccacccaaggacatttcctccgacgcctttaccgcattagatcccttgggcgacaaggagataaaagacgtaaaggaaatgtttaaagacttccagctgagacagcctccagctgtgccagccagaaaaggcgaacagacatcttctggcaccctgagtgctttcgctagttacttcaatagtaaggtcggtattccacaggagaatgcggatcatgatgacttcgatgcaaaccaattacttaacaagattaatgagccgcctaagccagccccaaggcaggtgagccttccagtgactaagagcacagataatgcgttcgagaaccccttttttaaggattcatttggatcctcccaggcctctgtcgcatcctctcaacctgtgagctctgaaatgtacagagacccctttggaaacccctttgcgtag

SEQ ID NO: 117008 - DNA, 120 bp, Artificial Sequence
  derived and/or modified sequence
atgagcaacgaggtggagaccagcgccaccaacggccagcccgaccagcaggcagccccgaaggcccctagtaaaaaggaaaagaaaaaaggacccgaaaagaccgacgagtacttgtag

SEQ ID NO: 117009 - DNA, 2313 bp, Artificial Sequence
  derived and/or modified sequence
atgtcgaatgaagtcgagaccagcgcaaccaacggacaacccgatcagcaggctgcacccaaggccccatccaagaaagaaaagaaaaagggcccagaaaagacggacgagtacctactcgccagatttaaaggagacggcgtaaaatataaagctaaacttatcggcattgacgatgtcccggatgcacggggtgataagatgtcccaggacagcatgatgaaactgaaaggcatggctgctgctggcagaagccagggacagcataaacagagaatttgggtaaacatttctcttagcggcataaagataatcgatgagaaaactggcgttattgaacacgaacatccagtgaacaaaatctcctttatcgcgcgagacgtgactgacaacagggccttcggctatgtctgcggcggagaggggcagcaccagtttttcgccattaaaaccggacaacaagcagaaccccttgtcgtcgatctcaaagacctgttccaggtcatatacaacgtgaagaaaaaggaggaggagaaaaagaaaattgaggaagcatctaaggcggtggaaaatggatcagaagctctgatgattctagacgaccagaccaataagttaaaaagcggcgtagaccagatggatctttttggagacatgtccacaccacccgacctgaacagtccaacggaatctaaggatatcctgctggtagacctgaacagtgaaatcgatacaaaccaaaactccctgagagagaatccttttctgaccaacggtatcacgtcctgctcactgcccagaccaacaccccaggccagttttctacccgaaaatgcattttcggcaaacctcaacttcttcccgacccctaacccggacccatttcgcgacgatccttttacacagccagatcaaagcacaccctcctctttcgatagcctcaagagccctgaccagaaaaaggagaattccagcagttccagcacacccctgtcaaatgggccactgaatggtgacgtagactactttggccagcagtttgaccagatatcaaacagaaccgggaagcaggaagcacaagccggaccttggcctttctcaagctctcagacccagcccgctgtcagaacgcagaacggagtcagcgagcgcgagcaaaacggcttcagcgtgaagtccagtccaaatccttttgttggcagcccgccaaagggcctctccatacagaatggagtgaagcaggacttagagtccagcgtgcaatccagtcctcatgactcaattgccatcattcctcccccacagtccacaaagcccggacgcggaagaagaacagccaagtcttccgccaacgatttgttggcctcagacatcttcgcccctccagtgtctgagccgagcgggcaagcttctccaacaggacagccaaccgcgctccaacccaaccctctggacctgttcaagacatccgcccctgccccagtggggcctctggtgggcctgggcggagttaccgtgaccttgccccaggcaggcccttggaatacagcttcattggtcttcaatcagtcccccagcatggccccaggagcgatgatgggcggacagccctctggcttcagccaaccggtgattttcggaacctccccggcagtctctgggtggaatcaaccgtctcctttcgcagcctcaacccctcctcccgtgcctgtggtgtgggggccatccgcctccgtggcccctaatgcttggtccacaaccagtccattgggcaaccccttccagagtaatatcttccctgctccggcagtgagtacgcagccaccatccatgcactcaagcctgctggtcaccccaccccagcccccacccagagccggacccccaaaggatatttctagcgatgcctttaccgcgctggaccctctcggtgacaaagaaataaaagacgtgaaggaaatgttcaaggattttcaactaaggcaaccgccagctgtgcccgctagaaaaggtgaacaaacttcttctggcacactgagcgcttttgccagctacttcaactctaaagtaggaattccgcaagaaaacgctgatcacgacgactttgacgccaaccagctgctcaacaaaatcaacgagcccccaaaacccgctccccgtcaagtgtctttgccagtgacaaaatccaccgacaacgcttttgaaaatccatttttcaaagactcctttgggtcatcgcaggcaagcgtggctagttcccagcccgtcagcagcgaaatgtacagggacccttttggaaatccattcgcctag

SEQ ID NO: 117010 - DNA, 120 bp, Artificial Sequence
  derived and/or modified sequence
atgtcaaatgaggtcgagacctccgctacaaacggccaacctgaccagcaggccgcacccaaggctccaagtaagaaagaaaaaaaaaaaggtcctgaaaaaaccgacgagtacctgtag

SEQ ID NO: 117011 - DNA, 2313 bp, Artificial Sequence
  derived and/or modified sequence
atgagcaacgaggtggagaccagcgccaccaacggccagcccgaccagcaggccgcccccaaggcccccagcaagaaggagaagaagaagggccccgagaagaccgacgagtacctgctggccagattcaagggcgacggcgtgaagtacaaggccaagctgatcggcatcgacgacgtgcccgacgccagaggcgacaagatgagccaggacagcatgatgaagctgaagggcatggccgccgccggcagaagccagggccagcacaagcagagaatctgggtgaacatcagcctgagcggcatcaagatcatcgacgagaagaccggcgtgatcgagcacgagcaccccgtgaacaagatcagcttcatcgccagagacgtgaccgacaacagagccttcggctacgtgtgcggcggcgagggccagcaccagttcttcgccatcaagaccggccagcaggccgagcccctggtggtggacctgaaggacctgttccaggtgatctacaacgtgaagaagaaggaggaggagaagaagaagatcgaggaggccagcaaggccgtggagaacggcagcgaggccctgatgatcctggacgaccagaccaacaagctgaagagcggcgtggaccagatggacctgttcggcgacatgagcaccccccccgacctgaacagccccaccgagagcaaggacatcctgctggtggacctgaacagcgagatcgacaccaaccagaacagcctgagagagaaccccttcctgaccaacggcatcaccagctgcagcctgcccagacccaccccccaggccagcttcctgcccgagaacgccttcagcgccaacctgaacttcttccccacccccaaccccgaccccttcagagacgaccccttcacccagcccgaccagagcacccccagcagcttcgacagcctgaagagccccgaccagaagaaggagaacagcagcagcagcagcacccccctgagcaacggccccctgaacggcgacgtggactacttcggccagcagttcgaccagatcagcaacagaaccggcaagcaggaggcccaggccggcccctggcccttcagcagcagccagacccagcccgccgtgagaacccagaacggcgtgagcgagagagagcagaacggcttcagcgtgaagagcagccccaaccccttcgtgggcagcccccccaagggcctgagcatccagaacggcgtgaagcaggacctggagagcagcgtgcagagcagcccccacgacagcatcgccatcatcccccccccccagagcaccaagcccggcagaggcagaagaaccgccaagagcagcgccaacgacctgctggccagcgacatcttcgccccccccgtgagcgagcccagcggccaggccagccccaccggccagcccaccgccctgcagcccaaccccctggacctgttcaagaccagcgcccccgcccccgtgggccccctggtgggcctgggcggcgtgaccgtgaccctgccccaggccggcccctggaacaccgccagcctggtgttcaaccagagccccagcatggcccccggcgccatgatgggcggccagcccagcggcttcagccagcccgtgatcttcggcaccagccccgccgtgagcggctggaaccagcccagccccttcgccgccagcacccccccccccgtgcccgtggtgtggggccccagcgccagcgtggcccccaacgcctggagcaccaccagccccctgggcaaccccttccagagcaacatcttccccgcccccgccgtgagcacccagccccccagcatgcacagcagcctgctggtgacccccccccagcccccccccagagccggcccccccaaggacatcagcagcgacgccttcaccgccctggaccccctgggcgacaaggagatcaaggacgtgaaggagatgttcaaggacttccagctgagacagccccccgccgtgcccgccagaaagggcgagcagaccagcagcggcaccctgagcgccttcgccagctacttcaacagcaaggtgggcatcccccaggagaacgccgaccacgacgacttcgacgccaaccagctgctgaacaagatcaacgagccccccaagcccgcccccagacaggtgagcctgcccgtgaccaagagcaccgacaacgccttcgagaaccccttcttcaaggacagcttcggcagcagccaggccagcgtggccagcagccagcccgtgagcagcgagatgtacagagaccccttcggcaaccccttcgcctag

SEQ ID NO: 117012 - DNA, 120 bp, Artificial Sequence
  derived and/or modified sequence
atgagcaacgaggtggagaccagcgccaccaacggccagcccgaccagcaggccgcccccaaggcccccagcaagaaggagaagaagaagggccccgagaagaccgacgagtacctgtag

SEQ ID NO: 117013 - DNA, 4534 bp, Artificial Sequence
  derived and/or modified sequence
atttcccctcccgtcgctgggtccctgcgatcgcccccagctggtggggctcgcggagctcaggggagcggggtcctctgcgccgctgcagcgcgagttaataaacagttaagtttggaagactctgcagacacgttgagggggagttaccaagcccaggcagcaaaaacatcctggcacattcctggggagtcctcagctgccagcatctgattagaaccatatctctcgccgggagtggccgcgcggctccgaagctcccggccggcggctatttaagcgaggcccgccgcatccgctgcgctgtagcctggaggctccgggcgcggggaagtcatgctcgcttcacggaggcaatagctagccggtgtctgtgggaggttatgtttatttgagacttctccatcgggatcgcctggtgtcaccaagtgtccactggtactgaggtttgctgcctgccttcttgccatgtctaacgaagtagaaacaagtgcaaccaatggtcagcccgaccaacaggccgcaccaaaagcaccctcaaagaaggaaaaaaagaaaggccctgaaaagacagatgaatatctcttagcaaggttcaaaggcgatggtgtaaaatataaggccaagctgattggcattgatgatgtgccagatgcaagaggggataaaatgagccaagactctatgatgaaactaaagggaatggcggcagctggtcggtctcagggacaacacaaacaaaggatctgggtcaacatttccctttctgggataaaaataattgatgagaaaactggggtaatagagcatgaacatccagtaaataagatttctttcattgcccgtgatgtgacagacaaccgggcatttggttacgtgtgtggaggagaaggccagcatcagttttttgccataaaaaccgggcaacaggctgaaccattagttgttgatcttaaagacctttttcaagttatctataatgtaaagaaaaaggaagaagaaaagaaaaagatagaggaagccagcaaagcagttgagaatgggagtgaggccctaatgattctagatgaccaaactaacaaactgaaatcgggtgttgaccagatggatttgtttggggacatgtctacacctcctgacctaaatagtccaacagaaagcaaagatatcctgttagtggatctaaactctgaaatcgacaccaatcagaattctttaagagaaaatccattcttaacaaacggcatcacctcctgttctcttcctcgaccaacgcctcaggcatccttcttgcctgaaaatgccttttctgccaatctcaacttctttcccacccctaatcctgatcctttccgtgacgatcctttcacacagccagaccaatcgacaccttcttcgtttgattctctcaaatctccagatcagaagaaagagaattcgagtagctcgtctactccgctgagtaatgggcccctgaatggtgatgttgactactttggtcagcaatttgaccagatctctaaccggactggcaaacaggaagctcaggcaggcccatggcccttttcaagttcgcaaacccagccagcagtgagaactcaaaatggggtatctgaaagagaacagaacggcttctctgtcaaatcctccccgaacccttttgtgggaagccctcccaaaggactgtccatacagaatggcgtaaagcaggacttggaaagctctgtccagtcctcaccacatgactccatagccattatcccacctccacaaagtaccaaaccaggaagaggcagaaggactgctaagtcttcagccaatgacttgcttgcatcagacatctttgctcctcccgtctcagaaccttcaggccaggcgtcacccacaggacaacctacagccctgcagcccaaccctctggatctcttcaaaacaagtgctcctgccccagtggggcccctggtgggtctaggtggtgtaactgtcacactccctcaggcaggaccatggaacacagcatctttggtcttcaatcagtccccttcaatggctccgggagccatgatgggtggtcaaccttcaggttttagtcagcccgtcatttttggtacaagtccagctgtttcaggttggaaccagccttcaccctttgcagcctcaactccccctccagtgcctgttgtctggggcccttctgcatctgtggcacccaatgcttggtcaacaacaagccctttggggaatccttttcagagcaatatttttccagctcctgctgtgtccactcagcccccatccatgcactcctctctcctggtcactcctcctcagccacctcccagagctggccctcccaaggacatctccagtgatgccttcactgccttagacccacttggggataaagagatcaaggatgtgaaagaaatgtttaaggatttccaactgcggcagccacctgctgtgcccgcgcggaagggagagcagacttcttctgggactttgagtgcctttgccagttatttcaacagcaaggttggcattcctcaggagaatgcagaccatgatgactttgatgctaatcaactattgaacaagatcaatgaaccaccaaagccagctcccagacaagtttccctgccagttaccaaatctactgacaatgcatttgagaaccctttctttaaagattcttttggttcatcacaagcctctgtggcttcttctcaacctgtatcttctgagatgtatagggatccatttggaaatccttttgcctaaattctgaacttggtctgcagaccatccagaggaataaaaaggttggccttagtagtcaaaaacaaagctgatagccagacacgttctgatttctgcccttgttccagctttgacgtattatctgttgccttatttctcattgcctcttctacttgtaaaatgcttttcactttctgtctaggttaaagctaaactgaatctatggctttaaataaattaagatcctaaactctctagcttaagtgtaaatgaagtacagtagtttccctactgaaccctgcctcttgtgtccctggaaccttctagaacacctgccttctaccctctggttgggagatgcagccaccacatcccttcatatcatactgttttgaataaattttcaaatccttattgttcagagttgtttgggggttctgtttcagagcataaaacctaaaggttatagtagaacaaggcaccttcttaaaagaaatcttgcttcagaccatcagttacagagaatttctaaagtaaaattgaagcaactacaacttctccttagacactttggaatctaaccacttaaggacctttttaaagagatagcttctcttctttctgaagatcaatttctcccaaggccaagattgtccttttctcccatttcttgctagctattgcaaatgagggaagaacattattcatctctcctccccttttttttctgattcttttttcagtcagttttgctcctgggttcaagtagtattaccaccctttcacaagcaacagactctcacagggcaaaaaaaaaaaaaaatctaatgattcacagacagatctggagcctctcttcattctcagtaattgctagtcccaagaactagaattgcaaatgggcacaacctatatccttcctgtggaagaggaggccactctcttgagctgaagttccagaagagcagttaatgttcaagagaaattgaactcaactcagcaacaaaggactctattttgaagagcaacatatcacaaagctaaatgtgattgtgccaaacacattaggtgcttatttggggtcatgctaggcctttatcaagtaactggaaaacttttcttgcagccacaatctcaatgtcgttagtaggaagataagaggggagaaaaagctgtagaacaaatgtttggggttaccattgaaaatctaatgtctgcaatatttttctcctcacaacttggaaacgttcccagttcattttcagtcctgttgtgagcacagttctgaagggtttattattgtcaaaataagttttgttttgttttgtttatgttgggtttttaatgttgtctcttgacccttaatgctcaggttcttgtgggagttaatcagccacatccaatgttaccttgagggggaagaagagggtgatgctcagaagctaaacaagacaggggccacatgaccctctattgattagccccaagtagaaagtcctgtggttttatgtttaatggtaatagttgatcatatatggcataattttctatcagcttcctactcagtcactataaacacagacttgaaatagtactttaaatgtccaaatacctaaatgtgctaaactggaggtaactatttctaggtagttgaatttttgaaagtcatgatcagccacacaactgttttgtacatacttattttctcatgcacttttctgtatgcaaataaagctataaatttactcatttcaataaactggagtggcagaat

SEQ ID NO: 117014 - protein, 113 aa, Artificial Sequence
  derived and/or modified sequence
MSASVVSVISRFLEEYLSSTPQRLKLLDAYLLYILLTGALQFGYCLLVGTFPFNSFLSGFISCVGSFILAVCLRIQINPQNKADFQGISPERAFADFLFASTILHLVVMNFVG

SEQ ID NO: 117015 - DNA, 342 bp, Artificial Sequence
  derived and/or modified sequence
atgtctgcttctgtggttagtgttatcagcaggtttctggaggagtacttgagctctacccctcaacgactgaaattgctggatgcctacctgttgtatatcctactgaccggcgcgctccagttcggctactgtctgcttgtgggaacttttccgtttaacagctttctgtcagggttcatctcctgcgtggggtccttcattcttgcagtttgtctgaggatccagattaatccgcagaataaagctgattttcaggggattagcccggagagggccttcgccgatttcctctttgcctctacgatactgcatctggtagtgatgaacttcgtgggctag

SEQ ID NO: 117016 - DNA, 342 bp, Artificial Sequence
  derived and/or modified sequence
atgtctgcctctgtggtgtctgtcatcagccgcttcctggaggagtacctgagcagcaccccccagaggctgaagctgctggatgcctacctgctgtacatcctgctgactggagccctgcagtttggctactgcctgctggtgggcaccttccccttcaacagcttcctgagcggcttcatcagctgtgtgggcagcttcatcctggccgtgtgcctgcgcatccagatcaacccccagaacaaggctgacttccagggcatcagccctgagcgggcctttgctgacttcctgtttgccagcaccatcctgcacctggtggtgatgaactttgtgggctag

SEQ ID NO: 117017 - DNA, 342 bp, Artificial Sequence
  derived and/or modified sequence
atgagcgccagcgtggtgagcgtgatcagccggttcctggaggagtacctgtcttctaccccacagagattaaagcttttagatgcttacttattatacattttgttgaccggtgccctgcagtttggctattgcctgctggtgggcactttcccctttaattccttcctttcagggtttatcagctgcgttggttcctttatcctggcagtgtgtcttagaatccagattaatccacagaacaaggcagactttcaggggatcagtcccgaacgtgcttttgccgacttcttattcgcctccactattctgcacctggtggtgatgaattttgtgggctag

SEQ ID NO: 117018 - DNA, 342 bp, Artificial Sequence
  derived and/or modified sequence
atgagcgcctctgtagtgagcgttatcagcaggttcctcgaggagtatctgtcatcgacgccccagagactgaaactgttggacgcctatttgctgtacatactactgacaggagcattgcagttcgggtattgtctcctggtggggactttcccctttaacagttttctgtcaggattcatcagctgcgttggatcattcatactggccgtgtgtctgcgcatccaaatcaatccacagaataaggcagactttcagggtatttcaccagaaagagcattcgccgacttcttattcgcgtcaacaattctccacctggtagtgatgaactttgttggctag

SEQ ID NO: 117019 - DNA, 342 bp, Artificial Sequence
  derived and/or modified sequence
atgagcgccagcgtggtgagcgtgatcagcagattcctggaggagtacctgagcagcaccccccagagactgaagctgctggacgcctacctgctgtacatcctgctgaccggcgccctgcagttcggctactgcctgctggtgggcaccttccccttcaacagcttcctgagcggcttcatcagctgcgtgggcagcttcatcctggccgtgtgcctgagaatccagatcaacccccagaacaaggccgacttccagggcatcagccccgagagagccttcgccgacttcctgttcgccagcaccatcctgcacctggtggtgatgaacttcgtgggctag

SEQ ID NO: 117020 - DNA, 731 bp, Artificial Sequence
  derived and/or modified sequence
ggggagggcggagttaggtcacgagggtgcgcatgcgcaaacagcacatccggtgtggtcgacgggtcctccaagagtttggggcgcggactggagtaccttgcgtgcagttatgtcggcgtcggtagtgtctgtcatttcgcggttcttagaagagtacttgagctccactccgcagcgtctgaagttgctggacgcgtacctgctgtatatactgctgaccggggcgctgcagttcggttactgtctcctcgtggggaccttccccttcaactcttttctctcgggcttcatctcttgtgtggggagtttcatcctagcggtttgcctgagaatacagatcaacccacagaacaaagcggatttccaaggcatctccccagagcgagcctttgctgattttctctttgccagcaccatcctgcaccttgttgtcatgaactttgttggctgactcattctcatttacttaattgaggagtaggagactaaaagaatgttcactctttgaatttcctggataagagttctggagatggcagcttattggacacatggattttcttcagatttgcacttactgctagctctgctttttatgcaggagaaaagcccagagttcactgtgtgtcagaacaactttctaacaaacatttattaatccagcctctgcctttcattaaatgtaaccttttgccttccaaattaaagaactccatgccactcctcca

SEQ ID NO: 117021 - protein, 791 aa, Artificial Sequence
  derived and/or modified sequence
MGEERWVSLTPEEFDQLQKYSEYSSKKIKDALTEFNEGGSLKQYDPHEPISYDVFKLFMRAYLEVDLPQPLSTHLFLAFSQKPRHETSDHPTEGASNSEANSADTNIQNADNATKADEACAPDTESNMAEKQAPAEDQVAATPLEPPVPRSSSSESPVVYLKDVVCYLSLLETGRPQDKLEFMFRLYDSDENGLLDQAEMDCIVNQMLHIAQYLEWDPTELRPILKEMLQGMDYDRDGFVSLQEWVHGGMTTIPLLVLLGMDDSGSKGDGRHAWTMKHFKKPTYCNFCHIMLMGVRKQGLCCTYCKYTVHERCVSRNIPGCVKTYSKAKRSGEVMQHAWVEGNSSVKCDRCHKSIKCYQSVTARHCVWCRMTFHRKCELSTLCDGGELRDHILLPTSICPITRDRPGEKSDGCVSAKGELVMQYKIIPTPGTHPLLVLVNPKSGGRQGERILRKFHYLLNPKQVFNLDNGGPTPGLNFFRDTPDFRVLACGGDGTVGWILDCIDKANFAKHPPVAVLPLGTGNDLARCLRWGGGYEGGSLTKILKDIEQSPLVMLDRWHLEVIPREEVENGDQVPYSIMNNYFSIGVDASIAHRFHVMREKHPEKFNSRMKNKLWYFEFGTSETFAATCKKLHDHIELECDGVGVDLSNIFLEGIAILNIPSMYGGTNLWGENKKNRAVIRESRKGVTDPKELKFCVQDLSDQLLEVVGLEGAMEMGQIYTGLKSAGRRLAQCASVTIRTNKLLPMQVDGEPWMQPCCTIKITHKNQAPMMMGPPQKSSFFSLRRKSRSKD

SEQ ID NO: 117022 - DNA, 2376 bp, Artificial Sequence
  derived and/or modified sequence
atgggagaggagaggtgggtgtcactgactccagaggagttcgaccagctgcaaaagtatagtgaatattcttctaaaaaaatcaaggacgctcttacggagttcaacgaaggggggagcctaaaacagtatgatccccatgagccaattagctacgacgtttttaaactgttcatgcgcgcctacctggaggtcgatctgcctcagcccttgagcacccacctgttcttagctttctcacaaaaaccaaggcatgaaacaagcgatcaccctactgaaggtgcttcaaacagtgaggccaatagcgctgataccaatatccagaatgctgataatgcgaccaaggccgacgaggcctgcgcccccgatactgagtctaacatggctgagaaacaggccccggcagaggatcaggtagctgccacgccattggagcctcctgttcctcgttctagttccagtgaatcaccggtcgtatatctcaaggatgtggtctgctatctctcactcctcgagactggacggccccaagacaagctagaattcatgtttagactgtatgacagtgatgagaatggcctgttagaccaagctgagatggattgcattgtcaatcaaatgctgcacatagcacagtacctagagtgggacccgaccgagttgcggccgatcctgaaagagatgctccaaggaatggactatgatcgggacggctttgtaagtttgcaggagtgggtgcatgggggaatgacgactattccacttctggttctcttgggaatggatgacagcggttccaaaggcgatgggagacatgcttggacaatgaaacattttaaaaaacccacctattgcaatttctgtcacataatgcttatgggggttaggaaacaaggcctatgctgcacctattgtaaatacactgtgcacgaaagatgtgtgtcacggaacattccaggttgcgtgaaaacgtacagcaaagccaagaggtccggtgaagtgatgcagcacgcttgggtcgaaggaaactcaagcgtgaagtgcgataggtgtcataagagcataaagtgttatcagagtgtaactgcaaggcactgtgtctggtgtaggatgacattccaccgtaagtgcgaactaagcactctctgcgacggaggtgaactgcgagatcacattctgttgcctacctccatctgcccgattactcgcgaccggcctggggaaaaaagcgacgggtgcgtcagcgctaagggcgaattagtgatgcagtacaaaattattcctacacccggcacgcatccactgctcgtgctcgtgaaccctaaatcaggggggagacagggggagcggatcctgcgaaagtttcactacctgctcaatccaaagcaggttttcaacttagataacggtggacccacacccgggctgaatttcttccgtgacactcctgatttccgcgtccttgcttgcgggggggatgggaccgtggggtggatactcgactgcattgacaaagccaacttcgctaagcacccccccgtggccgttctgcctcttggaactggaaatgacctcgcacggtgtctgcgttggggcggcgggtacgagggcggaagcctaacgaagattctgaaggacatcgaacagagtccattagtaatgctagatcgctggcaccttgaggtgataccaagagaggaggtagagaatggtgatcaggtcccatattctatcatgaacaactatttctctattggagtggacgccagtatagcacacaggttccacgtcatgagagaaaaacatccagagaagtttaattctcggatgaaaaataagctgtggtactttgaatttggcaccagtgaaaccttcgcggccacctgtaaaaagcttcacgaccacattgagcttgaatgtgatggtgtcggagttgatcttagcaacattttcctggaagggatagcgatccttaatatcccttcaatgtacggaggtaccaatctctggggcgagaataagaaaaatagagctgtgattcgcgagtcccgcaagggcgtaactgaccccaaggaactcaagttttgtgttcaagacctttcggatcaactgcttgaggtggtggggctcgagggagccatggaaatgggacagatatacacaggactgaagagtgccggacggcgcttagctcaatgcgcctcagtcaccatcagaactaacaaattattacccatgcaggtggacggcgagccctggatgcagccctgctgcacaatcaaaattactcataagaaccaagctcccatgatgatgggtcctcctcaaaaatcctcattcttcagcctcaggagaaagtcgcggagtaaggactag

SEQ ID NO: 117023 - DNA, 2376 bp, Artificial Sequence
  derived and/or modified sequence
atgggagaggagcgctgggtgtccctgaccccagaggagtttgaccagctgcagaagtacagcgagtacagcagcaagaagatcaaggatgccctgacagagttcaatgaaggaggcagcctgaagcagtatgacccccatgagcccatctcctatgatgtgttcaagctgttcatgagggcctacctggaggtggacctgccccagcccctgagcacccacctgttcctggccttcagccagaagcccaggcatgagaccagtgaccaccccacagagggcgccagcaacagcgaggccaacagcgctgacaccaacatccagaatgctgacaatgccaccaaggcagatgaggcctgtgccccagacacagagagcaacatggccgagaagcaggccccagctgaggaccaggtggccgccacccccctggagccccctgtgcccaggagcagcagcagcgagagccctgtggtgtacctgaaggatgtggtgtgctacctgagcctgctggagaccggccggccccaggacaagctggagttcatgttccggctgtatgacagtgatgaaaatggcctgctggaccaggccgagatggactgcatcgtgaaccagatgctgcacatcgcccagtacctggagtgggaccccacagagctgcggcccatcctgaaggagatgctgcagggcatggactatgacagagatggctttgtgtccctgcaggagtgggtgcatggaggcatgaccaccatccccctgctggtgctgctgggcatggatgacagcggcagcaaaggagatggaagacatgcctggaccatgaagcacttcaagaagcccacctactgcaacttctgccacatcatgctgatgggcgtgaggaagcagggcctgtgctgcacctactgcaagtacacagtgcatgagcgctgtgtgtccaggaacatccctggctgtgtgaagacctacagcaaggccaagaggtctggagaggtgatgcagcacgcctgggtggagggcaacagctctgtgaagtgtgaccgctgccacaagagcatcaagtgctaccagagcgtgacagcccggcactgtgtgtggtgcaggatgaccttccacaggaaatgtgagctgagcaccctgtgtgatggaggagagctgcgggaccacatcctgctgcccaccagcatctgccccatcacccgggacaggcctggagagaagagtgatggctgtgtgtctgccaagggggagctggtgatgcagtacaagatcatccccaccccaggcacccaccccctgctggtgctggtgaaccccaagagcggcggccggcagggcgagcgcatcctgaggaagttccactacctgctgaaccccaagcaggtgttcaacctggacaatggaggccccaccccaggcctgaacttcttccgggacaccccagacttccgggtgctggcctgtggaggagatggcaccgtgggctggatcctggactgcatcgacaaggccaactttgccaagcacccccctgtggccgtgctgcccctgggcactggaaatgacctggcccgctgcctgcgctggggcggcggctatgaaggaggcagcctgaccaagatcctgaaggacatcgagcagagccccctggtgatgctggaccgctggcacctggaggtgatcccccgggaggaggtggagaatggagaccaggtgccctacagcatcatgaacaactacttcagcattggagtggatgccagcatcgcccaccgcttccacgtgatgagggagaagcaccctgagaagttcaacagcaggatgaagaacaagctgtggtactttgaatttggcaccagcgagacctttgctgccacctgcaagaagctgcatgaccacatcgagctggagtgtgatggagtgggcgtggacctgagcaacatcttcctggagggcatcgccatcctgaacatccccagcatgtatggaggcaccaacctgtggggcgagaacaagaagaacagagctgtgatccgggagagcaggaaaggagtgacagaccccaaggagctgaagttctgtgtgcaggacctgagtgaccagctgctggaggtggtgggcctggagggcgccatggagatgggccagatctacacaggcctgaagtctgctggccggcggctggcccagtgtgcctctgtgaccatccgcaccaacaagctgctgcccatgcaggtggatggagagccctggatgcagccctgctgcaccatcaagatcacccacaagaaccaggcccccatgatgatgggccccccccagaagagcagcttcttcagcctgcggaggaagagccgcagcaaggactag

SEQ ID NO: 117024 - DNA, 2376 bp, Artificial Sequence
  derived and/or modified sequence
atgggcgaggagcggtgggtgagcctgacccccgaggagttcgaccagctgcagaagtatagcgagtattcatcgaagaaaataaaagacgcgttgaccgaattcaatgaaggtggcagcttgaagcaatacgaccctcacgagccaatctcttacgatgtgtttaagctgttcatgagggcctaccttgaggttgacctgccccagcctctgtctacacacctgtttcttgcgttctcacagaagccgagacatgagacgtctgaccaccctacagaaggagcatcgaactctgaggcgaattcggctgacaccaatattcagaatgcagataacgcgacgaaggcagacgaagcatgcgccccggataccgagtccaacatggctgagaaacaagcccccgcagaagatcaggtagccgccacccccttggaaccccccgtgccacgcagtagctccagcgagagccccgtggtgtacctgaaagatgtagtgtgctacctgtctctgctggagactgggcggccacaggacaaattggaatttatgttcagactatatgattcggacgaaaacggcctgctggatcaagcagagatggactgcatcgtgaaccaaatgctacatattgcgcaatacctagagtgggaccctaccgagcttcggcctatcctgaaggagatgctccaggggatggattacgaccgagatgggttcgtgtccctacaagaatgggtccacggaggaatgaccactattccccttctcgtcttgctcgggatggatgatagtgggtccaagggcgatggacgccacgcctggactatgaaacacttcaagaaacctacttattgcaatttctgccatatcatgcttatgggagtgcgaaaacagggcttgtgctgtacatattgcaaatatacagtccacgagcgctgcgtgtcccgcaatattcccgggtgcgtaaagacttactcaaaagcaaagcgtagtggggaggtgatgcagcatgcttgggttgaaggtaactctagcgtaaaatgcgaccgctgtcacaaatccatcaagtgctaccagtccgtgaccgcccgtcactgtgtgtggtgtaggatgacgttccacagaaaatgcgagctgagcacactgtgcgacggtggcgaattaagggaccatattttgctgcccactagtatttgtccaatcactagagaccggccaggtgaaaagtccgatggctgcgttagcgcaaaaggggagcttgtcatgcagtataagatcatccccactcccggcacgcacccactgctcgttttggtgaaccctaagtctggcggtcgccaaggtgaacggatactgcgcaaatttcactacttgctaaatcctaaacaggtgttcaatctcgataatggggggcctacccccgggctcaacttctttagggacacaccggattttagagtgctggcttgtggaggggatgggacagtcgggtggatcctggattgtatcgacaaagcaaacttcgccaagcacccccctgtcgctgtgctgcctctgggcaccggcaacgacctggctcgctgccttagatggggcggtggatacgagggcgggtcactgactaagattttgaaagatattgaacagagcccgcttgttatgttggaccgttggcacttggaggtgataccccgcgaggaggtggagaatggggatcaggttccatactccatcatgaacaattatttttcaatcggagttgatgcatctatagcacacagattccatgtcatgcgagaaaagcatcctgagaaattcaactcgagaatgaagaataagctctggtacttcgagttcggaacctcagaaaccttcgctgccacctgcaaaaagcttcacgatcatatagaactcgaatgtgacggtgttggggtggacctgtccaacatttttctggagggtattgccatcctcaacattcccagcatgtatgggggaaccaatctgtggggagaaaacaagaagaatcgagcggtgataagggagtcacgcaagggagtgaccgaccctaaagaactgaagttttgcgtgcaggacctgagcgaccagttattggaagtggtaggattggaaggagccatggagatggggcagatctatactggcttgaaatctgccgggaggagactggctcagtgtgccagtgtgactataagaacaaataagctgcttccaatgcaggtggatggtgagccatggatgcagccttgttgcactatcaaaataacacataagaaccaggctcctatgatgatggggccccctcaaaaatcttcattcttttctctgagaagaaagtctcgcagtaaagattag

SEQ ID NO: 117025 - DNA, 2376 bp, Artificial Sequence
  derived and/or modified sequence
atgggggaggaacgctgggtcagcctgactcccgaagagtttgaccagctccagaagtatagtgagtactccagcaaaaagattaaggatgccttgacagagtttaatgaggggggatccctgaagcagtatgatccacacgaacccatctcctacgatgtgtttaagctgttcatgcgtgcatatctcgaggttgacctaccccagccactgagtacacatctcttcctggctttcagccagaagcctagacatgagaccagcgatcatcctaccgaaggggcaagtaattctgaggccaacagcgccgatactaatatccagaacgccgataacgccactaaagccgatgaagcgtgcgcaccagacacagagtcaaatatggcagagaaacaagcacccgctgaggaccaagttgccgcaacacctctcgaaccaccagtgcctaggtcctcttcctccgagtctccagttgtgtacctgaaggacgtggtgtgttatctttctcttctagagacaggtcgccctcaggacaagctggaatttatgttcaggttgtacgactctgatgaaaatggcctgcttgatcaagctgagatggattgtatcgtgaaccaaatgctgcacattgcacagtacctcgaatgggacccgactgaacttcgcccaattctaaaggagatgcttcaaggaatggattacgaccgggacggattcgtttctttacaggaatgggtgcacggcggaatgaccaccattccgctgctagtgctgctggggatggatgactcaggcagcaaaggagatggacgacatgcctggaccatgaagcactttaaaaagccgacatactgcaacttttgccacatcatgctcatgggcgtacgcaaacaaggactgtgctgcacttactgtaagtatactgtgcatgaaaggtgcgtgtctagaaacattcccggttgtgtgaaaacatactccaaggcaaagcgctccggggaagttatgcagcacgcctgggttgagggtaacagctctgtgaaatgcgatcggtgtcacaaaagcataaagtgttaccagtcagttacggctaggcactgtgtgtggtgtcgcatgacatttcacagaaaatgtgagttgtccacactgtgtgacggcggtgaacttcgggatcatatattgctgcctactagcatctgtcctatcacccgtgaccgacccggagagaaatccgacggctgtgtgtccgcaaagggcgagctggtgatgcagtacaagatcatcccaactcccggaacccacccactgctggtgttagtcaaccccaagagcggtggcaggcaaggcgagaggattttgcgaaaatttcattacttattaaaccctaagcaggtgtttaatctggacaatggcggacccacccctgggctcaatttcttccgcgatacaccggactttcgggtcctggcttgtggaggagatggaacagtgggctggatcctcgactgcatcgacaaagccaactttgccaaacatccacctgttgcagtgctccccttgggaacgggcaatgacctggctcgttgcctgcgatgggggggaggttacgaggggggaagtctgacgaaaattctgaaggacatcgaacaatctccgctggtgatgctggatcgatggcacttggaagtcatcccacgcgaggaagtggagaatggagatcaggtgccatacagcataatgaacaactacttcagcattggggttgatgcctcaatcgcacatcggtttcacgtgatgcgtgaaaagcatcctgagaagttcaacagccggatgaagaacaagctgtggtacttcgaatttggtacttccgagaccttcgcagccacgtgcaaaaagctgcatgaccacattgagctggagtgtgatggtgtgggggttgacctgtcaaacatttttcttgaaggaattgctattttaaacatcccaagcatgtacggcggtactaacttgtggggggagaataaaaagaatagagcggtgatcagggagtctaggaagggtgtcacagacccaaaggagctgaagttttgtgtgcaggacctgtccgaccagttgctggaagtggtgggcctggaaggggcaatggaaatgggccagatatataccggtcttaaaagcgcaggacgtaggcttgcacaatgtgctagcgtcactatcagaaccaacaagctccttcccatgcaagtggatggcgaaccatggatgcagccctgttgcacaatcaaaatcactcataagaatcaagctcctatgatgatgggcccacctcagaagtccagcttcttctccctccgaagaaaatcgaggagtaaggattag

SEQ ID NO: 117026 - DNA, 2376 bp, Artificial Sequence
  derived and/or modified sequence
atgggcgaggagagatgggtgagcctgacccccgaggagttcgaccagctgcagaagtacagcgagtacagcagcaagaagatcaaggacgccctgaccgagttcaacgagggcggcagcctgaagcagtacgacccccacgagcccatcagctacgacgtgttcaagctgttcatgagagcctacctggaggtggacctgccccagcccctgagcacccacctgttcctggccttcagccagaagcccagacacgagaccagcgaccaccccaccgagggcgccagcaacagcgaggccaacagcgccgacaccaacatccagaacgccgacaacgccaccaaggccgacgaggcctgcgcccccgacaccgagagcaacatggccgagaagcaggcccccgccgaggaccaggtggccgccacccccctggagccccccgtgcccagaagcagcagcagcgagagccccgtggtgtacctgaaggacgtggtgtgctacctgagcctgctggagaccggcagaccccaggacaagctggagttcatgttcagactgtacgacagcgacgagaacggcctgctggaccaggccgagatggactgcatcgtgaaccagatgctgcacatcgcccagtacctggagtgggaccccaccgagctgagacccatcctgaaggagatgctgcagggcatggactacgacagagacggcttcgtgagcctgcaggagtgggtgcacggcggcatgaccaccatccccctgctggtgctgctgggcatggacgacagcggcagcaagggcgacggcagacacgcctggaccatgaagcacttcaagaagcccacctactgcaacttctgccacatcatgctgatgggcgtgagaaagcagggcctgtgctgcacctactgcaagtacaccgtgcacgagagatgcgtgagcagaaacatccccggctgcgtgaagacctacagcaaggccaagagaagcggcgaggtgatgcagcacgcctgggtggagggcaacagcagcgtgaagtgcgacagatgccacaagagcatcaagtgctaccagagcgtgaccgccagacactgcgtgtggtgcagaatgaccttccacagaaagtgcgagctgagcaccctgtgcgacggcggcgagctgagagaccacatcctgctgcccaccagcatctgccccatcaccagagacagacccggcgagaagagcgacggctgcgtgagcgccaagggcgagctggtgatgcagtacaagatcatccccacccccggcacccaccccctgctggtgctggtgaaccccaagagcggcggcagacagggcgagagaatcctgagaaagttccactacctgctgaaccccaagcaggtgttcaacctggacaacggcggccccacccccggcctgaacttcttcagagacacccccgacttcagagtgctggcctgcggcggcgacggcaccgtgggctggatcctggactgcatcgacaaggccaacttcgccaagcacccccccgtggccgtgctgcccctgggcaccggcaacgacctggccagatgcctgagatggggcggcggctacgagggcggcagcctgaccaagatcctgaaggacatcgagcagagccccctggtgatgctggacagatggcacctggaggtgatccccagagaggaggtggagaacggcgaccaggtgccctacagcatcatgaacaactacttcagcatcggcgtggacgccagcatcgcccacagattccacgtgatgagagagaagcaccccgagaagttcaacagcagaatgaagaacaagctgtggtacttcgagttcggcaccagcgagaccttcgccgccacctgcaagaagctgcacgaccacatcgagctggagtgcgacggcgtgggcgtggacctgagcaacatcttcctggagggcatcgccatcctgaacatccccagcatgtacggcggcaccaacctgtggggcgagaacaagaagaacagagccgtgatcagagagagcagaaagggcgtgaccgaccccaaggagctgaagttctgcgtgcaggacctgagcgaccagctgctggaggtggtgggcctggagggcgccatggagatgggccagatctacaccggcctgaagagcgccggcagaagactggcccagtgcgccagcgtgaccatcagaaccaacaagctgctgcccatgcaggtggacggcgagccctggatgcagccctgctgcaccatcaagatcacccacaagaaccaggcccccatgatgatgggccccccccagaagagcagcttcttcagcctgagaagaaagagcagaagcaaggactag

SEQ ID NO: 117027 - DNA, 5805 bp, Artificial Sequence
  derived and/or modified sequence
gccgcagtgccgtagtagcgggccacggagatagacagctttggagctgctgaactccgagcacagggtgaagaccccggcgctaccaaccacagcctggcagcctggtctccgcggcacccactggggctgcatccccctcccccgagagggctgcgcaggcgggaagacgcccagaggccagcttcggtcccccttctgtctctcggttcctctttcctcccaagtaagggaataaaccgcgaagaaggagcgccccgggccaccgcgcaaccaagtgttgcctggtgaggaagagccaggacttctgaatttaccttgaatacagacaggaggatgttgcctaaggaatagcagagatcttgtctcatcttctgagaggtgcctgctgctgctgtatacacttgagtgctcccagaagtctcctgaaaggcttacatcgcaaacctgcaatgagccaggccctgggctgggcctccacttcagcctagtgaacaaaactccatcactgccctttagccactcacataaagtttaaaaatgggtgaagaacggtgggtctccctcactccagaagaatttgaccaactccagaaatattcagaatattcctccaagaagataaaagatgccttgactgaatttaatgagggtgggagcctcaaacaatatgacccacatgagccgattagctatgatgtcttcaagctgttcatgagggcgtacctggaggtggaccttccccagccactgagcactcacctcttcctggccttcagccagaagcccagacacgagacctctgaccacccgacggagggagccagcaacagtgaggccaacagcgcagatactaatatacagaatgcagataatgccaccaaagcagacgaggcctgtgcccctgatactgaatcaaatatggctgagaagcaagcaccagctgaagaccaagtggctgcgacccccctggaaccccccgtccctcggtcttcaagctcggaatccccagtggtatacctgaaggatgttgtgtgctacctgtccctgctggagacggggaggcctcaggataagctggagttcatgtttcgcctctatgattcagatgagaacggtctcctggaccaagcggagatggattgcattgtcaaccaaatgctgcatattgcccagtacctggagtgggatcccacagagctgaggcctatattgaaggagatgctgcaagggatggactacgaccgggacggctttgtgtctctacaggaatgggtccatggagggatgaccaccatcccattgctggtcctcctggggatggatgactctggctccaagggggatgggcggcacgcctggaccatgaagcacttcaagaaaccaacctactgcaacttctgccatatcatgctcatgggcgtccgcaagcaaggcctgtgctgcacttactgtaaatacactgtccacgaacgctgtgtgtccagaaacattcctggttgtgtcaaaacgtactcaaaagccaaaaggagtggtgaggtgatgcagcacgcatgggtggaagggaactcctccgtcaagtgtgaccggtgccacaaaagtatcaagtgctaccagagtgtcaccgcgcggcactgcgtgtggtgccggatgacgtttcaccgcaaatgtgaattatcaacgttgtgtgacggtggggaactcagagaccacatcttactgcccacctccatatgccccatcacccgggacaggccaggtgagaagtctgatggctgcgtgtccgccaagggcgaacttgtcatgcagtataagatcatccccaccccgggtacccaccccctgctggtcttggtgaaccccaagagtggagggagacaaggagaaagaattcttcggaaattccactatctgctcaaccccaaacaagttttcaacctggacaatggggggcctactccagggttgaactttttccgtgatactccagacttccgtgttttggcctgtggtggagatgggacagttggctggattttggattgcattgataaggccaactttgcaaagcatccaccagtggctgtcctgcctcttggaacaggaaatgaccttgcccgttgtctccgctggggaggaggttatgaagggggcagcttgacaaaaatcctgaaagacattgagcagagccccttggtgatgctggaccgctggcatctggaagtcatccccagagaggaagtggaaaacggggaccaggtcccatacagcatcatgaacaactatttctccattggtgtggacgcttccattgcacacagattccatgtgatgagagagaaacatcctgaaaaattcaacagcaggatgaagaacaagctgtggtactttgaatttggcacctcggagacttttgcagcgacctgcaagaaactccacgaccacattgagttggagtgtgatggggttggggtggacctgagcaacatcttcctggaaggcattgccattctcaacattcccagcatgtacggaggcaccaatctctggggagaaaacaagaagaaccgggctgtgatccgggaaagcaggaagggtgtcactgaccccaaagaactgaaattctgcgttcaagacctcagtgaccagctccttgaagtggtggggctagaaggagccatggagatggggcagatctacaccggcctgaagagtgcaggcaggaggctggcccagtgcgcctctgtcaccatcaggacaaacaagctgctgccaatgcaagtggatggagaaccctggatgcagccatgttgcacgattaaaattactcacaagaaccaagcgcccatgatgatggggcctccccagaagagcagcttcttctcgttgagaaggaagagccgttcaaaagactaaacagtgtgccaaacaccagctaaaccaagagagaaagcaagaaactataatgcacactcacacacaatttatgtgcacactcacacatgcacacacacacacacatacacactcttctctaaccagtggaagcaaagccacccttcgggaagaaaacgtcaccttgccatacattctgtttcaacagtgggtacacccctaacagagccagtgccaacaaaacattttgaatggacttagggcccatgaggttgtggctggcttaggcagcaacctccacattcccacaggccttgagcagaattttctgagactgaagggaaatccccctttctttctaccagccctgcaagtttcctcatggacgctcgcgaggagcaggctgcaggtttcctgcctatggtgagatcagatgtggccaagggaaggagctctggttccagagaatttgcacaaagttccctctgtacagagacaaaacggcctccggctctcagagcataatccttggcagggctcagcaggcgcacgttggtttcttggtcgtcctttgagtgacaacttctccgtgaacctgctgaagaggcagaaaggctgtggaaagctgtatttccattcttgggtttctgcgccgtcggtgggcacttgttattttccaggaaccttctcctggtgtctacatgtttgcttagaggcggctccaagagcccccagagctgcctgcatagcacaccttagatgtggtatttattttcttagttctgtgaacacctgggagggagagcggagaaactgggatttatttttcaaattggtgtcataatattgtgtaaaaagggaaggaaaaaaaaaaccacccccagcttctttctttttcaagccaaagcgtgtttcctgtttgagttccaagccctggtggcagactattcctgaaggcagaaaagatgggaaggaaggaactttgctggggaaaccaggagacggttccctcctgcttctttgcactcaccactcccagagtatgacctgaaggaccttctgatggtcttaacgtgtgtgcgcgcgtgtgtgtgtgtgtgtgcgtgtatatatatatatttagcctatatatttatatatatatatatataaatatttatttactgatggacttttcctcattggaaaaaaaaaacataggtagtatgagacagaaagtggtaaggaaaaagaaggttctcactcccccactccaccgtttcattgtcaggacgcatctccctgtggtgatcacaagggttaaggggaatgaaagtagctccctattatgaacgaagagaccgagaactcctattctggatcctcaaaacaagcatgaaagacctgctgggctggatttactctcccatttgtcagataagaaaattgagtctcagaaaagttcagagacttttccatggtgtcttggctaatgcagcttgagagtaggtgccgttacaaagatatttaatggagaaaagaacccacacatctcagagtagggtcatttctggtcactgaaaagtgagtccacttggatccaggttgccagggaggaacaaacgtacagcacatgcgtggatgggatatccccacacaagaaaacgagcgcctcatgctgcttcccagaggttctctctgacctgaatggaaaagaagttggtctgagatcgaaggtactaaacagatcatcagactgaactctccacatgtcacctcatcatggtcatcatagtctcttagtttggaaacaaccttggctgcagggatgacctcagtggagagtcacaagaaggactgaggcgtcttctgcaagatactgccagccaggacagaggggtctcagcagagctcagtgggcttcattcagcaagtgccagcattaccatcctttcccaagggcaaggccatgcagagcttcattgggcctccatccctctctgagatttatcagtggaaacttggacccacttgatatcgttccactgagctgcctctaatcttgcattggacaggagctttggacaaagaagggaatattaagattgtgtgtacaaatggcacttaactgtgaaggaccacctaggagcaagatcttggaccattctgctcaacctaacagtgcagaatgctaagtaaggggaaaaccaggccacctgaagaatatctttaatgatggtattcttggtgatgggaccaacaagctccagaattactacaggtactatcttggaagccacttgtttctgaaactgaggcaggttcaggtttggggtcactgattctaagacatttacagaagttcgtgcatgtgtttcagccatgatccccaagattgaggctattgagacatggcactatcaacaggtgaaattgattctcagagactcacaggtctcatgaaggggcagtgcagaaaatggcccttacctgctgcaccctagtgcacaggacttgcaatgttgcttgagagacatatcccaagtccttcttagaggcatggagtataacaacttcagtggaattgcacttccagtttggtaaccttagtaaatcttgtgttgttgtttaatcgtgccttgcaaatcatcctttaaacactatgactgtggtttcttgtggtggagtccctcatcatagtgaccctcatagcaacctctgaggttagcagagaaggtattattatctcgatctcaatgaggagaacaaggcttaatgaggtttagtgacttctcaaagccacatggttagtcaggggagaacctaatcccttatttcttatcttattctgattctggccatgctacaaacatgttctcacctgccccccatgcttctaccccaacagcaataaaaactgtaaagcaggaa

SEQ ID NO: 117028 - protein, 942 aa, Artificial Sequence
  derived and/or modified sequence
MAAAAEPGARAWLGGGSPRPGSPACSPVLGSGGRARPGPGPGPGPERAGVRAPGPAAAPGHSFRKVTLTKPTFCHLCSDFIWGLAGFLCDVCNFMSHEKCLKHVRIPCTSVAPSLVRVPVAHCFGPRGLHKRKFCAVCRKVLEAPALHCEVCELHLHPDCVPFACSDCRQCHQDGHQDHDTHHHHWREGNLPSGARCEVCRKTCGSSDVLAGVRCEWCGVQAHSLCSAALAPECGFGRLRSLVLPPACVRLLPGGFSKTQSFRIVEAAEPGEGGDGADGSAAVGPGRETQATPESGKQTLKIFDGDDAVRRSQFRLVTVSRLAGAEEVLEAALRAHHIPEDPGHLELCRLPPSSQACDAWAGGKAGSAVISEEGRSPGSGEATPEAWVIRALPRAQEVLKIYPGWLKVGVAYVSVRVTPKSTARSVVLEVLPLLGRQAESPESFQLVEVAMGCRHVQRTMLMDEQPLLDRLQDIRQMSVRQVSQTRFYVAESRDVAPHVSLFVGGLPPGLSPEEYSSLLHEAGATKATVVSVSHIYSSQGAVVLDVACFAEAERLYMLLKDMAVRGRLLTALVLPDLLHAKLPPDSCPLLVFVNPKSGGLKGRDLLCSFRKLLNPHQVFDLTNGGPLPGLHLFSQVPCFRVLVCGGDGTVGWVLGALEETRYRLACPEPSVAILPLGTGNDLGRVLRWGAGYSGEDPFSVLLSVDEADAVLMDRWTILLDAHEAGSAENDTADAEPPKIVQMSNYCGIGIDAELSLDFHQAREEEPGKFTSRLHNKGVYVRVGLQKISHSRSLHKQIRLQVERQEVELPSIEGLIFINIPSWGSGADLWGSDSDTRFEKPRMDDGLLEVVGVTGVVHMGQVQGGLRSGIRIAQGSYFRVTLLKATPVQVDGEPWVQAPGHMIISAAGPKVHMLRKAKQKPRRAGTTRDARADAAPAPESDPR

SEQ ID NO: 117029 - DNA, 2829 bp, Artificial Sequence
  derived and/or modified sequence
atggctgctgccgctgagcccggggctcgagcctggctggggggcggatctccaagacctggctctcccgcatgtagtccagtgctcgggagcggagggcgggcccgaccaggacctggtcccgggcctggaccggagagagccggggtacgcgcacccggacccgcagcagcacctgggcactcatttagaaaggttacactgacaaagccgaccttctgccacttatgctcggattttatctggggcctcgccggcttcttgtgcgacgtctgtaacttcatgtctcacgagaaatgtctaaagcacgtgcgaatcccctgtacctccgtggccccgagcctggtgagggtgcccgtggctcactgcttcggtccccggggcctgcataagagaaaattctgcgctgtatgcaggaaagtcctcgaagcgccagctctgcactgcgaggtgtgcgagctccacttgcatcctgactgtgtgccctttgcttgcagcgattgtagacagtgtcatcaagatgggcatcaggaccatgatactcatcaccatcattggcgcgaaggcaaccttcctagcggggccaggtgtgaagtctgtcggaagacttgcgggtctagcgacgtccttgcaggcgtccgttgtgaatggtgtggagtccaggcccattcattatgttcggccgctctggctccagagtgtggatttggcaggctgagatccttagtcctgccgcctgcttgtgttcgattactgccggggggcttttctaaaacccagagcttcaggattgtagaggctgccgagccgggtgaaggcggggacggtgcggacggttccgctgccgtgggtccagggcgggaaacccaggccacacccgagtcgggtaagcagaccctgaagatttttgacggagatgacgcagttaggagatctcagttcagattggtgaccgtgtccaggctggccggcgcggaagaggtgctggaagcggcccttcgcgctcatcatattcctgaagaccccgggcacctggaactctgccggctacctcctagctctcaagcctgcgacgcttgggcgggggggaaggcggggtctgctgttatttccgaagagggacggagccccggctccggcgaggcaaccccggaggcatgggtcattagggccctacccagggcacaggaggtcctcaaaatttaccctggatggctcaaggtaggcgtcgcatacgttagcgtgagggtgacgccgaagagtactgcccggagcgttgtcctcgaggtgctaccccttctcggacgtcaggctgagtcacccgaatctttccaactggtggaagtggccatgggctgccggcatgttcagcgcactatgctcatggatgagcagccattactggatagactgcaggacattaggcagatgagtgtgcgtcaggtgagccaaacaaggttttatgtcgcagagagtcgcgatgttgctccccatgtgtcgctgtttgtggggggactcccaccgggcctctccccggaggagtactcatccctgctgcatgaggcgggcgcaaccaaggccaccgtcgtttccgtgagtcatatatatagctcccagggagccgtcgtcctagatgtcgcttgtttcgcagaggcagaacgcttatatatgctactcaaggatatggcggtccgcgggcggctcttgactgccctggtcttgcctgatttgcttcacgctaaactcccccctgactcatgtccccttttagtctttgtgaaccccaagtccggcggacttaaaggtcgtgacctcctatgttcgtttaggaaactcctcaatccacaccaagtttttgacttgaccaacggcggacctcttcctggattacatttgttctcacaagtcccctgttttagggtcctcgtttgtggcggggatggaaccgtaggctgggttcttggagccctagaggaaacacgctacagacttgcgtgtcctgaaccatccgttgctatacttccactcggcaccggaaacgacctcgggagagtgctacgatggggtgcgggctattccggagaggaccccttttcagtgttactcagcgtggatgaggcagatgcagtcctcatggacagatggaccatactgctggacgcgcacgaggccggaagcgctgagaacgatacagccgacgctgaacctcctaagattgtacagatgagcaattattgcggtataggcatcgatgccgagctcagtctggactttcatcaggcgagagaggaggaacctggcaaatttacctcacgtctccacaacaaaggggtgtacgtgcgggttggcctgcagaaaattagtcacagcaggtccctgcacaaacagatccggctccaggtagaacggcaggaggtcgagcttccctctatcgagggcctgatttttatcaacattccttcatgggggtctggagcagacctatggggctccgattccgacacacgcttcgagaagccccgaatggatgatggcctcctcgaagtggtcggtgtgacaggcgtagtgcacatgggacaggttcagggtggcctcaggtccggcattcgcattgcgcagggatcgtactttcgggtgactctactgaaggccactccggtacaggtagacggcgaaccatgggtccaggcaccaggtcatatgatcatctctgcagctggccccaaggtgcacatgctcagaaaggctaagcagaaaccacgccgcgcaggcactaccagagacgccagggctgatgctgctccggccccggagagcgatccacgctag

SEQ ID NO: 117030 - DNA, 2829 bp, Artificial Sequence
  derived and/or modified sequence
atggctgctgctgctgagcccggggcccgggcctggctgggcggcggcagcccccggcccggcagccctgcctgcagccctgtgctgggcagcggcggccgggcccggcccggccctggccctggccctggccctgagcgggccggcgtgcgggcccctggccctgctgctgcccctggccacagcttcaggaaggtgaccctgaccaagcccaccttctgccacctgtgcagcgacttcatctggggcctggccggcttcctgtgtgatgtgtgcaacttcatgagccatgagaagtgcctgaagcacgtgcgcatcccctgcacctctgtggcccccagcctggtgcgggtgcctgtggcccactgcttcggcccccggggcctgcacaagaggaagttctgtgctgtgtgcaggaaggtgctggaggccccagccctgcactgtgaggtgtgtgagctgcacctgcacccagactgtgtgccctttgcctgcagcgactgccggcagtgccaccaggacggccaccaggaccatgacacccaccaccaccactggagggagggcaacctgcccagcggggcccgctgtgaggtgtgcaggaagacctgtggcagcagtgatgtgctggccggcgtgcgctgtgagtggtgtggggtgcaggcccacagcctgtgcagcgctgccctggccccagaatgtggcttcggccgcctgcggagcctggtgctgcccccagcctgtgtgcggctgctgcccggcggcttcagcaagacccagagcttccgcatcgtggaggccgctgagcccggggagggcggagatggagcagatggcagcgctgctgtgggccctggccgggagacccaggccaccccagagagcggcaagcagaccctgaagatctttgatggagatgatgctgtgcggcgcagccagttccggctggtgacagtgtcccggctggccggggctgaggaggtgctggaggccgccctgcgggcccaccacatccctgaggaccccggccacctggagctgtgccgcctgccccccagcagccaggcctgtgatgcctgggccggcggcaaggccggcagcgctgtgatcagcgaggagggccgcagccctggcagcggggaggccaccccagaggcctgggtgatccgggccctgccccgggcccaggaggtgctgaagatctacccaggctggctgaaggtgggcgtggcctacgtgtctgtgcgggtgacccccaagagcacagcccggtctgtggtgctggaggtgctgcccctgctgggccggcaggccgagagccctgagagcttccagctggtggaggtggccatgggctgcagacatgtgcagaggaccatgctgatggatgagcagcccctgctggaccggctgcaggacatccggcagatgtctgtgcggcaggtgtcccagacccgcttctacgtggccgagagcagagatgtggccccccacgtgtccctgtttgtgggcggcctgcccccaggcctgagccctgaggagtacagcagcctgctgcacgaggccggggccaccaaggccaccgtggtgtctgtgagccacatctacagcagccagggcgctgtggtgctggatgtggcctgctttgctgaggccgagcggctgtacatgctgctgaaggacatggctgtgcggggccgcctgctgacagccctggtgctgcctgacctgctgcacgccaagctgcccccagacagctgccccctgctggtgtttgtgaaccccaagagcggcggcctgaagggccgggacctgctgtgcagcttcaggaagctgctgaacccccaccaggtgtttgacctgaccaatggaggccccctgcccggcctgcacctgttcagccaggtgccctgcttccgggtgctggtgtgtggaggagatggcaccgtgggctgggtgctgggcgccctggaggagacccgctaccgcctggcctgcccagagcccagcgtggccatcctgcccctgggcactggaaatgacctgggccgggtgctgcgctggggcgccggctacagcggggaggaccccttctctgtgctgctgtctgtggatgaagcagatgctgtgctgatggaccgctggaccatcctgctggatgcccacgaggccggcagcgcagaaaatgacacagcagatgctgagccccccaagatcgtgcagatgagcaactactgcggcatcggcattgatgctgagctgagcctggacttccaccaggcccgggaggaggagcccgggaagttcaccagccggctgcacaacaagggcgtgtatgtgcgggtgggcctgcagaagatcagccacagccgcagcctgcacaagcagatccggctgcaggtggagcggcaggaggtggagctgcccagcattgagggcctcatcttcatcaacatccccagctggggcagcggggctgacctgtggggcagtgacagcgacaccaggtttgagaagcccaggatggatgatggcctgctggaggtggtgggcgtgactggagtggtgcacatgggccaggtgcagggcggcctgcggagcggcatcagaattgcccagggcagctacttccgggtgaccctgctgaaggccacccctgtgcaggtggatggagagccctgggtgcaggcccctggccacatgatcatctctgctgctggccccaaggtgcacatgctgaggaaggccaagcagaagcccaggagagctggcaccaccagagatgcccgggcagatgctgccccagcccctgagagtgaccccaggtag

SEQ ID NO: 117031 - DNA, 2829 bp, Artificial Sequence
  derived and/or modified sequence
atggccgccgccgccgagcccggcgcccgggcctggctgggcggcgggtccccacgccccgggagtcccgcctgtagtccggtgctcgggagtgggggccgtgcccgtcccggtcctggcccgggacccggtcccgaaagagccggagtccgggctcccggtcccgccgccgcaccgggtcatagcttcagaaaagtgactctcacaaaacccactttctgccatctgtgtagcgattttatctggggactggccggctttctgtgcgatgtgtgcaactttatgagccatgaaaagtgtttgaagcatgtgcgaatcccctgcacctcagtggccccaagtcttgtgagggtccctgtggcacattgttttggaccccgcggactgcacaagcggaagttttgcgcagtgtgccggaaggtcctagaggctcccgctttacactgtgaggtgtgcgagcttcacctgcaccctgactgtgtcccttttgcctgctccgattgccgccaatgtcaccaggacggacaccaagatcacgacactcatcatcatcactggcgcgaaggcaacctgccctcaggagctcgatgcgaagtttgccgcaaaacctgtggttcatccgatgtcctggccggagtgcgttgcgagtggtgtggcgtacaggctcatagtttgtgctcagctgcactggcccctgagtgcgggtttggcaggctgcgcagcctagtcctcccccccgcatgcgtgaggctactccccggcggcttttccaaaacccaatcctttaggatcgtggaagccgctgagccaggcgagggtggtgatggcgcggacggcagcgctgccgtagggcctgggcgggagacacaggccactccagaatccggcaagcagacgctcaagatatttgacggcgatgacgccgtgcgccgcagccaattcagactggtgacagtgtctcggctcgcaggcgctgaggaagttttggaagcagcgctgcgagctcatcacatcccagaggaccccggtcatctggagctgtgcagactccccccctcttctcaggcctgcgacgcatgggccgggggaaaggcagggagtgccgtgataagcgaagaggggcggtctcctgggtccggcgaggccacacccgaggcttgggtgatcagagctctgccccgggcgcaggaggtcctgaagatttaccccgggtggctgaaagtgggtgtggcctacgtgtctgtccgcgtgacccctaagagtaccgcgcggagcgtggtgctagaggtgctaccactactgggtcgtcaggccgagtcacctgagagctttcagctcgtggaggtagcaatgggctgtcggcacgtgcagcgaaccatgctgatggatgagcaaccccttctagacagactgcaggacatccggcagatgagtgtccggcaagtttctcagacacgattttatgtggccgaaagccgtgatgtggctccccatgtctctctcttcgtcggcggtttgccccctgggctgtcaccagaggaatactcttcactcctgcacgaggcaggcgctacaaaggccaccgtggtgtccgttagccacatttattcttctcaaggcgccgtagtgctcgatgtagcctgtttcgcagaagctgagcgactgtacatgcttttgaaagacatggctgtgcgagggcgacttctgacagccctggtgctgccagacctgttacatgcaaaactccctccagactcatgcccactccttgtgttcgttaatcctaaatccggcggactgaaaggacgtgacctgctctgcagcttcaggaaattactcaacccccaccaggtgttcgacctcacaaacggcgggccactgcctggactgcatcttttcagccaggtcccctgctttagggttctggtttgcggtggcgatgggactgtagggtgggtcctcggggctctggaggagactagatacagactcgcctgtccagagccttccgttgcaatccttccactggggacaggtaatgacctgggtagggtgcttcgttggggcgcaggctattccggcgaagaccctttcagcgtgctgctgagcgtggatgaagcggatgcagtcttgatggataggtggacaatcctgctggatgcacacgaagctggttcggccgagaatgacacagcggacgcggaaccacctaagatcgtacagatgtcaaattattgcggaatcggcattgacgccgaactcagcctggatttccaccaggctcgtgaggaggaaccgggaaagtttacgagcagactgcataacaaaggggtgtatgtcagagtgggactgcaaaagatctcccatagtcgcagtctgcataaacagatcagactgcaggttgaacggcaggaagtggagcttccaagcattgagggcctcatcttcataaatattccaagctggggaagtggcgctgatttatgggggtcagactccgatactagattcgaaaaacctcggatggacgatgggctgctggaggttgttggtgtaacgggggtggtgcacatgggccaggtgcagggcggcttgaggagcgggatccgcatcgcacaggggagttattttcgcgtcaccctcctcaaggctacacccgtgcaggtggacggcgagccatgggtgcaggcccctgggcacatgataatcagtgctgccgggcccaaggtgcatatgctgaggaaggccaaacagaaacctagaagagcagggaccaccagagacgcacgcgctgatgctgcacccgccccagagtcggatcctcgctag

SEQ ID NO: 117032 - DNA, 2829 bp, Artificial Sequence
  derived and/or modified sequence
atggcagctgctgctgagcctggagctcgggcttggctcggcggaggctcacctcgtccaggcagtccagcatgcagccctgtcctcgggagtggcggtcgtgctagacctggccctgggccaggccctgggccagaacgggctggggtgagggcccctggtcccgctgctgcacccggacacagtttccgcaaagtgacattgaccaaacccaccttttgtcatttgtgttcagactttatttgggggctggcagggttcctctgcgatgtctgtaattttatgtctcatgaaaaatgcctgaaacacgttaggatcccatgcaccagcgtggcgccaagtctcgtgagggtgcccgtggcccactgcttcggccctcgcggtttacataaacggaagttttgcgcagtctgtagaaaggtgctggaagcacccgctttgcactgtgaagtgtgtgagctacacctccatccagactgtgtgccttttgcctgcagcgactgccgccagtgtcaccaagatggccaccaggaccacgatacacaccatcaccattggagagaggggaacctccctagcggagctcgatgcgaggtgtgtcgaaagacttgcggaagtagtgatgtgctagcgggtgtaagatgcgagtggtgcggagtgcaggcccatagcctgtgcagcgcagcactcgctccagagtgcgggttcggcagactgcggtccctagtccttcctccggcttgcgtgcggctattgcccggagggttctccaagacacagtcgtttcgcattgtggaggccgctgagccaggtgaaggaggggatggagcggacggatcagccgcagttgggcctggtagggagacccaagccacaccagaatctgggaagcagactttaaagatctttgatggcgatgacgctgtgcgccgatctcagttcaggttagttacggtttcccgccttgctggggcagaagaggtgctggaggcagccctacgggctcaccatatcccagaggatcctggacatctggaactctgtcgactgcccccatcctcacaggcttgtgacgcgtgggccggaggaaaagcaggttcagccgtgatatctgaagagggaaggtcgcccggttccggagaggcaacgcccgaagcatgggtcatccgcgcactgcccagggcacaggaggttctcaaaatttaccccggatggctgaaagtgggtgtcgcatacgtgtccgtgagggtgactccaaagagcacagcaagaagtgtggtgctggaggtgctgcccctgctcggcaggcaggccgagtcccccgaatcttttcaattggttgaagtggctatgggatgcagacatgtccaaagaactatgctgatggatgagcagcctcttctggatcggttgcaggatatccgacagatgtctgtgcggcaagtgagccagacccggttttatgttgcagagagtagggatgtggctcctcatgttagtctctttgtcgggggattgccacccggattgtctcctgaggaatactcctctctcctccatgaggccggagccaccaaggccactgttgtatctgtcagccacatctatagttcgcaaggcgcagtcgttctcgatgtggcatgttttgccgaagcagaaaggctctacatgctcctgaaagacatggccgtgcggggtcgccttctcaccgctttggtattgccggatttgctacacgccaagctccccccagactcttgtcctctgcttgtattcgtgaatccgaagtctggtggcctcaaaggtagggacctattgtgtagcttcaggaaacttctcaatccgcatcaggtgttcgacctgaccaatggagggccactccctggcctgcacctgtttagccaggttccatgtttcagagtcctggtctgcggaggcgatggcacggtcggctgggtcctgggagcactggaggagacaagatatcgactagcctgtcccgaaccttccgtggcgatactgccgcttggcactggaaacgatcttggtcgcgtcctgcggtggggcgcaggttactcaggggaagatcctttttccgtgcttctgagtgttgacgaagcagacgcagtgctgatggatcgctggaccattcttctcgatgcccacgaagccggatctgctgaaaatgacacagccgatgcagaaccccctaagatcgtccaaatgtccaactattgcggtataggaattgacgcggagttgagcctggacttccaccaggctcgtgaggaagaacctggcaaattcacaagccgcttgcacaacaaaggcgtttatgtccgcgtcgggttacaaaaaattagccactcacgaagcctgcataagcagatccggctgcaagtggagcgccaggaagtggagctgccatccatagagggcctgattttcatcaacataccaagctggggtagcggagctgacctgtggggctccgactccgatacaaggttcgagaagcctagaatggacgacggtctcctagaagtagtcggggtcaccggcgtcgtgcatatgggccaggtccagggcggactcagatcaggtatcagaattgcccaggggtcctacttccgggtgactcttctcaaggctacgcccgtgcaagtcgatggggagccctgggtgcaggccccaggacacatgattatctccgcagctgggccaaaagtgcacatgctgcggaaagccaaacagaagccacgcagggccggaactactagggacgcaagagctgacgcagcccctgcacctgagtctgatcctaggtag

SEQ ID NO: 117033 - DNA, 2829 bp, Artificial Sequence
  derived and/or modified sequence
atggccgccgccgccgagcccggcgccagagcctggctgggcggcggcagccccagacccggcagccccgcctgcagccccgtgctgggcagcggcggcagagccagacccggccccggccccggccccggccccgagagagccggcgtgagagcccccggccccgccgccgcccccggccacagcttcagaaaggtgaccctgaccaagcccaccttctgccacctgtgcagcgacttcatctggggcctggccggcttcctgtgcgacgtgtgcaacttcatgagccacgagaagtgcctgaagcacgtgagaatcccctgcaccagcgtggcccccagcctggtgagagtgcccgtggcccactgcttcggccccagaggcctgcacaagagaaagttctgcgccgtgtgcagaaaggtgctggaggcccccgccctgcactgcgaggtgtgcgagctgcacctgcaccccgactgcgtgcccttcgcctgcagcgactgcagacagtgccaccaggacggccaccaggaccacgacacccaccaccaccactggagagagggcaacctgcccagcggcgccagatgcgaggtgtgcagaaagacctgcggcagcagcgacgtgctggccggcgtgagatgcgagtggtgcggcgtgcaggcccacagcctgtgcagcgccgccctggcccccgagtgcggcttcggcagactgagaagcctggtgctgccccccgcctgcgtgagactgctgcccggcggcttcagcaagacccagagcttcagaatcgtggaggccgccgagcccggcgagggcggcgacggcgccgacggcagcgccgccgtgggccccggcagagagacccaggccacccccgagagcggcaagcagaccctgaagatcttcgacggcgacgacgccgtgagaagaagccagttcagactggtgaccgtgagcagactggccggcgccgaggaggtgctggaggccgccctgagagcccaccacatccccgaggaccccggccacctggagctgtgcagactgccccccagcagccaggcctgcgacgcctgggccggcggcaaggccggcagcgccgtgatcagcgaggagggcagaagccccggcagcggcgaggccacccccgaggcctgggtgatcagagccctgcccagagcccaggaggtgctgaagatctaccccggctggctgaaggtgggcgtggcctacgtgagcgtgagagtgacccccaagagcaccgccagaagcgtggtgctggaggtgctgcccctgctgggcagacaggccgagagccccgagagcttccagctggtggaggtggccatgggctgcagacacgtgcagagaaccatgctgatggacgagcagcccctgctggacagactgcaggacatcagacagatgagcgtgagacaggtgagccagaccagattctacgtggccgagagcagagacgtggccccccacgtgagcctgttcgtgggcggcctgccccccggcctgagccccgaggagtacagcagcctgctgcacgaggccggcgccaccaaggccaccgtggtgagcgtgagccacatctacagcagccagggcgccgtggtgctggacgtggcctgcttcgccgaggccgagagactgtacatgctgctgaaggacatggccgtgagaggcagactgctgaccgccctggtgctgcccgacctgctgcacgccaagctgccccccgacagctgccccctgctggtgttcgtgaaccccaagagcggcggcctgaagggcagagacctgctgtgcagcttcagaaagctgctgaacccccaccaggtgttcgacctgaccaacggcggccccctgcccggcctgcacctgttcagccaggtgccctgcttcagagtgctggtgtgcggcggcgacggcaccgtgggctgggtgctgggcgccctggaggagaccagatacagactggcctgccccgagcccagcgtggccatcctgcccctgggcaccggcaacgacctgggcagagtgctgagatggggcgccggctacagcggcgaggaccccttcagcgtgctgctgagcgtggacgaggccgacgccgtgctgatggacagatggaccatcctgctggacgcccacgaggccggcagcgccgagaacgacaccgccgacgccgagccccccaagatcgtgcagatgagcaactactgcggcatcggcatcgacgccgagctgagcctggacttccaccaggccagagaggaggagcccggcaagttcaccagcagactgcacaacaagggcgtgtacgtgagagtgggcctgcagaagatcagccacagcagaagcctgcacaagcagatcagactgcaggtggagagacaggaggtggagctgcccagcatcgagggcctgatcttcatcaacatccccagctggggcagcggcgccgacctgtggggcagcgacagcgacaccagattcgagaagcccagaatggacgacggcctgctggaggtggtgggcgtgaccggcgtggtgcacatgggccaggtgcagggcggcctgagaagcggcatcagaatcgcccagggcagctacttcagagtgaccctgctgaaggccacccccgtgcaggtggacggcgagccctgggtgcaggcccccggccacatgatcatcagcgccgccggccccaaggtgcacatgctgagaaaggccaagcagaagcccagaagagccggcaccaccagagacgccagagccgacgccgcccccgcccccgagagcgaccccagatag

SEQ ID NO: 117034 - DNA, 4636 bp, Artificial Sequence
  derived and/or modified sequence
gtaccgggccgtggagcggcggctcctgtacccccggcgcggacctaaaggggctcgggccgctcgggccgggaatggcggcggcggccgagcccggggcccgcgcctggctgggcggcggctccccgcgccccggcagcccggcctgcagccccgtgctgggctcaggaggccgcgcgcgcccggggccggggccggggccgggacccgagcgggcgggcgtcagagccccgggccccgctgccgcgccgggacacagcttccggaaggtgacgctcaccaagcccaccttctgccacctctgctccgacttcatctgggggctggccggcttcctgtgcgacgtctgcaatttcatgtctcatgagaagtgcctgaagcacgtgaggatcccgtgcacgagtgtggcacccagcctggtccgggttcctgtagcccactgcttcggcccccgggggctccacaagcgcaagttctgtgctgtctgccgcaaggtcctggaggcaccggcgctccactgcgaagtgtgtgagctgcacctccacccagactgtgtgcccttcgcctgcagtgactgccgccagtgccaccaggatgggcaccaggatcacgacacccatcaccaccactggcgggaggggaacctgccctcgggagcgcgctgcgaggtctgcaggaagacgtgcggctcctctgacgtgctggccggcgtgcgctgcgagtggtgcggggtccaggcgcactccctctgctccgcggcgctggctcccgagtgtggcttcgggcgtctgcgctccctggtcctgcctcccgcgtgcgtgcgccttctgcccggcggcttcagcaagacgcagagcttccgcatcgtggaggccgcggagccgggcgaggggggcgacggcgccgacgggagcgctgccgtgggtccaggcagagagacacaggcaactccggagtccgggaagcaaacgctgaagatctttgatggcgacgacgcggtgagaagaagccagttccgcctcgtcacggtgtcccgcctggccggtgccgaggaggtgctggaggccgcactgcgggcccaccacatccccgaggaccctggccacctggagctgtgccggctgcccccttcctctcaggcctgtgacgcctgggctgggggcaaggctgggagtgctgtgatctcggaggagggcagaagccccgggtccggcgaggccacgccagaggcctgggtcatccgggctctgccgcgggcccaggaggtcctgaagatctaccctggctggctcaaggtgggcgtggcctacgtgtccgtgcgagtgaccccgaagagcacggcccgctctgtggtgctggaggtcctgccgctgctcggccgccaggccgagagtcccgagagcttccagctggtggaggtggcgatgggctgcaggcacgtccagcggacgatgctgatggacgaacagcccctgctggaccggctacaggacatccggcagatgtctgtgcggcaggtgagccagacgcggttctacgtggcagagagcagggatgtagccccgcacgtctccctgtttgttggcggcctgcctcccggcctgtctcccgaggagtacagcagcctgctgcatgaggccggggctaccaaagccaccgtggtgtccgtgagtcacatctactcctcccaaggcgcggtagtgttggacgttgcctgctttgcggaggccgagcggctgtacatgctgctgaaggacatggctgtgcggggccggctgctcactgccctggtgctccccgacctgctgcacgcgaagctgcccccagacagctgtcccctccttgtgttcgtgaaccccaagagtggaggcctcaagggccgagacctgctctgcagcttccggaagctactgaaccctcatcaggtcttcgacctgaccaacggaggtcctcttcccgggctccacctgttctcccaggtgccctgcttccgggtgctggtgtgtggtggcgatggcactgtgggctgggtgcttggcgccctggaggagacacggtaccgactggcctgcccggagccttctgtggccatcctgcccctgggcacagggaatgaccttggtcgagtcctccgctggggggcgggctacagcggcgaggacccgttctccgtactgctgtctgtggacgaggccgacgccgtgctcatggaccgctggaccatcctgctggatgcccacgaggctggcagtgcagagaacgacacggcagacgcagagccccccaagatcgtgcagatgagtaactactgtggcattggcatcgacgcggagctgagcctggacttccaccaggcacgggaagaggagcctggcaagttcacaagcaggctgcacaacaagggtgtgtacgtgcgggtggggctgcagaagatcagtcactctcggagcctgcacaagcagatccggctgcaggtggagcggcaggaggtggagctgcccagtattgaaggcctcatcttcatcaacatccccagctggggctcgggggccgacctgtggggctccgacagcgacaccaggtttgagaagccacgcatggacgacgggctgctggaggttgtgggcgtgacgggcgtcgtgcacatgggccaggtccagggtgggctgcgctccggaatccggattgcccagggttcctacttccgagtcacgctcctcaaggccaccccggtgcaggtggacggggagccctgggtccaggccccggggcacatgatcatctcagctgctggccctaaggtgcacatgctgaggaaggccaagcagaagccgaggagggccgggaccaccagggatgcccgggcggatgctgcgcctgcccctgagagcgatcctaggtaggggtggctggggcagcccaagggctcgagccatctctgctcccgccagccttgttttcaggtggtctggaggcagctccacgtccacacagtggccggccctgtggtcggacctggctacagccctgaccacagcatcttcccagtgacggagcgggacccgccctcatcccattggtgacacatgttggtgtcacagccctcatcccactggagactggtgtgcgggtggcagtgttaccccgtgtcccgggtgggcgcagggctctggatggtgagccctctgccctgtgggggcctggtcctctcctcaggggtgggcacccatccctctccccactgagccccttgagctggacagtgctggatgcaggccgtccaggtgggtctgatctcactttgtgcccctcgggccgtccccctggccagtccttaagagcagcaggctccctggtgtgtccctgccccagcagacacaggctgccagtccctccagcctcacctccccgccctgggcagcaggtgtgggcagcgtgtgaggctgccgggtggtggtgactggtgacttccttgtgttcagggaagggagaaggtgccttcccttgttttctggccttgttatatacagatggcagcttggatctcaggtacagctccaggggcaggcagtgcccagctggacctggtggccctttcctagtgcctctgcttggggaggagaacctctgtccacgtggaggctaggaggtctcaggtgctgccctggcagcaccagagtgtgggccgggcccgagtgtctgcccctcggccctcagggtggggcacttagcacccagaagggaccaaaagcagggcatggcggtgcagaggagtttgggaggtgtaaacagcccatgcacgtggaggaggagctggctttcagccccagaccccacgctagcactttccacgctgcttgcccgctgttgatgtgcagttcccagtgcctgtgtgagccgacatctgctcagtcctatccctcgtcagcgtgtggagacccagctcctgcagccctcctgctcccacgcccccagacagcttggtggagggtcctgcatctgggccaggctggggtgcacccagccaaagacaaagctgcctccacgtgcccaaggattcagatggtgcactggccccgggaggagtctgaccaaaaatggagcccgctctgtggggaagccccgactcccccacgagaaacggtcccacggtgcggatctcccccttcccttgtggggcacagctggcctgggcctccaatcctgcggagctttcctgggtgtggctttgacctcagaagtggctctggtttggcctcaggagtgtggcctggcccagcctgctgcagcctcctggggggcccttgatgccactaatcccccgaccccccgcatctgccaaactgcacagacacacgcattgtaaggccgcttgtggcctccagcgtgcactcttgtttacgtcattgtcatcttcaagaccagtcctttgtgattagttttgcttcgcgagccctggtgtggactgtggtctgtatgaatcgtgtgtaactgtggtgaggggcttgtcctgtatgtgagtctgtacccaggtggggtctgtgccctgcacaccgggcccctctgtatttatcgctgcctgaatgcaacagtaatttatatccaggacaaatacagtctgggcgtcactatccta

SEQ ID NO: 117035 - protein, 501 aa, Artificial Sequence
  derived and/or modified sequence
MPSASASRKSQEKPREIMDAAEDYAKERYGISSMIQSQEKPDRVLVRVRDLTIQKADEVVWVRARVHTSRAKGKQCFLVLRQQQFNVQALVAVGDHASKQMVKFAANINKESIVDVEGVVRKVNQKIGSCTQQDVELHVQKIYVISLAEPRLPLQLDDAVRPEAEGEEEGRATVNQDTRLDNRVIDLRTSTSQAVFRLQSGICHLFRETLINKGFVEIQTPKIISAASEGGANVFTVSYFKNNAYLAQSPQLYKQMCICADFEKVFSIGPVFRAEDSNTHRHLTEFVGLDIEMAFNYHYHEVMEEIADTMVQIFKGLQERFQTEIQTVNKQFPCEPFKFLEPTLRLEYCEALAMLREAGVEMGDEDDLSTPNEKLLGHLVKEKYDTDFYILDKYPLAVRPFYTMPDPRNPKQSNSYDMFMRGEEILSGAQRIHDPQLLTERALHHGIDLEKIKAYIDSFRFGAPPHAGGGIGLERVTMLFLGLHNVRQTSMFPRDPKRLTP

SEQ ID NO: 117036 - protein, 401 aa, Artificial Sequence
  derived and/or modified sequence
MVKFAANINKESIVDVEGVVRKVNQKIGSCTQQDVELHVQKIYVISLAEPRLPLQLDDAVRPEAEGEEEGRATVNQDTRLDNRVIDLRTSTSQAVFRLQSGICHLFRETLINKGFVEIQTPKIISAASEGGANVFTVSYFKNNAYLAQSPQLYKQMCICADFEKVFSIGPVFRAEDSNTHRHLTEFVGLDIEMAFNYHYHEVMEEIADTMVQIFKGLQERFQTEIQTVNKQFPCEPFKFLEPTLRLEYCEALAMLREAGVEMGDEDDLSTPNEKLLGHLVKEKYDTDFYILDKYPLAVRPFYTMPDPRNPKQSNSYDMFMRGEEILSGAQRIHDPQLLTERALHHGIDLEKIKAYIDSFRFGAPPHAGGGIGLERVTMLFLGLHNVRQTSMFPRDPKRLTP

SEQ ID NO: 117037 - DNA, 1506 bp, Artificial Sequence
  derived and/or modified sequence
atgcccagcgccagcgccagcagaaagagccaggagaagcccagagagatcatggacgccgccgaggactacgccaaggagagatacggcatcagcagcatgatccagagccaggagaagcccgacagagtgctggtgagagtgagagacctgaccatccagaaggccgacgaggtggtgtgggtgagagccagagtgcacaccagcagagccaagggcaagcagtgcttcctggtgctgagacagcagcagttcaacgtgcaggccctggtggccgtgggcgaccacgccagcaagcagatggtgaagttcgccgccaacatcaacaaggagagcatcgtggacgtggagggcgtggtgagaaaggtgaaccagaagatcggcagctgcacccagcaggacgtggagctgcacgtgcagaagatctacgtgatcagcctggccgagcccagactgcccctgcagctggacgacgccgtgagacccgaggccgagggcgaggaggagggcagagccaccgtgaaccaggacaccagactggacaacagagtgatcgacctgagaaccagcaccagccaggccgtgttcagactgcagagcggcatctgccacctgttcagagagaccctgatcaacaagggcttcgtggagatccagacccccaagatcatcagcgccgccagcgagggcggcgccaacgtgttcaccgtgagctacttcaagaacaacgcctacctggcccagagcccccagctgtacaagcagatgtgcatctgcgccgacttcgagaaggtgttcagcatcggccccgtgttcagagccgaggacagcaacacccacagacacctgaccgagttcgtgggcctggacatcgagatggccttcaactaccactaccacgaggtgatggaggagatcgccgacaccatggtgcagatcttcaagggcctgcaggagagattccagaccgagatccagaccgtgaacaagcagttcccctgcgagcccttcaagttcctggagcccaccctgagactggagtactgcgaggccctggccatgctgagagaggccggcgtggagatgggcgacgaggacgacctgagcacccccaacgagaagctgctgggccacctggtgaaggagaagtacgacaccgacttctacatcctggacaagtaccccctggccgtgagacccttctacaccatgcccgaccccagaaaccccaagcagagcaacagctacgacatgttcatgagaggcgaggagatcctgagcggcgcccagagaatccacgacccccagctgctgaccgagagagccctgcaccacggcatcgacctggagaagatcaaggcctacatcgacagcttcagattcggcgcccccccccacgccggcggcggcatcggcctggagagagtgaccatgctgttcctgggcctgcacaacgtgagacagaccagcatgttccccagagaccccaagagactgaccccctag

SEQ ID NO: 117038 - DNA, 1506 bp, Artificial Sequence
  derived and/or modified sequence
atgccatcggcctctgcctccagaaaatctcaggagaagccaagagagatcatggatgccgccgaggactatgccaaggagcgctacggaatcagttccatgatccaaagtcaagaaaagccagatcgagtgctggtgagagtccgcgacctgacgattcagaaggcagacgaggtggtctgggtgagggctagagtgcacaccagtagggcgaaaggaaagcagtgtttcctggtgctacgacagcagcagtttaacgttcaggctctcgtggccgtgggggaccacgccagtaagcagatggtcaaattcgctgcgaacatcaacaaagagtcaatcgttgacgtggaaggcgtggtaagaaaagtgaaccaaaagatcggaagctgcacccaacaggacgtcgaacttcacgtccagaagatctacgtcatcagcctcgccgagccacgcctgcccttgcagctcgacgatgctgtgcgccccgaagcagaaggggaagaagaaggacgggccaccgtgaatcaggacacccgtctggacaatcgagtgattgacctccggacctctacatcacaagcagtgttccgacttcagtccggcatttgtcacctcttccgtgaaacactgattaacaagggttttgtggagatacagacccctaagataatctccgctgcttctgaggggggcgcaaatgtatttaccgtttcttacttcaaaaataatgcctatctggcccagagccctcagctctacaagcagatgtgcatatgtgcagactttgagaaggtattctcaatcggtcctgtctttagggcagaagacagtaatacccatagacaccttacagaatttgtgggcctagatattgaaatggcgtttaattatcattatcatgaagtcatggaggagattgccgacaccatggtacagattttcaaagggttgcaggagaggtttcagactgagatccagactgttaacaagcagttcccatgtgagccttttaaatttctggagcccacactccgcctggagtactgtgaggcgctcgcgatgctgagagaggccggggttgagatgggtgatgaagacgatctctccacccctaatgagaagctactcggccacctggtaaaggaaaagtatgatacggatttctatatcctagataagtatccactggccgtacgcccattttacacaatgccagacccgagaaacccgaagcagtcaaatagttacgatatgtttatgcggggggaggaaatcctttcaggcgctcagcggatccacgacccccagcttcttaccgaaagagccctgcatcatggcatcgatctagagaagataaaggcctacattgattcctttaggttcggagcccccccacatgccggtggtggtattggattagagagggtgactatgctcttcctgggacttcataatgtgcggcagacatcaatgttcccacgggacccgaagagactcactccctag

SEQ ID NO: 117039 - DNA, 1506 bp, Artificial Sequence
  derived and/or modified sequence
atgcccagcgccagcgccagcaggaagagccaggagaagccccgggagatcatggatgctgctgaggactatgccaaggagagatatggcatcagctccatgatccagagccaggagaagccagacagagtgctggtgcgggtgcgggacctgaccatccagaaggcagatgaggtggtgtgggtgcgggcccgggtgcacaccagccgggccaagggcaagcagtgcttcctggtgctgcggcagcagcagttcaacgtgcaggccctggtggccgtgggggaccacgccagcaagcagatggtgaagtttgctgccaacatcaacaaggagagcatcgtggatgtggagggcgtggtgaggaaggtgaaccagaagattggcagctgcacccagcaggatgtggagctgcacgtgcagaagatctacgtgatcagcctggccgagccccggctgcccctgcagctggatgatgctgtgcggcctgaggccgagggggaggaggagggccgggccaccgtgaaccaggacacccggctggacaacagagtgattgacctgcggaccagcaccagccaggccgtgttccggctgcagagcggcatctgccacctgttccgggagaccctcatcaacaagggctttgtggagatccagacccccaagatcatctctgctgccagcgagggcggggccaacgtgttcaccgtgtcctacttcaagaacaatgcctacctggcccagagcccccagctgtacaagcagatgtgcatctgtgccgactttgagaaggtgttcagcatcggccctgtgttccgggcagaggacagcaacacccaccgccacctgacagaatttgtgggcctggacatcgagatggccttcaactaccactaccacgaggtgatggaggagattgctgacaccatggtgcagatcttcaagggcctgcaggagcgcttccagacagagatccagacagtgaacaagcagttcccctgtgagcccttcaagttcctggagcccaccctgcggctggagtactgtgaggccctggccatgctgcgggaggccggcgtggagatgggagatgaagatgacctgagcaccccaaatgagaagctgctgggccacctggtgaaggagaagtatgacacagacttctacatcctggacaagtaccccctggccgtgcggcccttctacaccatgccagaccccaggaaccccaagcagagcaacagctatgacatgttcatgagaggagaggagatcctgagcggggcccagagaattcatgacccccagctgctgacagagcgggccctgcaccacggcatcgacctggagaagatcaaggcctacatcgacagcttccgctttggagcccctcctcatgctgggggcggcatcggcctggagcgggtgaccatgctgttcctgggcctgcacaacgtgcggcagacctccatgttcccccgggaccccaagaggctgaccccctag

SEQ ID NO: 117040 - DNA, 1506 bp, Artificial Sequence
  derived and/or modified sequence
atgcccagcgccagcgccagccggaagagccaggagaagccccgggagataatggatgccgccgaggactatgccaaggagcgttacggaatttcttctatgattcagagtcaggagaagcccgatcgagtcctggttcgggtaagggatctcaccatccagaaggccgacgaagtcgtatgggttagggccagagttcataccagtagagctaagggcaagcagtgttttctcgtgctgcggcaacagcaattcaacgttcaggccttggttgcggtcggggatcacgcatcgaaacagatggttaaatttgctgcaaatatcaacaaagaaagcatcgttgatgtcgaaggagtggtgcgcaaggtgaatcaaaaaatcgggtcatgcacacaacaggatgtggaactccatgtgcaaaagatctatgtgatatccctggccgaaccccggctccctctgcaattggacgacgctgtgcgcccagaggctgagggcgaggaggaaggtagggcaaccgtgaatcaggacacacgtcttgacaaccgggtgattgacctcagaacatcgacctcccaagccgtgtttcggctgcagtccggcatatgtcatctgttcagagaaactctcattaacaagggcttcgtcgaaatccagacacctaagatcatctccgccgcgagtgagggaggagcaaacgtgttcactgtgtcttattttaagaacaatgcctacttagctcagtctccacaactgtacaagcagatgtgtatctgcgccgatttcgagaaagtgttctccatcggcccggtgtttagagctgaggacagtaacacgcaccgacacctgaccgaatttgtgggacttgatatcgaaatggcatttaattatcactatcacgaagtcatggaagaaattgctgacactatggtgcaaatcttcaaagggctacaggagcgcttccagactgagatccaaacagtgaataaacaattcccttgcgaacccttcaaattcctcgagcctaccctcaggctcgaatactgtgaagctttagctatgctccgggaggctggcgtcgagatgggagatgaggatgatctgtccacaccaaacgagaagctcctgggccatcttgtaaaagaaaaatatgacacagacttctatatactggacaagtatccccttgccgtgcgccctttctatacaatgccagacccacgaaatcctaagcagagtaatagctacgacatgttcatgcggggagaagagatcctttctggagctcagaggattcacgatcctcagctgctgactgagagggcccttcaccatggcatcgacctggaaaagatcaaagcctacatcgactcattccgcttcggcgccccaccacatgccggaggaggaataggattggagcgtgtgacaatgctctttctgggcctgcataatgtgcgccagacaagcatgtttcctagagacccgaaacggctgacaccatag

SEQ ID NO: 117041 - DNA, 2361 bp, Artificial Sequence
  derived and/or modified sequence
gagaccctgcgcgcggccgccagcgctccgggatctcgagatagccgcagctctcgcgatctttctggagccgcacctccacgcggagtccgagcgcgtgtgctgagaccccagggtcgggagggcggagactgggagggagggagaagcccctttggcctgccttacggaagcctgcgagggagggtggtgtccactgcccagttccgtgtcccgatgcccagcgccagcgccagccgcaagagtcaggagaagccgcgggagatcatggacgcggcggaagattatgctaaagagagatatggaatatcttcaatgatacaatcacaagaaaaaccagatcgagttttggttcgggttagagacttgacaatacaaaaagctgatgaagttgtttgggtacgtgcaagagttcatacaagcagagctaaagggaaacagtgcttcttagtcctacgtcagcagcagtttaatgtccaggctcttgtggcggtgggagaccatgcaagcaagcagatggttaaatttgctgccaacatcaacaaagagagcattgtggatgtagaaggtgttgtgagaaaagtgaatcagaaaattggaagctgtacacagcaagacgttgagttacatgttcagaagatttatgtgatcagtttggctgaaccccgtctgcccctgcagctggatgatgctgttcggcctgaggcagaaggagaagaggaaggaagagctactgttaaccaggatacaagattagacaacagagtcattgatcttaggacatcaactagtcaggcagtcttccgtctccagtctggcatctgccatctcttccgagaaactttaattaacaaaggttttgtggaaatccaaactcctaaaattatttcagctgccagtgaaggaggagccaatgtttttactgtgtcatattttaaaaataatgcatacctggctcagtccccacagctatataagcaaatgtgcatttgtgctgattttgagaaggttttctctattggaccagtattcagagcggaagactctaatacccatagacatctaactgagtttgttggtttggacattgaaatggcttttaattaccattaccacgaagttatggaagaaattgctgacaccatggtacaaatattcaaaggacttcaagaaaggtttcagactgaaattcaaacagtgaataaacagttcccatgtgagccattcaaatttttggagccaactctaagactagaatattgtgaagcattggctatgcttagggaagctggagtcgaaatgggagatgaagacgatctgagcacaccaaatgaaaagctgttgggtcatttggtaaaggaaaagtatgatacagatttttatattcttgataaatatccattggctgtaagacctttctataccatgcctgacccaagaaatcccaaacagtccaactcttacgatatgttcatgagaggagaagaaatattgtcaggagctcaaagaatacatgatcctcaactgctaacagagagagctttacatcatggaattgatttggagaaaattaaggcttacattgattccttccgctttggagcccctcctcatgctggtggaggcattggattggaacgagttactatgctgtttctgggattgcataatgttcgtcagacctccatgttccctcgtgatcccaaacgactcactccttaaattcacactttgccacttaactccagtgtggatgacagagcgagaccctgcctcaaaaaaaaaaaaaaaaaaagaaagccacacttattcttttcagtaacctgctagtgcacaggctgtactttaggtacttaaaatatgcactagaataaatttgcaaggccctaaaatatcactgttatttttggagtaattcagtataggttcgtttaaaagagatttttataacttcagacatgcatcagtaggaaataacttgagaaattcatatggttatgttacaaattcatattctgttactacagtaaacgttaagagttttaaacagttaagattgtacaatttttcttcttttctatattacaagggccccagtgttaatgtcttagattttcagtatttgaacttatttttttaaattctgtcattgagataagaataattcaggtagcatctgaaattttaatgaatgtataattggcatatcatggaaaattaaccagaaagtatcagttcttaaaagttatgcctagaaattatgtaaagctaaactactggttagaaagtattcagtgtaatattgtattaatttgttaaattctaaacttgaatttcaataaaattttaaagctaattgta

SEQ ID NO: 117042 - DNA, 1526 bp, Artificial Sequence
  derived and/or modified sequence
tccactgcccagttccgtgtcccgatgcccagcgccagcgccagccgcaagagtcaggagaagccgcgggagatcatggacgcggcggaaatcgagttttggttcgggttagagacttgacaatacaaaaagctgatgaagttgtttgggtacgtgcaagagttcatacaagcagagctaaagggaaacagtgcttcttagtcctacgtcagcagcagtttaatgtccaggctcttgtggcggtgggagaccatgcaagcaagcagatggttaaatttgctgccaacatcaacaaagagagcattgtggatgtagaaggtgttgtgagaaaagtgaatcagaaaattggaagctgtacacagcaagacgttgagttacatgttcagaagatttatgtgatcagtttggctgaaccccgtctgcccctgcagctggatgatgctgttcggcctgaggcagaaggagaagaggaaggaagagctactgttaaccaggatacaagattagacaacagagtcattgatcttaggacatcaactagtcaggcagtcttccgtctccagtctggcatctgccatctcttccgagaaactttaattaacaaaggttttgtggaaatccaaactcctaaaattatttcagctgccagtgaaggaggagccaatgtttttactgtgtcatattttaaaaataatgcatacctggctcagtccccacagctatataagcaaatgtgcatttgtgctgattttgagaaggttttctctattggaccagtattcagagcggaagactctaatacccatagacatctaactgagtttgttggtttggacattgaaatggcttttaattaccattaccacgaagttatggaagaaattgctgacaccatggtacaaatattcaaaggacttcaagaaaggtttcagactgaaattcaaacagtgaataaacagttcccatgtgagccattcaaatttttggagccaactctaagactagaatattgtgaagcattggctatgcttagggaagctggagtcgaaatgggagatgaagacgatctgagcacaccaaatgaaaagctgttgggtcatttggtaaaggaaaagtatgatacagatttttatattcttgataaatatccattggctgtaagacctttctataccatgcctgacccaagaaatcccaaacagtccaactcttacgatatgttcatgagaggagaagaaatattgtcaggagctcaaagaatacatgatcctcaactgctaacagagagagctttacatcatggaattgatttggagaaaattaaggcttacattgattccttccgctttggagcccctcctcatgctggtggaggcattggattggaacgagttactatgctgtttctgggattgcataatgttcgtcagacctccatgttccctcgtgatcccaaacgactcactccttaaattcacactttgccacttaactccagtgtggatgacagagcgagaccctgcctc

SEQ ID NO: 117043 - DNA, 1506 bp, Artificial Sequence
  derived and/or modified sequence
atgccgtcagcctccgccagcaggaaatctcaggagaaacctcgggaaatcatggacgcagcagaagactacgccaaagagaggtacggcatcagtagtatgattcagtctcaggagaagcctgatcgggtcctggtccgcgtgcgagatctcacaatacagaaagctgatgaggtggtctgggtaagagcaagggttcacaccagtcgggcaaaagggaagcagtgttttctggtgttacggcagcaacagttcaacgttcaagcgcttgtggcagtcggggatcatgcttcaaaacagatggtgaagtttgccgcaaatatcaataaagaatcaattgtcgacgtggaaggagtcgtcagaaaggtgaatcaaaaaattggcagctgcacccagcaggatgtggagctacatgtgcaaaaaatatatgtgatctccctggcagaacctcgattaccactgcagctggatgatgccgtgaggccggaggcagaaggcgaggaggagggtcgagccacagtgaaccaagacacgagactcgataatcgggtgatcgatctgaggacctccacatctcaggccgtcttcagactgcagtccggcatctgccacttattccgcgagactttgattaacaagggattcgttgagatccagacaccaaaaatcatatccgccgctagcgaggggggagcaaatgtatttaccgtgtcatacttcaaaaacaacgcttatctcgctcagagtccgcagctgtacaagcagatgtgtatttgcgccgactttgagaaggtgttcagcatcggccctgtatttcgagccgaggactccaacactcataggcacctgacagaattcgtgggtctcgacattgagatggcgtttaactatcactatcacgaagtgatggaggagattgcggataccatggttcagatattcaagggacttcaggagcgctttcagactgagatccagaccgtgaacaagcagtttccctgtgagccttttaaattcctggagcccaccctcaggctggagtattgcgaggcccttgctatgcttagagaagccggagtagaaatgggagatgaggacgatctctctacacctaacgaaaaactcctgggacacctagtgaaagaaaagtatgacacagatttctatattctcgacaaataccctctggctgtaaggccattctacactatgccggatccccgaaatccaaaacagtcaaacagctacgacatgtttatgcgcggagaggaaatcctctcaggagcccagagaatccacgatccccaactcctcaccgagagggcactgcaccacggaattgatttagagaagatcaaagcctacatcgacagctttagattcggtgcccctcctcatgctgggggtggtataggcctcgagcgggtcacaatgctcttcctgggtctccacaacgtccggcagacgagcatgttccccagggaccccaagcgattgacaccttag

SEQ ID NO: 117044 - protein, 740 aa, Artificial Sequence
  derived and/or modified sequence
MATANSIIVLDDDDEDEAAAQPGPSHPLPNAASPGAEAPSSSEPHGARGSSSSGGKKCYKLENEKLFEEFLELCKMQTADHPEVVPFLYNRQQRAHSLFLASAEFCNILSRVLSRARSRPAKLYVYINELCTVLKAHSAKKKLNLAPAATTSNEPSGNNPPTHLSLDPTNAENTASQSPRTRGSRRQIQRLEQLLALYVAEIRRLQEKELDLSELDDPDSAYLQEARLKRKLIRLFGRLCELKDCSSLTGRVIEQRIPYRGTRYPEVNRRIERLINKPGPDTFPDYGDVLRAVEKAAARHSLGLPRQQLQLMAQDAFRDVGIRLQERRHLDLIYNFGCHLTDDYRPGVDPALSDPVLARRLRENRSLAMSRLDEVISKYAMLQDKSEEGERKKRRARLQGTSSHSADTPEASLDSGEGPSGMASQGCPSASRAETDDEDDEESDEEEEEEEEEEEEEATDSEEEEDLEQMQEGQEDDEEEDEEEEAAAGKDGDKSPMSSLQISNEKNLEPGKQISRSSGEQQNKGRIVSPSLLSEEPLAPSSIDAESNGEQPEELTLEEESPVSQLFELEIEALPLDTPSSVETDISSSRKQSEEPFTTVLENGAGMVSSTSFNGGVSPHNWGDSGPPCKKSRKEKKQTGSGPLGNSYVERQRSVHEKNGKKICTLPSPPSPLASLAPVADSSTRVDSPSHGLVTSSLCIPSPARLSQTPHSQPPRPGTCKTSVATQCDPEEIIVLSDSD

SEQ ID NO: 117045 - protein, 178 aa, Artificial Sequence
  derived and/or modified sequence
MATANSIIVLDDDDEDEAAAQPGPSHPLPNAASPGAEAPSSSEPHGARGSSSSGGKKCYKLENEKLFEEFLELCKMQTADHPEVVPFLYNRQQRAHSLFLASAEFCNILSRVLSRARSRPAKLYVYINELCTVLKAHSAKKKLNLAPAATTSNEPSGNNPPTHLSLDPTNAENTASQS

SEQ ID NO: 117046 - protein, 48 aa, Artificial Sequence
  derived and/or modified sequence
MATANSIIVLDDDDEDEAAAQPGPSHPLPNAASPGAEAPSSSEPHGAR

SEQ ID NO: 117047 - protein, 130 aa, Artificial Sequence
  derived and/or modified sequence
MATANSIIVLDDDDEDEAAAQPGPSHPLPNAASPGAEAPSSSEPHGARGSSSSGGKKCYKLENEKLFEEFLELCKMQTADHPEVVPFLYNRQQRAHSLFLASAEFCNILSRVLSRARSRPAKLYVYINEL

SEQ ID NO: 117048 - DNA, 2223 bp, Artificial Sequence
  derived and/or modified sequence
atggccaccgccaacagcatcatcgtgctggacgacgacgacgaggacgaggccgccgcccagcccggccccagccaccccctgcccaacgccgccagccccggcgccgaggcccccagcagcagcgagccccacggcgccagaggcagcagcagcagcggcggcaagaagtgctacaagctggagaacgagaagctgttcgaggagttcctggagctgtgcaagatgcagaccgccgaccaccccgaggtggtgcccttcctgtacaacagacagcagagagcccacagcctgttcctggccagcgccgagttctgcaacatcctgagcagagtgctgagcagagccagaagcagacccgccaagctgtacgtgtacatcaacgagctgtgcaccgtgctgaaggcccacagcgccaagaagaagctgaacctggcccccgccgccaccaccagcaacgagcccagcggcaacaacccccccacccacctgagcctggaccccaccaacgccgagaacaccgccagccagagccccagaaccagaggcagcagaagacagatccagagactggagcagctgctggccctgtacgtggccgagatcagaagactgcaggagaaggagctggacctgagcgagctggacgaccccgacagcgcctacctgcaggaggccagactgaagagaaagctgatcagactgttcggcagactgtgcgagctgaaggactgcagcagcctgaccggcagagtgatcgagcagagaatcccctacagaggcaccagataccccgaggtgaacagaagaatcgagagactgatcaacaagcccggccccgacaccttccccgactacggcgacgtgctgagagccgtggagaaggccgccgccagacacagcctgggcctgcccagacagcagctgcagctgatggcccaggacgccttcagagacgtgggcatcagactgcaggagagaagacacctggacctgatctacaacttcggctgccacctgaccgacgactacagacccggcgtggaccccgccctgagcgaccccgtgctggccagaagactgagagagaacagaagcctggccatgagcagactggacgaggtgatcagcaagtacgccatgctgcaggacaagagcgaggagggcgagagaaagaagagaagagccagactgcagggcaccagcagccacagcgccgacacccccgaggccagcctggacagcggcgagggccccagcggcatggccagccagggctgccccagcgccagcagagccgagaccgacgacgaggacgacgaggagagcgacgaggaggaggaggaggaggaggaggaggaggaggaggaggccaccgacagcgaggaggaggaggacctggagcagatgcaggagggccaggaggacgacgaggaggaggacgaggaggaggaggccgccgccggcaaggacggcgacaagagccccatgagcagcctgcagatcagcaacgagaagaacctggagcccggcaagcagatcagcagaagcagcggcgagcagcagaacaagggcagaatcgtgagccccagcctgctgagcgaggagcccctggcccccagcagcatcgacgccgagagcaacggcgagcagcccgaggagctgaccctggaggaggagagccccgtgagccagctgttcgagctggagatcgaggccctgcccctggacacccccagcagcgtggagaccgacatcagcagcagcagaaagcagagcgaggagcccttcaccaccgtgctggagaacggcgccggcatggtgagcagcaccagcttcaacggcggcgtgagcccccacaactggggcgacagcggccccccctgcaagaagagcagaaaggagaagaagcagaccggcagcggccccctgggcaacagctacgtggagagacagagaagcgtgcacgagaagaacggcaagaagatctgcaccctgcccagcccccccagccccctggccagcctggcccccgtggccgacagcagcaccagagtggacagccccagccacggcctggtgaccagcagcctgtgcatccccagccccgccagactgagccagaccccccacagccagccccccagacccggcacctgcaagaccagcgtggccacccagtgcgaccccgaggagatcatcgtgctgagcgacagcgactag

SEQ ID NO: 117049 - DNA, 537 bp, Artificial Sequence
  derived and/or modified sequence
atggccaccgccaacagcatcatcgtgctggacgacgacgacgaggacgaggccgccgcccagcccggccccagccaccccctgcccaacgccgccagccccggcgccgaggcccccagcagcagcgagccccacggcgccagaggcagcagcagcagcggcggcaagaagtgctacaagctggagaacgagaagctgttcgaggagttcctggagctgtgcaagatgcagaccgccgaccaccccgaggtggtgcccttcctgtacaacagacagcagagagcccacagcctgttcctggccagcgccgagttctgcaacatcctgagcagagtgctgagcagagccagaagcagacccgccaagctgtacgtgtacatcaacgagctgtgcaccgtgctgaaggcccacagcgccaagaagaagctgaacctggcccccgccgccaccaccagcaacgagcccagcggcaacaacccccccacccacctgagcctggaccccaccaacgccgagaacaccgccagccagagctag

SEQ ID NO: 117050 - DNA, 147 bp, Artificial Sequence
  derived and/or modified sequence
atggccaccgccaacagcatcatcgtgctggacgacgacgacgaggacgaggccgccgcccagcccggccccagccaccccctgcccaacgccgccagccccggcgccgaggcccccagcagcagcgagccccacggcgccagatag

SEQ ID NO: 117051 - DNA, 393 bp, Artificial Sequence
  derived and/or modified sequence
atggccaccgccaacagcatcatcgtgctggacgacgacgacgaggacgaggccgccgcccagcccggccccagccaccccctgcccaacgccgccagccccggcgccgaggcccccagcagcagcgagccccacggcgccagaggcagcagcagcagcggcggcaagaagtgctacaagctggagaacgagaagctgttcgaggagttcctggagctgtgcaagatgcagaccgccgaccaccccgaggtggtgcccttcctgtacaacagacagcagagagcccacagcctgttcctggccagcgccgagttctgcaacatcctgagcagagtgctgagcagagccagaagcagacccgccaagctgtacgtgtacatcaacgagctgtag

SEQ ID NO: 117052 - DNA, 702 bp, Artificial Sequence
  derived and/or modified sequence
ggtgggagtgggaaggaaggcggagggaaccatgcgaggttctgagaattgcggcgagggtcgcctcgagagacggtttctgaggggctcattctgaggccccatccccttccagcaggaattctgaaatccccaccacttcctccctccgggggatttgatcccctatggccaccgctaacagcatcatcgtgctggatgatgatgacgaagatgaagcagctgctcagccagggccctcccacccactccccaatgcggcctcacctggggcagaagcccctagctcctctgagcctcatggggccagaggaagcagtagttcgggcggcaagaaatgctacaagctggagaatgagaagctgttcgaagagttccttgaactttgtaagatgcagacagcagaccaccctgaggtggtcccattcctctataaccggcagcaacgtgcccactctctgtttttggcctcggcggagttctgcaacatcctctctagggtcctgtctcgggcccggagccggccagccaagctctatgtctacatcaatgagctctgcactgttctcaaggcccactcagccaaaaagaagctgaacttggcccctgccgccaccacctccaatgagccctctgggaataaccctcccacacacctctccttggaccccacaaatgctgaaaacactgcctctcagtctc

SEQ ID NO: 117053 - DNA, 371 bp, Artificial Sequence
  derived and/or modified sequence
ttggggagagctgggcgctgagtctgaggggaaagctgtggtaccttcctgtccctgaaagggagtggagcggccgggggctgaactgggggagggggatttggcgggaagcgcatctagcggaccggccggacccacggttgggatctaagaggaatcgcgagagcgtagcgcgcaggaattctgaaatccccaccacttcctccctccgggggatttgatcccctatggccaccgctaacagcatcatcgtgctggatgatgatgacgaagatgaagcagctgctcagccagggccctcccacccactccccaatgcggcctcacctggggcagaagcccctagctcctctgagcctcatggggccaga

SEQ ID NO: 117054 - DNA, 751 bp, Artificial Sequence
  derived and/or modified sequence
ggatgtgttcctggcatttgcccagggtccctcccctcccaggggtcccgtgcgacgtgccttggacaaggctttctttatcttcctggccctcttcctgacactgctgatgctggaggctgcttataagctgctgtggttactactatgggcaaagttaggggactggctcctggggacacctcagaaggaggaggagctggaattgtgaccacctttcctataaacatcttctttccccaccaaggagctcacctctggacccagccttgcctccacgagtccctccagcctccctaaacacaacgagcaggaattctgaaatccccaccacttcctccctccgggggatttgatcccctatggccaccgctaacagcatcatcgtgctggatgatgatgacgaagatgaagcagctgctcagccagggccctcccacccactccccaatgcggcctcacctggggcagaagcccctagctcctctgagcctcatggggccagaggaagcagtagttcgggcggcaagaaatgctacaagctggagaatgagaagctgttcgaagagttccttgaactttgtaagatgcagacagcagaccaccctgaggtggtcccattcctctataaccggcagcaacgtgcccactctctgtttttggcctcggcggagttctgcaacatcctctctagggtcctgtctcgggcccggagccggccagccaagctctatgtctacatcaatgagct

SEQ ID NO: 117055 - DNA, 2223 bp, Artificial Sequence
  derived and/or modified sequence
atggcaacggcaaactccatcattgttcttgacgacgacgatgaggatgaagccgctgcccaacctggtccttcccaccctctcccaaacgctgcatcccctggcgctgaagctccaagttccagcgagcctcatggagcccggggaagcagcagttccgggggaaagaagtgctacaaactggaaaacgagaagctcttcgaggagttccttgaactttgtaagatgcagacagccgatcacccagaggttgtgccatttctatacaacaggcagcaaagagcacactccttatttttggcctccgcagagttttgtaacatcctttctagggtgctaagtcgggcaagaagcagaccagccaaattgtatgtgtacattaatgagctttgcacggtgctcaaggctcactccgccaagaagaagctgaatttagctcccgcggccacaacctctaacgaaccatcaggaaataaccccccaacccacttgtcactggatcccaccaacgcggagaataccgcaagccagtctccccgcaccaggggctcccgccgccagatacagagactggagcagctgctagcactttacgtggctgagatcaggagactccaagagaaagagctggacctctcagagctggacgacccagacagcgcctacctgcaggaagcccgtttgaaacgcaaactcatccgcttattcgggaggctctgcgaactaaaggattgctcatccctcaccggccgcgtgattgaacaaagaataccttaccgcggcacccgatacccggaagtgaacaggcgcatcgagaggctgatcaacaagccaggtcccgatacatttcccgattacggggatgtgttgcgtgctgtggagaaggcggcggcacgccacagcctcggattgcccaggcagcagttgcaactcatggcccaggatgcttttcgagacgtaggaataagattgcaggagaggcgacatctggatctgatctataacttcggatgccatcttaccgacgattatcgccccggcgtggatccagctctgtcggatcctgtgctggctagacgtttgagagagaaccgcagcttagccatgtctcgcctcgacgaggtcatttctaaatacgccatgctccaggacaagtcagaggagggagagagaaagaaaaggcgagctagactgcaggggacatccagccacagcgctgatacccctgaggcctcactggacagcggtgagggtccatccggcatggcctcacagggctgcccatcagcctcacgcgctgaaacagatgacgaagatgatgaggagagtgacgaggaagaggaagaagaggaagaagaagaagaggaagaagcaactgattctgaagaagaggaggacctggagcaaatgcaggagggccaggaggacgacgaagaagaagatgaggaggaggaggccgccgccgggaaggacggggacaaaagtcctatgtcatctctgcagatctctaacgagaaaaacctggagccagggaagcagataagccgctctagtggagaacagcagaataagggacgtattgtttcacctagccttctatcggaggaaccccttgccccatcctccatcgacgccgagagtaacggcgagcagcctgaggagctgacactggaggaggaaagtccagtctcccagctgttcgagctagagatcgaggccctgccgctcgacacgccttcatcggtggagacagatattagttcttcccgaaagcaaagcgaagaacccttcacgaccgtgctggagaatggcgctgggatggtgtcttcaacatccttcaatggcggagtctctccacataattggggggactctggacccccttgtaagaagtcaagaaaggagaagaaacaaactggctccggcccactcgggaactcctacgtggagcgtcagcgtagtgttcacgagaagaacggaaaaaaaatctgtaccttgcccagtcctccaagtccactggcctcgctcgcccctgtggctgacagctctactcgggtcgatagcccgtcgcatgggcttgtcacctcaagcctgtgcataccgtcgcctgcacgcctgtcacaaactccgcacagtcagccacctcggcccggtacatgcaaaaccagcgtcgctacccagtgcgacccagaagaaattatcgtactctctgactccgactag

SEQ ID NO: 117056 - DNA, 2223 bp, Artificial Sequence
  derived and/or modified sequence
atggcaactgcaaattccatcatcgtattggacgacgatgatgaagatgaggccgctgctcagccagggccttcacaccccctccccaacgctgcgtcccctggcgcagaggccccctcatcctccgagcctcatggcgcaaggggctcctcgagttctggtggaaagaaatgctacaaacttgagaacgagaagcttttcgaagagttcttagaactgtgcaaaatgcagacagctgaccacccggaggttgtgcccttcttgtacaatcggcagcaacgggcccactctctgttcctggcgtcagccgagttctgtaatatcctgtccagggtactgtctcgggctaggtcaaggcctgccaagctatacgtgtacatcaatgaactttgtactgtcctcaaagcccacagcgcgaagaagaaactgaacctggccccagcagcaacaaccagcaacgagccatccggtaataaccctccaacccacctgagcttagatcctacaaatgccgaaaacaccgcctcacagtcaccccggacccgcggctcccggagacagatccagcgtctggagcaactgctggcactttacgtcgctgaaatcaggcggctgcaggagaaagaactcgatctctctgagctggatgaccccgacagcgcatatctgcaagaggctaggctcaaaagaaagctcatacggctcttcggcaggctctgtgaattgaaggattgtagtagcctgactggaagagttatcgaacagcgcattccataccggggtacaagatatccggaggttaataggaggatcgagcgcttgattaacaaaccagggccagacacttttccagactacggtgatgtactgcgagcagtggaaaaggctgctgctaggcactccctgggattaccacggcagcagctgcagctgatggcacaagatgcttttagggatgtgggcatcaggttacaggagagaaggcaccttgatctaatttataactttggttgtcatctgacagacgactatcgcccaggagtggatcccgcactcagtgacccagtgctcgccagacggctgcgggagaataggtctctcgccatgagcagactggacgaagttatcagtaagtatgccatgttgcaggacaaatcggaggagggagagcggaaaaagagacgggcccgcctacagggcaccagctctcatagtgcagacactccagaggctagtctggatagcggagagggtccctctgggatggcctcccaagggtgtcccagcgccagcagggccgagacagacgatgaggacgacgaggaatcggatgaggaagaagaggaggaagaggaggaggaagaagaggaggccacagactcagaggaggaggaggacctggagcagatgcaagagggtcaagaagacgacgaagaggaggacgaagaggaagaggctgcagcgggtaaagatggggataagtctcccatgagcagtctgcagatctccaatgaaaagaacctggagcctggcaagcagatctcccggtcaagtggggagcagcagaacaagggtcgaatagtctctccatctcttctgagcgaagaacctctggccccgtcttcaatcgatgccgaaagcaacggagaacagcccgaggaactgaccctcgaagaagaatcacccgtgagccaactgttcgaactagagatcgaggccctgcccttagataccccgtcgagcgtggaaacagacattagctcgtctcgaaaacagagcgaggaaccattcaccaccgtactggagaatggagctgggatggtcagttccacgtcttttaacgggggcgtatcacctcacaactggggggacagcggtccgccgtgtaagaaatcacgaaaagagaagaaacagaccggctccggtccactgggaaatagctacgttgaacgccagagatctgtccatgagaaaaacggaaaaaaaatatgcacactcccatcgcctccatccccacttgccagtctggccccggtggcagatagctcaaccagggtggactcaccaagccacggcctcgtcacctctagtctatgcatccccagccctgctcggctatcccaaacaccacactcccaaccaccacgccccggaacttgcaaaacatccgttgcaacacagtgcgacccagaggagatcatagtcctgtctgactctgattag

SEQ ID NO: 117057 - DNA, 537 bp, Artificial Sequence
  derived and/or modified sequence
atggcgaccgcgaactctatcatcgtgctagacgatgatgatgaggatgaggccgcggcgcagccgggaccatctcatccactgcccaatgctgcgagcccaggtgctgaggccccaagctcatctgaaccccacggagcaagagggagcagtagctcaggaggcaagaaatgctacaagctagaaaatgaaaaactcttcgaagagttcctggaactgtgcaaaatgcagactgccgaccacccagaggtggtaccattcttgtacaatcgccagcagcgcgcacattccctgtttttggcgtccgcagaattctgcaatatcctttctagagtgctttcccgcgcccggagccgccctgcgaaactgtacgtctacattaatgagctctgcaccgtcctgaaagcacattccgcgaaaaagaaactgaatctggcgccagccgctacaaccagcaatgaaccctctggaaataatccacctactcacctgagcctggatcctactaatgccgaaaacaccgcctctcagtcgtag

SEQ ID NO: 117058 - DNA, 147 bp, Artificial Sequence
  derived and/or modified sequence
atggctaccgctaattctatcatcgtgctggatgacgacgatgaggacgaagcagcagcccagccgggcccaagccaccccctgcctaacgctgcctcacccggtgcagaagccccttcaagctctgagccgcatggcgcacgttag

SEQ ID NO: 117059 - DNA, 393 bp, Artificial Sequence
  derived and/or modified sequence
atggcgacagctaactcaattattgtcctcgacgacgatgatgaggacgaggccgcagcccaacctggcccctctcatcccctgcctaacgccgcatcacccggggccgaggcgccctctagctccgagccgcatggggctagaggcagcagtagtagcggggggaagaagtgttataagctggagaacgaaaagctctttgaggaatttctagaactttgcaagatgcagactgctgaccacccagaggtggtgccattcctgtacaataggcagcaacgtgcccacagtctctttttggcatccgcagagttctgtaatattctctcacgcgttctcagtcgcgcccggtcacgaccagccaagctgtatgtgtacatcaacgagctgtag

SEQ ID NO: 117060 - DNA, 2223 bp, Artificial Sequence
  derived and/or modified sequence
atggccacagccaacagcatcatcgtgctggatgatgatgatgaagatgaggccgccgcccagcccggccccagccaccccctgcccaatgctgccagccctggagctgaggcccccagcagcagcgagccccatggagcccggggcagcagcagcagcggcggcaagaagtgctacaagctggagaatgagaagctgtttgaggagttcctggagctgtgcaagatgcagacagctgaccaccctgaggtggtgcccttcctgtacaaccggcagcagagggcccacagcctcttcctggccagcgctgagttctgcaacatcctgagccgggtgctgagccgggcccggagcaggcctgccaagctgtatgtgtacatcaatgagctgtgcaccgtgctgaaggcccacagcgccaagaagaagctgaacctggccccagctgccaccaccagcaatgagcccagcggcaacaacccccccacccacctgagcctggaccccaccaatgctgagaacacagccagccagagccccaggacccggggcagccggcggcagatccagaggctggagcagctgctggccctgtatgtggccgagatccggcggctgcaggagaaggagctggacctgtctgagctggatgatcctgacagcgcctacctgcaggaggcccggctgaagaggaagctgatccggctgtttggccgcctgtgtgagctgaaggactgcagcagcctgaccggccgggtgattgagcagaggatcccctaccggggcacccgctacccagaggtgaacagaagaattgagcggctcatcaacaagccaggccctgacaccttcccagactatggagatgtgctgcgggctgtggagaaggctgctgcccggcacagcctgggcctgccccggcagcagctgcagctgatggcccaggatgccttcagagatgtgggcatccggctgcaggagaggaggcacctggacctgatctacaactttggctgccacctgacagatgactacagacctggggtggaccctgccctgagtgaccctgtgctggcccggcggctgagagaaaatagaagcctggccatgagccggctggatgaagtcatcagcaaatatgccatgctgcaggacaagtctgaggagggggagaggaagaagaggcgggcccggctgcagggcaccagcagccacagcgctgacaccccagaggccagcctggacagcggggagggccccagcggcatggccagccagggctgccccagcgccagcagagctgagacagatgatgaagatgatgaggagagtgatgaggaggaggaggaggaggaggaggaggaggaggaggaggccacagattctgaggaggaggaggacctggagcagatgcaggagggccaggaggatgatgaggaggaggatgaggaggaggaggccgccgccggcaaggatggagacaagagccccatgagcagcctgcagatcagcaatgagaagaacctggagcccgggaagcagatcagccgcagcagcggggagcagcagaacaagggcagaattgtgagccccagcctgctgtctgaggagcccctggcccccagcagcattgatgctgagagcaatggagagcagcctgaggagctgaccctggaggaggagagccctgtgtcccagctgtttgagctggagattgaggccctgcccctggacacccccagctctgtggagacagacatcagcagcagcaggaagcagagcgaggagcccttcaccaccgtgctggagaatggagctggcatggtgagcagcaccagcttcaacggcggcgtgagcccccacaactggggagacagcggccccccctgcaagaagagcaggaaggagaagaagcagacaggcagcggccccctgggcaacagctatgtggagcggcagaggtctgtgcatgagaagaatggcaagaagatctgcaccctgcccagcccccccagccccctggccagcctggcccctgtggccgacagcagcaccagggtggacagccccagccacggcctggtgaccagcagcctgtgcatccccagccctgcccggctgagccagaccccccacagccagccccccaggcctggcacctgcaagacctctgtggccacccagtgtgaccctgaggagatcatcgtgctgagtgacagcgactag

SEQ ID NO: 117061 - DNA, 537 bp, Artificial Sequence
  derived and/or modified sequence
atggccacagccaacagcatcatcgtgctggatgatgatgatgaagatgaggccgccgcccagcccggccccagccaccccctgcccaatgctgccagccctggagctgaggcccccagcagcagcgagccccatggagcccggggcagcagcagcagcggcggcaagaagtgctacaagctggagaatgagaagctgtttgaggagttcctggagctgtgcaagatgcagacagctgaccaccctgaggtggtgcccttcctgtacaaccggcagcagagggcccacagcctcttcctggccagcgctgagttctgcaacatcctgagccgggtgctgagccgggcccggagcaggcctgccaagctgtatgtgtacatcaatgagctgtgcaccgtgctgaaggcccacagcgccaagaagaagctgaacctggccccagctgccaccaccagcaatgagcccagcggcaacaacccccccacccacctgagcctggaccccaccaatgctgagaacacagccagccagagctag

SEQ ID NO: 117062 - DNA, 147 bp, Artificial Sequence
  derived and/or modified sequence
atggccacagccaacagcatcatcgtgctggatgatgatgatgaagatgaggccgccgcccagcccggccccagccaccccctgcccaatgctgccagccctggagctgaggcccccagcagcagcgagccccatggagccaggtag

SEQ ID NO: 117063 - DNA, 393 bp, Artificial Sequence
  derived and/or modified sequence
atggccacagccaacagcatcatcgtgctggatgatgatgatgaagatgaggccgccgcccagcccggccccagccaccccctgcccaatgctgccagccctggagctgaggcccccagcagcagcgagccccatggagcccggggcagcagcagcagcggcggcaagaagtgctacaagctggagaatgagaagctgtttgaggagttcctggagctgtgcaagatgcagacagctgaccaccctgaggtggtgcccttcctgtacaaccggcagcagagggcccacagcctcttcctggccagcgctgagttctgcaacatcctgagccgggtgctgagccgggcccggagcaggcctgccaagctgtatgtgtacatcaatgagctgtag

SEQ ID NO: 117064 - DNA, 2223 bp, Artificial Sequence
  derived and/or modified sequence
atggccaccgccaacagcatcatcgtgctggacgacgacgacgaggatgaagctgccgcgcagccgggcccttcgcacccgcttccaaacgccgccagccccggagccgaggcaccttctagttcggagccacacggcgctagagggtcctcgtcctcaggcgggaagaaatgctataagctggagaacgagaagttgttcgaggagttcctggaactgtgcaaaatgcagactgcagatcaccctgaggttgtaccatttctgtataaccggcagcagcgggcccactctctgttcttggcaagcgctgagttttgcaacattctgagcagggtgctatcccgcgccaggtctcgccccgctaagctttacgtctacatcaacgaactgtgtacggtgctcaaggcccactctgcaaagaagaagctcaatctggccccagccgccaccacaagtaatgagccatctgggaacaacccccccacccatctgagcctcgaccctaccaatgctgagaacactgccagccagagccctcgcaccagaggctctcgtcgccaaatacaacgccttgagcagctcctggccctctacgtggcagaaattcgcagactgcaggagaaggagctggatctgagtgagctcgatgatcccgatagcgcttatctgcaggaggcgcggctcaaacgaaagttgattcgcctctttgggcggctatgtgagctcaaagattgctcttctctcacaggcagggttatcgaacaacggatcccatacaggggtacgcggtaccccgaagtgaacaggcgtatcgaaagactcatcaacaaacctggtccagacaccttcccagattacggtgatgtccttcgagccgtggagaaggccgcagcccggcactcgctaggtctgccacgtcagcagttacagctcatggcacaagacgcttttagagatgtaggaatcagacttcaggagaggagacacctggatttaatttataatttcggatgtcacctaacagacgattatcggcctggcgtcgacccggcgctgtctgacccggtcctggcccgacgcctcagggagaataggagcctcgctatgagtcggctggacgaagtcataagcaagtacgccatgctccaggataagagtgaagaaggtgagcgcaaaaagcggagagccagactccagggcacctcctcccactctgctgatacacctgaagcgtccctggactccggtgaggggcccagcggcatggcttctcaaggctgtccttctgcatcacgcgcggagacggatgacgaggacgatgaggaatccgatgaagaggaggaggaggaggaagaagaggaggaggaagaggcaaccgactccgaggaggaggaagacctggagcagatgcaggaaggacaagaagacgacgaggaggaggacgaagaggaggaagccgcggctgggaaggatggggacaaatctcctatgagttctctgcaaatcagcaatgaaaaaaatctggaaccaggaaagcaaatcagtcggagctcgggggaacaacagaataaaggccgcatagtctctccttcgctgctgagtgaggaacctcttgctccttcgagtatcgacgctgagagtaatggggagcagcctgaagagctgacgctggaggaggagtctccagtgtcacagctgttcgagctggagatcgaagctctcccattagatactccgagctctgtcgaaaccgatatcagttcttcgagaaaacagtctgaagagccgttcaccaccgttttagaaaacggcgccggcatggtgtcttctacatcgttcaacggaggcgtaagcccccacaactggggagatagcgggcccccatgtaaaaaatcccgtaaagagaaaaaacaaaccggcagcggacctttgggcaattcctacgtcgagagacagaggtccgttcacgagaagaatggcaaaaagatctgcaccctccccagcccaccgagtcctctggcctcactggcaccagtggcagactcaagcactagagtcgatagcccttcacacgggttagtgacctcaagcctgtgtattccctccccagcccgcctgagtcaaacccctcactcacagccccctagacccggcacatgtaaaactagcgtagccactcagtgcgaccccgaggagatcatcgtgctgtccgatagcgattag

SEQ ID NO: 117065 - DNA, 2223 bp, Artificial Sequence
  derived and/or modified sequence
atggccaccgccaacagcatcatcgtgctggacgacgacgacgaggacgaagccgctgctcaacccggcccttctcaccccctacctaatgctgcttctcctggtgctgaggcaccttcatcctcagaaccacacggggccaggggatcatctagctctggcgggaagaagtgctacaaattagaaaatgagaagctgtttgaggagtttctggagctttgtaagatgcagactgcggaccacccagaggttgtgcccttcttgtacaataggcaacagcgggcgcactccttatttctggcctccgccgaattctgcaatatcctatcccgcgtgctatccagagccagaagcaggccagcaaagttgtatgtgtatattaacgaactctgcacggtattgaaggctcacagcgctaagaagaagcttaatctggccccagccgctactacctctaatgagccaagtggtaacaatccccccacccatttaagcctggatcctacaaacgccgagaatactgcctcacagtcccctcggacacggggctccaggcgccagattcagcgactggaacagcttctggcactctatgtggccgagattcggcggcttcaggaaaaggaactggatttgtctgaactggacgacccagactccgcataccttcaggaagctcgattgaagaggaaactgatcagactgtttggccggctgtgcgagctaaaggattgtagtagtctgactggacgcgtgattgagcaaaggatcccataccgagggacgagatatcctgaggttaaccgcagaatagagcggctgatcaataaacccggaccggacacgttcccagactatggcgacgtgctccgcgctgtcgagaaggccgctgcaagacactccctaggcctgccgagacagcagctgcagctaatggcccaggacgcattccgagatgtagggattagattgcaagaacgaagacacctggatttgatctataactttgggtgtcacttgactgatgattaccgaccgggcgttgaccctgctctctccgacccagtcctagcgcggaggttgcgagagaatagatccctggctatgagtcgtttagacgaggtcatatccaaatatgctatgctgcaggacaagtctgaggaaggggaacggaagaaacggagggccaggctgcagggcacttcttctcactcggcagacacccccgaggcgagtctggactcgggagaaggtccctctgggatggcttctcaggggtgtcctagcgccagccgggcagaaacggacgatgaggatgacgaagagtcggacgaagaagaggaagaggaagaggaggaagaagaggaggaagcaactgactctgaggaagaagaggacttggagcaaatgcaggaaggtcaagaagacgatgaggaagaggatgaggaggaggaggccgctgcaggcaaggacggcgataaatcgccgatgtcttcgcttcagatctcgaatgaaaaaaatctagaaccagggaagcagatttcaaggtcatccggtgagcagcagaataaaggacggatcgtcagcccctctctactcagtgaggagcccctcgccccgagcagcatcgatgccgaaagtaacggtgaacagcctgaagagctaacactcgaagaagaatctcctgtaagtcagctgttcgaacttgaaatcgaagccctgccgctagacactcctagcagcgtcgaaacagatatcagctcatctagaaaacaaagcgaagagccgttcactactgtgctggagaacggagccgggatggtgtctagcacctcattcaacggtggtgtttctccccacaattggggcgatagtggcccaccatgtaaaaagagccggaaagagaaaaaacagaccgggagcggcccccttgggaactcatacgtagagcgccagcggtccgttcacgaaaagaacggaaaaaagatatgtacgctgccttcgcctccgtcccctcttgcctccctagcccccgtggccgattcatctacacgggtggactccccttcccacggcttagtgacgagcagtctgtgcattcccagcccggcgcgcctttctcagaccccacactcccaaccgccacgacctggaacatgcaagaccagcgtcgctactcagtgtgaccctgaagagattatagtgctgtctgattcggattag

SEQ ID NO: 117066 - DNA, 537 bp, Artificial Sequence
  derived and/or modified sequence
atggccaccgccaacagcatcatcgtgctggacgacgacgacgaggatgaagctgcagcccagcctgggccaagccatcctctgcctaacgcagcctcacctggtgccgaggccccgtccagcagcgagcctcacggggctcgcggatcaagtagctctgggggcaaaaaatgttataaactggagaacgaaaaactcttcgaggagttcctggagttgtgtaaaatgcaaaccgcagatcacccagaggtggtcccattcctgtacaaccggcagcagcgggctcattctctattcctggcctctgcagagttttgtaacatcctcagtagggttctgagccgcgcccggtcccggcccgctaaattgtacgtgtacatcaatgaattatgcacagtgctgaaagcccactccgccaagaagaaactcaatctcgccccagcggctaccacttccaatgagccctcaggaaacaatccaccgactcatctgtccctggacccaacgaatgcagaaaacacagcgagccaatcgtag

SEQ ID NO: 117067 - DNA, 147 bp, Artificial Sequence
  derived and/or modified sequence
atggccaccgccaacagcatcatcgtgctggacgacgacgacgaggacgaagcagctgcccagcctggacccagccaccccctccccaacgccgctagccccggcgccgaagctccctcttcttctgagccccacggagcaagatag

SEQ ID NO: 117068 - DNA, 393 bp, Artificial Sequence
  derived and/or modified sequence
atggccaccgccaacagcatcatcgtgctggacgacgacgacgaggacgaggctgccgctcaaccaggcccctctcacccgcttcccaacgcagcctcgcccggagccgaagccccgtcgagttctgaaccccacggggcccggggatcttcctcaagtggaggaaaaaaatgctacaaacttgaaaacgagaagctgtttgaagaattccttgagctatgcaaaatgcagacagccgaccaccccgaggtggtgcctttcctgtacaaccgccagcaacgtgcccactctctatttctggcctccgccgaattttgcaatattctgagtagagtcctgtctcgcgcacgcagccgtccagccaagttgtatgtgtatatcaatgaactttag

SEQ ID NO: 117069 - DNA, 2223 bp, Artificial Sequence
  derived and/or modified sequence
atggctacggctaactccattattgttttagacgatgacgacgaggacgaggcagcagcccaacctggcccttcccaccccctgccgaacgccgctagcccgggagccgaggcccctagttctagcgagccccatggagcccgtggctcgtcctcttcggggggtaagaagtgttacaaactggagaatgagaaactctttgaagaatttttggagctgtgcaagatgcagactgccgatcatcccgaggtggtgcctttcttgtacaacaggcaacagcgcgctcactccttatttctggcttccgctgagttctgcaatatcctcagcagagttctcagccgcgctcgctcacggcctgccaagctctacgtttatattaatgagctctgcacggtgttgaaggctcactcggcaaagaagaagttgaacctggctcccgctgcaacgacgagcaacgagccgtctggcaataaccctccaacccacttaagtctggaccccaccaatgctgaaaacacagcatcacaaagccctagaacaagaggctcaaggaggcaaatccagcggctagagcagctgttagcattgtatgtggctgagattaggagactgcaagagaaagagctggatcttagcgaactcgatgaccccgatagcgcctatcttcaagaggctcgcctgaaacggaaactgatacgactgttcggccgtctttgcgagttgaaagactgcagttcattaaccggtcgggtgatcgagcaaagaataccctataggggaacgcggtacccggaggttaacaggcgcatcgaacggctcataaataaaccagggccagacacatttcctgactacggagacgtcctgagagcagtcgaaaaagccgctgccaggcattctctagggctgccaagacagcagcttcagctaatggcgcaggatgcctttcgggacgtagggattagactccaggaaagacggcatcttgaccttatctacaattttggttgccatttgacagatgattatcggccaggggtcgatcctgcccttagtgacccagtcttggcgcgtcgtctgagggagaaccggagcctggccatgagtagacttgatgaggtgatcagcaaatatgctatgttacaagataaatccgaagaaggtgaacgcaaaaaacggagggctcgattacaggggacaagttcgcattctgcggacacacccgaggcctctctcgactctggggagggtccttctgggatggcctcacaggggtgtcctagcgcgtctcgggctgagactgatgatgaggacgacgaagaatctgatgaggaagaagaagaggaagaggaagaggaggaggaagaggcgaccgattctgaagaggaagaggacctcgagcagatgcaggaaggacaggaagatgacgaggaggaggacgaagaggaggaggccgcagccggtaaggacggggataagtctccaatgtcctccctgcagatttcaaatgaaaagaatttggaaccgggtaagcagatctcccgttcctccggggaacagcagaataagggtcgtattgtatccccgtccctattgagcgaggagcccctcgcccctagctccattgacgctgaatcaaacggtgaacagcctgaagagctaaccctcgaggaggaatcacctgtcagtcagctgtttgaacttgaaatagaggccttgcctctcgatacccccagctccgttgagacagatataagctcatccagaaaacagtccgaggagccttttaccacggtcctggagaatggtgcaggaatggtgtctagcacttcttttaatgggggtgtatcccctcataattggggagacagcggacctccctgcaagaagagccggaaggagaaaaaacagaccggcagcggacctctgggtaatagctacgtagagagacagagatctgtgcacgagaagaacggaaagaaaatctgtaccctccccagtcctcccagccccctcgctagcctggcgcctgttgctgattccagcacaagggtcgacagtccaagccatggactagtcacaagctctctgtgcatcccatccccggctagactgtcccagaccccacattctcagcctccccgtccagggacttgcaagacatctgtcgctacacagtgcgaccctgaggaaattatagttctctctgacagcgattag

SEQ ID NO: 117070 - DNA, 2223 bp, Artificial Sequence
  derived and/or modified sequence
atggcaacagccaatagcatcatcgtcctcgacgatgatgacgaggacgaggctgctgcacagcccggtccatcgcacccattacctaacgccgcatcaccgggagcggaagctcccagttcatccgagccgcatggcgctagaggatcgtcttcttccgggggaaaaaaatgttataagctagaaaacgaaaagcttttcgaggagtttctcgaattatgtaagatgcaaacagcagatcaccccgaagtcgtgccattcctgtacaatcggcagcagagagcccactctctcttcctcgctagtgcagaattttgtaacattctgtcccgcgttctatcacgagccagaagccgccctgccaagctgtacgtgtatattaacgaattgtgcacagtgttaaaggcacactccgcaaaaaaaaagctaaatctggcccctgcagctactaccagcaacgaacctagcggtaacaatcccccaactcacctctcattggaccctacaaacgcagagaatacggcttctcagagcccccgaaccaggggctcaagacgccagatccagcgacttgagcagttactggcattatacgtggcagaaatccgaaggctgcaggagaaggagttagatctatcagagttggatgacccagattccgcgtacctccaggaagccaggcttaagaggaagctcatccgcctatttggaaggctatgtgagctaaaggattgctcctccctgacaggcagggtgatcgaacagcgcattccttatagaggaacgcggtaccctgaggtgaaccgcagaatagaacggctgatcaataagcctggcccagacaccttcccggactacggagacgtgctccgcgctgtggaaaaagccgcagctaggcacagcctgggcctgcctcgccagcagctacagctcatggctcaggacgcctttcgcgatgttggcatccgcctccaggagagacgccacttggatctaatctataacttcggctgccacctcactgacgattacagacctggagtggaccctgctctgtcagaccccgtcctcgcccgacggctccgggagaatcgatcactggccatgtcacggctggacgaggtgatctccaagtacgccatgctccaggataaatcagaggaaggcgagcgcaagaagcgcagagctcgtctgcaaggcacttcaagtcacagcgccgataccccggaggcttctctggactctggggaaggaccgagtgggatggccagccagggatgcccctctgcttcacgcgctgagacagacgacgaggatgacgaagagtccgacgaggaagaggaagaggaagaggaggaagaggaggaggaagcaaccgattcggaggaagaagaggatctggagcagatgcaagaagggcaagaggatgacgaggaagaggacgaggaagaggaggctgccgctggcaaagatggtgacaaatcaccaatgtcttcactgcagatttctaatgagaaaaacttggagcctggcaagcagatcagtagatcaagcggagagcagcagaacaaggggagaatcgtttcaccaagccttttgtctgaggagccccttgctccaagctcaattgatgctgagagcaacggggagcagcctgaggaactgacactggaggaggagagtcccgtctctcagctttttgagctcgagattgaagccctcccactcgatactccgtcatccgtcgagaccgacatttcctcaagcaggaagcagtctgaggaacctttcaccacagtgctggagaatggagctgggatggtgagcagcacctcattcaacggcggagtgagccctcataactggggagatagtggacccccatgtaagaaaagccgcaaagaaaaaaaacagactggctccggaccattgggaaattcctacgtggagcgccagcgctccgtgcatgagaagaatggtaagaaaatttgcacgttgccatctcctccttcccccctcgccagcttggcccctgtagcagactcctccacccgggtagattctccttctcacgggctggtaacttcttccctctgcatcccctcgcctgcccgactatctcagactccccacagccagccgccaagaccgggtacctgcaagacaagcgtagccactcaatgcgatcccgaagagatcattgtgttgtctgactcggactag

SEQ ID NO: 117071 - DNA, 537 bp, Artificial Sequence
  derived and/or modified sequence
atggccaccgcgaattccatcattgtgctggacgacgacgacgaggatgaggccgctgcccagcctgggccatctcatccattgccaaatgcggcatctccaggggcagaagctcccagcagttctgagccccacggcgcaagaggaagttcttccagcggaggaaagaagtgttataagttggagaacgagaagctcttcgaggaattcctggaactgtgcaagatgcaaacagctgatcatcccgaggtcgttccgtttctttacaaccggcagcaaagagctcattctctcttcctggcctctgctgaattttgtaatatcctctctagagttctttcacgggcacggtctcggcctgctaagctatacgtgtatataaacgagctttgtactgtgctcaaagcccactccgccaagaaaaaactgaaccttgctccggcagcaacaacgtcaaacgagccatcgggcaacaacccacctacacatttgagcctggatcctacaaacgctgaaaacacagctagccagtcctag

SEQ ID NO: 117072 - DNA, 147 bp, Artificial Sequence
  derived and/or modified sequence
atggccaccgccaactctattattgttctggatgatgacgacgaggacgaggcagccgcacagcccggacccagccatcctctgccgaatgcagcaagtccgggagcagaggccccatcttccagcgagccccatggcgcaaggtag

SEQ ID NO: 117073 - DNA, 393 bp, Artificial Sequence
  derived and/or modified sequence
atggccaccgctaattcaattatcgtgctcgacgatgacgatgaggatgaagctgctgcccagccgggtccttcacatccccttcctaacgccgcttcacctggcgctgaggccccatcatctagtgaaccccacggggcaaggggttcttcctcaagtggagggaaaaagtgctacaaactggaaaacgagaaactcttcgaagagttccttgaattgtgtaagatgcagaccgcagaccatcctgaagttgtgccattcttatacaaccgacagcagcgggcacacagtctgttccttgccagcgcggagttctgcaatatcctctccagggtgctctccagagccagaagtcgacctgcaaagctctatgtgtatattaatgaactgtag

SEQ ID NO: 117074 - DNA, 2223 bp, Artificial Sequence
  derived and/or modified sequence
atggccaccgccaactccataatcgtgctcgatgacgacgacgaggacgaggccgctgcccagccaggcccttcacaccccctgcccaacgcggcgtcgccgggagcagaggccccttctagttccgagccccacggggcaagaggatctagctcctccggaggaaaaaagtgctataagctggaaaacgagaagctgtttgaagagttcctggagctgtgcaagatgcagacagctgaccaccccgaggtagtgccttttctgtacaacagacagcagcgagcacactctctgtttctggcatcagctgagttttgtaacatcctgtcacgagtcctctctcgcgcacgctcccggccagctaagctgtacgtctacataaatgaactctgcactgtcctgaaggcccactctgccaaaaagaagctgaacctggcccccgcagctacaacaagtaatgaaccttctggaaacaatccgcccacccatctgagtctggatcccacgaacgcagaaaacacggcttcacagtctccccggaccaggggctcgaggaggcagattcagagactcgagcagctactagccttgtacgtggccgagattcggcggttgcaggagaaggaactagatctgagcgagttagatgacccagattccgcatatcttcaggaagccaggctaaagagaaagctaattagactattcggacggctatgtgaactgaaagactgttcgtccctcactggtcgggttatcgaacaacgtattccataccgggggacgcggtaccctgaggtcaatagacggattgagcggctcattaacaagccaggccctgacacgtttcccgactatggggacgtcttgcgggctgtcgaaaaagctgcagcacgtcatagtctaggattaccaaggcagcaattacagttgatggcacaggatgcgtttcgagatgtaggcattaggcttcaggaacgtcgccatttggatctcatttataacttcggctgtcacttaacagatgattatcggcccggcgtggaccccgctttgtccgatcccgtgttagcacgcagactgagggagaaccgcagtcttgcgatgagtcggctggatgaggtgatttccaagtacgccatgctgcaggacaagagtgaagaaggggagaggaaaaagaggagagcacggctgcagggcacctcctctcacagcgctgacactcccgaggcttctttagactctggagagggccccagcggcatggcctctcagggttgtcccagcgctagtcgagccgagacggacgatgaggacgacgaagagagtgacgaggaggaagaggaggaagaggaggaggaagaagaggaagccacagactctgaggaggaagaggatttggaacagatgcaggagggccaagaagacgacgaggaagaagacgaggaagaggaagccgctgctggtaaggatggggacaagtctccgatgagctctctgcagatctccaacgaaaaaaaccttgaacccggtaagcagatttcccgtagcagcggggagcagcagaacaaaggacggattgttagcccatctttgctgtctgaggagcctcttgccccctcatccattgacgctgaatcaaacggggaacaaccagaggagttgaccctcgaagaagagtctcctgtgtcccagctgtttgagctggagatagaagccctccctctcgatactccctcatctgtagaaacagatataagcagctcgcgtaagcagtccgaggagccctttaccacggtgcttgagaatggagcgggaatggtgagctccaccagttttaatgggggcgtgtcccctcataattggggcgacagcggtccgccttgcaagaagagcagaaaggaaaaaaaacagacaggctccggccccctggggaattcctatgttgaaaggcagcgctccgtccacgaaaagaatggaaaaaaaatctgcaccctgcctagtcccccaagcccactcgcttcactggccccagtggcggatagtagtactcgcgttgactctcctagccacggacttgtaacctcctccctgtgcatcccgagcccggctcggcttagccagactccccatagccagccgcccaggccggggacctgtaagacatcagtcgctacccagtgtgatcctgaggagattatcgtattatccgattctgattag

SEQ ID NO: 117075 - DNA, 2223 bp, Artificial Sequence
  derived and/or modified sequence
atggccacagccaacagtattattgttctggatgatgacgatgaggatgaggctgctgcccaacccggaccttcccatccattgccaaatgccgcctctcccggagctgaggccccgagttctagcgaaccacatggcgctcggggcagtagctcttctggggggaagaagtgttacaaactagagaacgaaaaacttttcgaggagtttctggagctatgtaagatgcagaccgccgatcatcctgaagtcgtgccatttctgtacaaccgccaacagagagcccacagtctcttcttagcgtctgcagaattttgcaacatcttgtcccgggtgttatcacgagcaagatcccgtccggccaagctctatgtgtacatcaacgagctgtgtacagtgctgaaagcccactccgccaagaaaaagcttaatttagctccggcggctacaacttcaaacgaaccctctggcaacaatccacccactcacctctctctcgatcctacaaacgccgaaaacaccgccagtcaaagccccaggacacgcgggtcacgaaggcaaattcaacgtctggaacagctcttggccttatacgtcgctgaaattaggaggctgcaggaaaaggagctggacctgagtgaattagacgacccggactctgcttacttgcaggaagccaggctgaaaaggaaactgatccgactatttggtcggctgtgcgagttgaaggattgctcgtcgcttacagggcgcgtgatcgaacagagaatcccttaccggggaacaaggtacccagaagtgaaccgccggattgaaagattgataaataagccaggcccagacacatttcctgattacggggacgtgctcagagccgtcgagaaggcagcagccagacacagcctgggactaccccgtcaacaactgcagctgatggcccaggatgcattccgcgatgtgggcataagactgcaggaacgaaggcatctggacctgatttataacttcggctgtcatctgactgacgactaccgtcctggagtggaccctgctctgtctgatccagttctcgctcggcggctgagagaaaatcgaagcctcgccatgtctcggctcgatgaagttatttccaagtacgctatgctccaagacaagtcagaagagggtgaacgaaagaagcgccgggcccgactgcaaggcactagttcacactctgcagacacccccgaggctagtttggactccggcgaaggcccttccggaatggcttcacaaggatgtcccagcgcttctcgagccgaaactgacgacgaggatgatgaggagtccgatgaggaagaagaggaggaagaagaggaggaagaggaagaggccaccgactccgaggaagaggaagatttggaacagatgcaggagggtcaagaagacgacgaggaggaggatgaggaggaagaagccgcagctggcaaggacggggacaagtctccaatgtcctcccttcagattagtaacgaaaagaatctagaacctggaaaacaaataagcaggtcatccggggagcagcagaataaagggagaatagtatccccatccctgctgtcggaggaacccctcgctcctagctctatcgacgcggagagtaacggcgagcaacctgaggagttaacactcgaggaagaaagcccagtgtcccagctgtttgaactagagatcgaagctttgcctctggatactcccagctcggtggagacagatatcagtagctctagaaagcagtccgaggaaccattcaccaccgtgctggagaatggtgcagggatggtgagtagcactagtttcaatgggggggtctctccacataactggggggactcaggaccaccttgtaagaaatctcggaaggagaaaaaacagacaggttccggcccactcggaaattcttacgtcgaacgtcagcggagcgtgcacgaaaagaacggcaaaaagatatgtactttacccagccccccaagcccgctggcttccttagctcctgtggctgatagttctacaagggtcgattcaccttcacacggactggtgaccagctccttatgcatcccttctcctgccaggctctctcaaacaccacacagccaacctccccgacccggaacttgtaagaccagcgtggcgactcagtgtgacccagaagagattatcgttcttagtgatagtgattag

SEQ ID NO: 117076 - DNA, 2223 bp, Artificial Sequence
  derived and/or modified sequence
atggccacagctaactcaataattgtgttggacgacgatgacgaagatgaagccgccgcccagccaggcccaagccatccactgcccaatgcggcctctcctggggccgaagcaccgtcctcttccgaaccgcatggcgctagaggtagttctagcagcggcgggaagaaatgttataaattagagaatgagaaactttttgaagaatttctggagctttgcaagatgcaaactgctgaccatcctgaggtggtaccgtttctgtataacagacaacagagagcccactcactatttcttgccagtgcagaattttgtaacatattgagtcgcgtgctgtcccgggctagaagcagaccagccaaattatacgtctacattaatgagttatgcactgtactcaaggcacactctgccaagaagaagttgaacctcgctccagcggctacgacctctaatgagccatctggaaacaaccctcccacgcacctttctctagatccaaccaatgctgagaacactgcctcccagagcccacgcacccggggcagtaggaggcagattcagagactcgagcagctcctcgctctttatgtagcagagattcgacgattacaggaaaaagagttagacctgtcagagctggatgacccagactcagcctacctgcaggaggccaggttaaaacgcaaattgataagactgtttgggaggctctgtgaattgaaggactgttcaagcctgacgggaagggtgatcgagcagagaatcccctacagaggcacacgctaccccgaggtgaatcgtaggatcgagcgacttatcaacaaacctggcccggatacattccctgattacggggacgtgctgagggctgtggaaaaggcagccgcacgtcactctctggggctgccacggcagcagttacagttaatggcgcaggatgcctttagagacgtgggcatccggctccaggagagaagacatctggaccttatttacaattttggctgccacctgacggatgactatcggcctggtgtagatcccgctctctctgaccccgtgctggctaggagacttcgtgaaaacaggtcactggccatgtccagattggatgaggtgatctccaaatatgccatgcttcaggacaaaagcgaggagggagaaagaaagaagcggcgggccaggctacagggcacaagttcacattccgcagacacgcccgaggcctcactcgacagcggagaagggccctcagggatggccagtcaaggatgtccatctgcctccagggccgagactgacgacgaagacgacgaagagtctgacgaggaagaggaagaagaggaggaagaagaggaagaggaagcgaccgactctgaggaggaggaagaccttgaacaaatgcaagaggggcaggaggatgatgaggaagaagatgaggaagaggaagccgcagccgggaaagacggagataaaagtcctatgtcttcactccagatatccaatgagaagaatctcgaacctggaaagcagatatccagatcatccggcgaacaacagaataaaggtcgcattgtgagtccatctttactatcagaagagccgctcgctccgagttccattgatgcagagtcgaacggagaacagcccgaagagttgacattggaggaagaaagcccagtgtctcagcttttcgagctcgaaattgaggctctgccactggacactccttcctctgttgaaacagatatatcgagctcccgaaagcagtccgaggagcccttcactactgttttggagaacggagccgggatggtcagctcaacttcatttaacgggggtgtttcccctcataactggggggactccggcccgccctgtaagaaatcaagaaaagagaagaagcagactggttccgggcctctaggtaattcttacgtggagaggcagagatcagtgcacgagaaaaatgggaaaaagatctgcactctgcccagtcccccctcccctttggcctcgttagctcctgtggctgatagttccactcgtgtagatagtccaagccacggtctggtgactagttctctctgtatacctagtccggcaaggctcagtcagactccccactctcagcctccgcgacccggcacatgcaagacttctgtggccacacagtgcgatccggaggagatcatcgtgctgtcggatagtgactag

SEQ ID NO: 117077 - DNA, 2223 bp, Artificial Sequence
  derived and/or modified sequence
atggccactgccaattcaataattgtactggacgacgatgacgaggatgaagctgccgcacagcctggaccatcccaccccctgccaaacgccgctagccccggcgcagaagctccttcttcttccgaaccccacggagccagggggtctagtagcagcggcggaaagaagtgttacaagttagaaaatgagaaactttttgaggagttcctggagctctgcaagatgcagaccgccgaccaccccgaggtcgttccttttctttacaataggcagcagcgggcacactccctgttcctggcatccgctgaattctgtaatatcctgtctagagtgctgtcaagggcaagaagccggccagcaaagctttacgtatatatcaatgagctctgtaccgttctgaaggcgcattcagctaagaaaaagctaaacctagcgcccgctgccacaacatctaatgaacctagcgggaataatccacctacacatctgtcactggatcctaccaatgccgagaacaccgcctcccagtccccacgcacgcgtgggagtcgtcggcagatacagagactggagcaattactcgcgctatatgtcgcagaaatccgtcgtcttcaagaaaaagagctcgacctgtctgagctggacgaccctgacagcgcctacttgcaagaggcccggttaaagaggaaacttattcggctgtttgggcggctctgtgaattgaaggattgttcaagccttaccggtagggtaattgagcaacgcattccataccggggcactcgataccctgaagtcaaccggaggatcgaacggcttattaacaagccaggccctgatacctttccagactacggtgacgtgcttagggctgtggagaaggcagcggctagacactctctcgggcttcctcgtcagcaactgcaactcatggcgcaagacgctttccgggacgtgggcattcggttgcaggaaagacggcatctcgacctgatatacaactttgggtgccacttgaccgacgattatcgtcctggggtcgacccggcacttagcgaccctgttctggcacgccgccttagagagaaccgcagcttagcaatgtcacggctcgatgaggttatcagcaaatacgccatgcttcaggataagtcagaagagggagagaggaagaagagaagggcacgtctgcagggcaccagctctcactccgcagatacaccagaggcttcattggattccggtgaggggccaagcgggatggcgtcccagggttgtcccagcgcatcgagggcggagacagatgacgaggatgatgaagagagcgacgaagaagaagaggaggaggaggaagaggaggaggaggaagctaccgactcagaggaggaagaagatctggaacagatgcaggaagggcaggaagatgacgaggaagaggacgaggaggaggaggccgcagcggggaaagacggtgacaagtcgcctatgagttcacttcagattagcaatgagaaaaatctagagcctggtaagcaaatctccaggtcaagtggagagcagcagaacaagggccgaatcgttagtcctagtctgctatctgaagagcccctggcaccctcaagtattgacgcggagtctaatggggagcagcctgaggaactgacgttggaggaggaatctccggtgtctcaactattcgagctggaaatcgaggctctgcctctcgacaccccatcctccgttgaaacggacatcagctcctctaggaaacagtctgaagagcctttcactactgtgttggaaaatggagccgggatggtgtcctccaccagcttcaatggaggcgtgtccccacacaattggggcgacagcggtccaccctgtaagaagagcagaaaagaaaagaagcaaactggctcaggtcccctcgggaattcctatgtggaaagacagcgctccgttcatgagaaaaatggaaaaaaaatctgtactctgcctagccctccctccccactggcctcgctagcccctgtggcggactcttcgacaagagtggactctccgagccacggtctggtcacatctagtctatgtattcccagtccagctaggctgagccagactccacattcacagccaccccgtccggggacctgtaaaactagtgtggccacccagtgtgaccctgaagaaatcatcgtgctgagcgatagtgactag

SEQ ID NO: 117078 - DNA, 393 bp, Artificial Sequence
  derived and/or modified sequence
atggccacggcaaacagcataatcgtgctggacgatgatgatgaggacgaggccgccgctcaacctggtccctcccatccgctgcccaatgctgcaagtcccggcgccgaagccccctctagtagcgaacctcatggcgctcggggtagctcctcatccggcggcaagaagtgctataaactggagaacgagaagctgttcgaggagttcctagagctgtgtaaaatgcagacagcggaccaccccgaagtggtgcccttcctatacaacagacaacaacgcgcccacagcttgtttctcgcctccgccgagttctgtaacatcctgtccagggtcctatctagagctcggtcccgaccagccaagctgtacgtgtacatcaatgagctctag

SEQ ID NO: 117079 - DNA, 147 bp, Artificial Sequence
  derived and/or modified sequence
atggctacagccaactccatcatcgtgcttgatgatgatgacgaggacgaagcagccgcacaacctggccctagtcaccctttgcccaacgccgctagtcccggagcagaagccccatcctcctcagagcctcacggagcgaggtag

SEQ ID NO: 117080 - DNA, 393 bp, Artificial Sequence
  derived and/or modified sequence
atggcaacagcgaacagcatcattgtgcttgacgatgatgatgaagacgaggccgccgcacagcccggcccgtctcatcctcttccgaatgcggcctcccccggagccgaagctccatcttccagcgagcctcatggggccaggggtagctcttcctccggaggcaaaaaatgctacaagctggaaaacgaaaaactttttgaagagtttcttgaactctgtaagatgcaaaccgcggaccaccctgaggtcgtgccctttctctacaaccgtcagcaacgggctcattcgttgttccttgcatcagctgagttctgcaacatcctctctcgcgtactgtcccgagctcgctcaaggccagccaagctgtatgtgtacattaatgagctgtag

SEQ ID NO: 117081 - DNA, 147 bp, Artificial Sequence
  derived and/or modified sequence
atggctacagccaattctattatcgtgctggacgacgatgatgaagatgaagccgcggcacaacccggcccctcccatccgctgcctaatgcagcttctcccggagctgaggcaccttccagtagcgagcctcacggagctagatag

SEQ ID NO: 117082 - DNA, 537 bp, Artificial Sequence
  derived and/or modified sequence
atggctaccgcgaactcgatcatcgtgcttgacgacgatgatgaggacgaagccgcagcccagcctgggcccagtcaccctctccccaatgctgcctcacccggagccgaagctccgtcgtccagcgaacctcatggtgcccgaggctcaagcagcagcggaggcaagaaatgttataagctggagaacgaaaaactctttgaggagttcttagaactgtgtaagatgcagacagcagaccacccggaggtggtaccctttttgtacaacagacaacagagagcccatagcctgtttctagcttccgctgagttttgcaacatactgagtcgggtcctctctagagcccggagccgccctgctaagctctacgtgtatatcaatgagttgtgtacagttctgaaggcccacagcgccaagaagaaactgaatctagcgcctgccgctactactagtaatgaaccttccggaaataatccacctactcacttgtctctcgatcccacaaatgctgaaaataccgcttctcaatcctag

SEQ ID NO: 117083 - DNA, 537 bp, Artificial Sequence
  derived and/or modified sequence
atggccaccgcaaacagcattattgtgctggacgacgacgatgaggacgaagctgctgcacagcctggccccagtcacccgctgccaaatgctgcatcacctggcgccgaagctcccagcagctccgaaccgcacggtgcccgtggatctagcagctctggaggaaagaagtgctacaaactcgaaaacgagaagttatttgaggagttccttgaactttgtaagatgcaaaccgccgaccacccagaagtcgtcccctttttatataaccgacagcagagagctcacagtctgttcctggcctccgccgaattctgtaatatactgagcagagtactcagcagggcgagatcaagaccggccaaactatacgtttatataaatgagctttgcactgtcttgaaagctcactcagcgaagaagaaactgaatctggcacctgccgctactactagcaacgaaccatctggaaacaaccctccaacgcacctgagtctggaccccacgaatgccgaaaacaccgctagtcaatcctag

SEQ ID NO: 117084 - DNA, 2223 bp, Artificial Sequence
  derived and/or modified sequence
atggccacagcgaactccattatcgtactagatgacgacgatgaggacgaagccgctgctcagccagggcccagtcatcccttgccaaacgctgctagcccgggcgccgaggcgccaagtagctcagagcctcatggagccaggggctccagctctagtggaggaaaaaaatgttataaattagagaacgaaaagttgtttgaggaatttctcgagttgtgcaagatgcaaaccgccgaccaccctgaggtggtaccatttttatataataggcaacaaagagctcactctctgtttctcgcctccgcagagttttgcaacatactatcgcgcgttcttagcagggctaggtcgcgacctgcaaagctctacgtgtatatcaatgagctgtgtacagtgctgaaggctcactccgctaagaaaaaactgaatctggcccccgcggctaccactagcaacgagccctcaggtaataatccccctacccacctgtccttagacccgaccaatgctgaaaacacagcgtcccagtcccccaggacccgcggttcaagacgccaaattcagagactggagcagctcctggctctttacgtggccgaaattcgccgccttcaggaaaaggaattggatttatccgaactggacgatcccgattccgcctatctacaggaggctcgactcaagaggaaactgatccggctttttggtagactttgcgagctcaaggactgttcctccctgacaggtagagtgatcgagcagaggataccatatcgggggactcgttaccctgaggttaataggaggatcgagcggttgatcaataaaccagggcccgacaccttcccggactacggggacgttctgagagctgtggagaaggcagcagctaggcattctttgggattgcccaggcaacaactgcagctgatggcccaggatgcattccgcgacgttgggattagactccaggagagacgacacctcgacctgatatataattttggatgccacttgactgatgattacagaccaggcgttgatccggccctcagtgaccccgtcctggcacgcaggctcagagaaaaccgaagtttggccatgagccgattggatgaagttatatctaagtacgcgatgctgcaggacaaatctgaggaaggagaacgaaaaaagcgccgcgcaagattacagggcacttcctcgcattccgcagatacccctgaagcctccctcgacagtggcgagggcccatcaggcatggcctcccaaggttgcccctcggcatcaagggctgaaacagacgatgaggatgatgaagagagtgacgaggaggaagaagaggaagaggaggaggaggaggaggaggctacagacagtgaggaagaagaagacctggagcagatgcaagaaggacaagaggatgacgaagaggaggatgaggaggaggaagcggctgctggtaaagacggcgacaaaagccccatgtcatcccttcagatctccaacgaaaagaacttggaacccgggaagcaaatcagtcgatccagcggtgaacagcagaataaggggaggatcgtctcccccagcctgttatcggaggaacccttggcgccaagcagcatcgacgccgagtcgaatggagagcagcccgaagagctgacgctggaagaggaatcaccagtctctcagctgtttgagttggagattgaagccctgcccttggacaccccttcatctgtggagacagatatatctagcagtagaaagcagagcgaggaacctttcaccacagtcctggagaacggcgcaggaatggtgagctccactagcttcaatggaggagtgagtccacacaactggggagattccggtcctccatgtaaaaagtcaagaaaggaaaagaagcagacagggtctggacccttgggcaattcttacgtggaaagacagcgaagcgttcacgaaaagaacggtaagaaaatttgtacccttccatcccccccatcacccctcgcctcactggctcctgtggctgactcatcaacacgggtcgattccccgagccatggtctcgtgacctctagtctgtgtataccctctccagcccgtctgtctcagacaccccacagccagccgcccagaccgggcacttgcaagacctctgttgctactcagtgcgatccagaggagatcattgtattatctgatagcgattag

SEQ ID NO: 117085 - DNA, 2223 bp, Artificial Sequence
  derived and/or modified sequence
atggcaacagccaacagcataatagtgctcgacgatgacgatgaagacgaggccgctgcccaaccagggcccagtcaccccctgccaaatgccgcatcacctggcgccgaagccccttcttcaagcgaaccccatggtgcccgcggctcgtcaagcagtggaggaaaaaagtgttacaaactcgagaatgagaagctctttgaggagttccttgagttatgcaagatgcagaccgctgatcacccagaggttgttccttttctgtataatcggcagcagagggcccatagcctgttcctcgcttctgcagaattctgcaatatactgagtagagttctgtcaagagcccggtctcgcccagcgaagctctacgtctacataaatgagctttgcacagtgctaaaagcacactccgcaaagaagaaattaaaccttgcaccggccgctaccaccagcaacgagccgtccggcaataatcccccaacacacctgtctctcgacccaacaaatgctgaaaacaccgctagtcagtcacctaggacccggggctctcgcaggcagattcaacgcctggagcagctccttgcactctacgttgccgaaatcagacgcctgcaagaaaaagagcttgacctgagtgagctcgacgatcctgattctgcctacttgcaggaggctcggctaaagcgcaagctgatccgactgttcggccgtctctgcgaactgaaggactgttcctcattaaccggaagagtgattgagcagagaattccctatcgaggaactcgttatcctgaagtgaaccggaggatcgaaagactgatcaacaagcccggccccgataccttccctgattatggcgatgtgctacgggctgtggagaaagctgcagccagacacagccttggtttgccaagacagcagttgcagctgatggcacaggatgcctttcgcgatgtgggtatccgcctgcaagaaagacgccatctggatcttatttataattttggttgccaccttaccgatgattacaggcctggagtagatcctgcactcagcgaccctgtgctggctcgtcgcctgagagagaatcggagtcttgcaatgtctagactcgatgaggtgattagcaaatatgcaatgttacaggacaagagtgaggagggggagaggaagaaaagaagagcacgccttcagggcacaagctctcacagcgccgacacacccgaagccagcctggattcaggtgagggaccaagtggcatggcgagccagggctgcccaagcgcaagcagggcagaaacagatgatgaggacgacgaggagtctgacgaagaagaggaggaagaggaggaagaggaagaggaggaagccacagacagcgaggaggaggaagatctggagcagatgcaggagggtcaggaagacgatgaagaagaggatgaggaggaagaggcagccgcaggaaaggacggagacaagagcccaatgtcaagtttgcagatctcaaacgaaaaaaaccttgaacccggtaagcagattagcagatcatctggagagcaacagaacaaaggccgcatagtctcaccttcacttctctccgaggaaccccttgcgcctagttctatcgatgctgagtcgaacggcgagcaaccagaagagctgaccctggaggaagagtccccagtgagccagttgtttgaactggagatcgaagctcttccgctagatacaccctccagtgtggagactgatatcagctctagccggaagcaatcagaggagcccttcacgaccgtactcgagaatggcgcgggcatggtgagcagcacttcctttaacggtggcgtgtccccacacaactggggagattcaggaccaccttgtaaaaaaagcaggaaggagaagaagcagaccggatccggcccactcggcaattcttacgtggagcgccagagatccgtgcacgaaaaaaacggaaaaaagatatgcacattaccgagtcccccatcgccgcttgcatctttggctcctgttgccgactccagtactcgcgtggattctccttcacatgggctagtcaccagctccctctgcatcccttcgccggctaggctgtcccagacccctcactcacagccaccgaggccaggcacctgcaagacgagcgtggcaacccagtgcgatcccgaagagatcatagtcctgtccgacagcgactag

SEQ ID NO: 117086 - DNA, 393 bp, Artificial Sequence
  derived and/or modified sequence
atggccactgccaactccataatagtacttgatgatgacgacgaagatgaagccgctgcccagcctggaccgtcacaccctcttcctaatgccgccagtcccggagccgaggcaccgagcagttcagaaccacacggcgcaagggggtcatcttcctctggggggaaaaaatgctataaacttgagaacgagaagctcttcgaggaattcttggaactctgcaagatgcaaaccgcagatcacccagaagttgttccctttctgtataacagacagcagcgcgcacactctctgttccttgccagcgccgagttctgtaacatactcagccgggtgctttctagagcgagatccaggccagcaaagctgtacgtttacatcaacgagctgtag

SEQ ID NO: 117087 - DNA, 537 bp, Artificial Sequence
  derived and/or modified sequence
atggctaccgcaaactcaattatcgtgctggatgacgacgatgaggacgaggctgccgctcagccaggaccttcccaccctttacccaatgcggctagtcccggagcggaggccccttcaagtagtgaacctcacggcgcaaggggctcatcctcctcgggcggaaagaagtgttataagctcgaaaacgagaagctgttcgaggaatttctggagctgtgcaagatgcagaccgctgaccatccggaggtggtgcccttcctgtacaacagacagcagagagcccattctttgtttctagcaagcgcagaattttgcaacatactcagcagagttctgagtcgggcacggagtcgaccagctaagctgtacgtatacataaacgagttatgcactgttctgaaagctcacagtgcgaagaaaaaattgaacctggctcccgcagctactaccagtaacgaaccttccgggaacaacccgcccacccacttgagccttgaccccaccaacgccgagaatacggcatcacaatcgtag

SEQ ID NO: 117088 - DNA, 2223 bp, Artificial Sequence
  derived and/or modified sequence
atggccactgcaaatagtatcatcgtactggatgatgatgacgaagatgaagccgccgcgcaaccaggaccctcacaccccctccctaacgcagccagcccaggagctgaggcaccatcctcgagcgagcctcatggggcccgcggctcttcctcgagtgggggcaaaaagtgctataagctggaaaacgagaagctgtttgaggaattcctcgagttgtgcaagatgcaaacggccgatcacccggaggtcgtgccatttctatacaatcgccaacagcgggcacatagcctgtttctggcgagtgccgagttttgtaatatcttgtcccgcgttctaagtcgggccaggtccagaccggccaaactgtatgtgtatataaatgagttgtgcacagtgctgaaggctcattccgccaagaagaaacttaacctggcacccgctgccaccactagcaacgaaccatcgggcaacaatcccccgacccacctgtcactggatcctactaacgccgagaacaccgccagtcagagtcccaggacacggggctccaggcgacaaattcagcgcctagagcagcttttggctctgtacgtcgctgagatcagacgacttcaggagaaagagcttgatctgtcagagttagacgaccctgattctgcgtacttacaggaagctaggctcaaaagaaaactcattcggctgttcggtaggctgtgtgaactaaaggactgttcatcgctgaccgggcgggtgatcgagcagagaattccttatcgaggcaccaggtatcccgaggttaatagacgaatcgaaaggctaattaacaagcccggccctgatacgttccccgactacggggacgtgttgcgtgctgtagaaaaagccgccgctcgtcactctctcggtctgccaaggcaacaactccaactgatggcacaggatgcattccgcgatgttgggatccgactgcaggagcggaggcacttagacttgatatacaattttgggtgccaccttactgacgactacaggccgggggtggacccggccctaagtgaccccgtcctggcccggaggctgcgggagaaccgctctctggcaatgagccgcctagatgaggtgatatctaaatacgcaatgctccaggataaaagcgaggaaggagagagaaaaaaacgccgggcacgcctgcagggcacttcaagccattccgcggacacgcccgaggcctccttagatagcggcgaggggcccagtggcatggctagccaggggtgccccagcgcctctcgcgccgaaactgacgacgaggacgatgaggagagcgacgaggaggaggaggaggaagaggaggaggaggaagaagaggctactgattctgaagaagaagaagacctggaacaaatgcaggaggggcaggaggacgatgaggaagaggatgaggaagaagaagccgctgcagggaaagacggcgacaagtctccaatgtcctcactgcaaatcagtaacgaaaagaatctggaaccaggaaagcagatttcacgttcatcaggggaacaacaaaataaaggcagaattgtgtcccctagtttacttagcgaggagcctttggcgcccagcagtatcgatgccgagtcaaacggggaacagcccgaggaactgacccttgaagaggaatcccctgtcagtcagctgtttgaactagaaatcgaagctctgcccctcgacacacctagctcagtagagacagacatatcaagctcccgaaagcagtctgaagaacctttcacaactgtcttggagaatggtgccgggatggtaagctccactagcttcaacggcggggtgagccctcataactggggagattcaggacccccatgcaaaaagagtcggaaagaaaagaaacaaacaggtagtgggccgttgggtaacagttacgtggagaggcagcgctcagtgcatgagaaaaacggaaaaaagatttgtaccctgcctagccctccctccccgctggccagtctggctcctgtggccgattcctctacaagggttgattcgccctcacatggccttgtcacaagttcactgtgcataccctctccagctcgcctgtcccagacaccgcattcacaaccaccccggccagggacatgtaagaccagcgtcgctactcagtgtgatcctgaggagatcatcgtcttgagtgatagcgattag

SEQ ID NO: 117089 - DNA, 147 bp, Artificial Sequence
  derived and/or modified sequence
atggcaacagcgaactccattatcgtgctcgacgacgacgatgaggacgaggccgccgctcagcctggtcccagccaccctctgccaaatgccgctagtcctggggccgaggctcctagctctagcgagccccacggcgcaagatag

SEQ ID NO: 117090 - DNA, 393 bp, Artificial Sequence
  derived and/or modified sequence
atggctaccgccaactcaataattgtgcttgatgatgacgacgaagatgaagcagccgcacaaccgggccccagtcaccccctgccgaatgccgccagccccggggcagaggctccgtccagcagcgagccacacggtgcccgcggcagcagcagctcgggggggaaaaagtgctataaactcgagaatgagaagttgtttgaagaatttctggagctctgtaagatgcagactgcggaccatcctgaagttgttcctttcctctacaatcgccagcagcgggctcatagtctttttcttgcatccgctgagttctgtaatattctctccagggtcctcagtagagcacggagccgtcctgccaaactctatgtttatatcaacgaattatag

SEQ ID NO: 117091 - DNA, 537 bp, Artificial Sequence
  derived and/or modified sequence
atggccactgctaactctatcattgtgttagacgatgatgatgaagatgaagccgccgcccaaccagggccaagtcatcctttgccaaacgccgcctctccgggggctgaggccccctcctccagcgagcctcacggcgccaggggcagttcttcttccggcgggaaaaagtgttacaaactggaaaacgagaaattattcgaagaattcctcgagttgtgcaaaatgcagacggccgaccaccccgaggtggtaccctttctgtataaccgccagcagcgagcgcacagcctgtttctcgccagcgccgagttctgcaacatcctatccagggttctctcaagggcccgctcaagaccggctaagctgtacgtttatatcaacgagctgtgtactgtgttgaaggcacacagcgccaagaagaagttgaatctggctcctgcggccacaaccagcaatgagccgtcaggcaacaatcctcccacacacctgagtctggatcccacgaacgccgagaatactgcctcacagagctag

SEQ ID NO: 117092 - DNA, 2223 bp, Artificial Sequence
  derived and/or modified sequence
atggcaacagcaaacagtattatcgttctagacgacgacgatgaggacgaagccgccgcccagcctggtcctagccatccacttcccaacgccgcatcgccaggagccgaagccccctcaagttctgagccacacggagcccgaggctcgagttccagtggcggaaagaaatgctacaagttagagaacgaaaaactgttcgaggaattcctggaactctgcaaaatgcaaacagcggatcacccggaggttgtcccctttctctacaaccgccagcagcgggctcactccctcttcttggcctctgcagagttttgtaatatcttgagcagggtcctctctcgggcccgcagtcgtccggcaaaactctatgtgtacattaatgagctttgtacagttcttaaagcacatagtgctaagaagaagttaaatctcgctccagctgcaactaccagcaacgagcctagcgggaacaaccccccaactcatctttctctggaccctacaaacgcagaaaacaccgctagccagagccctcgcacacgcggctcacggcgccagattcagcgcctggaacagctcctggcactctatgtcgccgaaattaggcgactgcaagagaaggagctggatttgagtgagctcgatgacccagactccgcttacttgcaagaagcccgattaaaacgcaagctgatacggctcttcggccgcctttgtgagctgaaggattgttcgagtttaacaggcagggtaatagaacagcgaatcccgtacagggggacacgttatccagaagtcaatagaaggatcgaacgattgatcaacaagcctggccccgatacgtttcccgattacggtgatgtgctgagggccgtcgagaaggcagctgcacgtcattcattggggctcccccggcaacagctgcagctgatggcccaggatgccttccgtgacgtggggatcaggctgcaagaaagacgtcacctggacctaatttacaactttggatgtcacctgaccgacgattacagacctggagttgaccctgctctttcagatcccgtgctggccagaagactgcgggagaacaggagcctagccatgtcccgactggatgaggttatctctaaatatgcaatgcttcaggacaaatccgaagagggagagcgcaaaaaacgtcgcgcccggctccagggcacttcaagtcattcagccgatacgcctgaagccagcctcgactctggtgaagggccttcaggcatggcgagtcagggatgcccctcagccagccgggccgagactgatgatgaagatgatgaggagtccgacgaagaggaggaagaagaagaagaggaagaggaagaagaggcaacagactcagaagaagaggaggatctcgagcagatgcaggagggccaggaagacgacgaggaggaggacgaggaagaagaagccgcggccgggaaggacggcgataagtccccgatgagttcattgcagatcagcaacgaaaaaaacctggagcctggcaagcagatttcccgatccagcggggaacagcaaaacaaaggccgaatcgtgtccccgtctctgctgtccgaggaacctttggctccatcaagtatcgatgcagaatcaaacggagaacagcccgaggagctcacacttgaggaggaaagcccagtgtcccaactttttgagctagagattgaagccctgcccctggacacccctagctctgtggaaacagacatctcaagttcacgtaagcagtcggaggagcctttcaccactgtgttagaaaatggggccggcatggtttccagtaccagctttaacggcggcgtgtcacctcacaattggggcgatagcggtccgccgtgcaaaaaaagccgcaaggaaaaaaagcagaccggatctggtcccctgggtaactcatacgtggaaaggcagagatcggtccacgagaaaaatgggaaaaaaatctgtacattgccaagtccaccgtccccactggcgagcctggcgcctgtggctgacagctctaccagggtcgattccccgagccacggccttgtgacttcaagtttatgcatcccttcgccggcacgtttaagtcagacgccgcactctcaacctcctcgaccagggacatgtaaaaccagcgtggctacccagtgcgacccagaggagattatcgtgttgtctgacagtgattag

SEQ ID NO: 117093 - DNA, 147 bp, Artificial Sequence
  derived and/or modified sequence
atggctacagccaatagcatcattgtgttggatgacgatgatgaagacgaagcagccgcacagccaggccctagccacccactcccgaacgccgctagtccaggtgccgaggctcccagctcctccgagccacatggtgcccggtag

SEQ ID NO: 117094 - DNA, 2223 bp, Artificial Sequence
  derived and/or modified sequence
atggccaccgccaacagcatcatcgtgctggacgacgacgacgaggatgaggcagcggcgcaaccaggcccaagtcatcccttgccaaatgccgcatctcccggagcggaggcaccttccagtagcgagccccacggcgcccgcggctcatcttctagcggcgggaagaagtgttataagcttgagaacgaaaagctgttcgaggaattcctcgaactgtgcaagatgcagacagcagatcacccagaggtggtgccttttctgtacaatcgccaacaaagagcgcacagtctgtttcttgcttcagctgaattttgtaatatcctgtcacgtgtattgagtagggcaaggtctaggccagccaagttgtatgtttatattaacgagctttgcaccgtcctgaaggcgcactcggcaaagaagaagctcaatctcgcgccagcagcgactacttcaaacgaaccctcgggcaataaccctcccactcacctatcacttgacccgaccaatgcagagaataccgccagccagtcccccagaacacgtggatcacgccggcagattcagagacttgagcagttgctggcgctgtacgtggcagagattagacgcttgcaagagaaagaactggatctttcagaactggacgacccggactccgcttacctgcaggaggcgcgtttaaaaagaaagctgattcgcttgttcgggagactctgtgaactgaaagactgctcctccttgacagggcgggtcatcgagcagagaattccataccgaggtaccagatatcccgaagtgaacaggagaatcgagcgcctaattaacaagccgggccctgacaccttccctgactacggggatgtactgcgggccgttgaaaaagctgccgctaggcactccctggggttgccgcgccagcagctccagctgatggcccaagatgctttcagggatgttgggattcgtcttcaggaacggcgccacctcgacctgatctataacttcggctgtcacttgaccgatgattacaggcccggcgtagacccagcgctgagcgaccctgtgttagcccgacggctgagggagaatcgcagtctcgcaatgtcgcggctggatgaagtgattagtaaatatgctatgctgcaggacaaatcagaggaaggagaacggaagaagcgccgagctaggctccagggaacatcaagccattcagccgatactccagaagccagcctcgacagcggcgaaggcccaagtggtatggccagtcagggctgtccgtccgcctcccgggccgagacggatgatgaagacgatgaggaaagtgatgaagaggaggaggaggaagaggaggaggaggaagaagaggccaccgactctgaagaagaagaggatctcgaacagatgcaagaaggacaggaagatgatgaggaagaagatgaggaggaggaggctgccgccggcaaggatggagacaagagtcctatgtcttctttgcagatctccaacgagaagaatctggaaccagggaagcagatttccaggtccagcggcgagcaacagaacaagggtcgcattgtctccccctccttgctgagcgaagaacctctggccccatctagcatagatgcagaaagcaatggagagcagccagaggaactcacattggaggaggagtctcccgtctctcagttgttcgagctagaaatcgaggccctcccgcttgataccccgagctctgtggagaccgatatcagctccagtcggaagcagtcggaggagccgtttactacagtgctggaaaacggagccggcatggtctccagcaccagctttaatggtggtgtgtctccacacaactggggggactctggcccgccatgcaaaaagtcaagaaaggagaagaaacagaccggatccggtcccctggggaattcttatgtcgagcgccaaagatccgtgcatgaaaaaaatgggaaaaaaatctgcactctgccctctcctccctcacccctggcaagcctggcccccgtggctgactcgtccacccgtgtggattcaccatcacacggtctggtgacatccagcctgtgcatcccgagcccagcgcggcttagccaaaccccgcatagccagccacccaggcccggcacatgtaaaacatctgtggcaacacagtgtgaccctgaggagatcatagttcttagtgactccgactag

SEQ ID NO: 117095 - DNA, 2223 bp, Artificial Sequence
  derived and/or modified sequence
atggccaccgccaacagcatcatcgtgctggacgacgacgacgaggacgaagcagccgctcaaccaggcccatcacaccctctgccgaacgcagcttcgccaggggcagaggctcccagctcctccgagcctcacggggctcgcgggagctcatcaagcggcggcaaaaagtgctacaagctagagaacgagaaactcttcgaggagtttttggagctgtgcaaaatgcagacagccgatcatcccgaggtggtgcccttcctgtataatcgacagcagagagcgcatagcctgtttttggctagcgctgaattttgtaatattctttccagagtccttagtcgtgcccggtcacggcctgcaaagctttacgtatatataaacgagctgtgtacggtgctgaaggcacacagcgccaaaaaaaagcttaacctcgcccccgccgcaaccacaagcaatgaaccttctggaaataaccctccaactcacttatccttggaccctacgaacgctgaaaacaccgccagccaaagcccccggacacgtggttctaggcggcaaattcagcgactggaacaattgctcgccctttacgttgccgaaattcgccggctccaggagaaagagctcgatttatccgagctggacgatcctgattccgcctatttgcaggaagccaggctgaaacgaaaactgatcagactcttcgggagactgtgtgagttgaaagactgcagttccttaactggaagggtgatcgaacagcgcataccatatagggggactcggtaccctgaggtaaaccggagaattgaaagactgattaataagcccggcccagacacttttcccgattacggcgatgttctgagagcagtggaaaaagctgctgcacgccattcccttggcttgccacgacagcagttgcaattaatggcccaagacgcttttcgcgatgtcggcatccgactccaggagcggcgtcatctagatctcatctataacttcggttgtcatttgactgatgactaccgcccaggtgtcgatcccgccctcagcgacccagtactcgcccgccggctgcgagaaaacagatctttagccatgtctcggcttgatgaagtgattagcaagtacgctatgttgcaagacaaatctgaagagggagagaggaaaaagcgaagagccaggctacaaggaacttcctcccacagcgctgatactcccgaggccagtcttgactccggcgaggggccctccggcatggcttcgcagggctgtccatcagccagtcgcgcggagactgacgatgaagatgatgaagagtccgacgaagaggaagaggaagaggaggaagaagaagaggaagaagccacagattccgaagaggaagaagaccttgagcaaatgcaggaggggcaggaggacgatgaagaggaggatgaagaggaggaggctgctgctgggaaggacggggacaaaagcccaatgagctctctgcagattagcaacgagaaaaaccttgagcccgggaagcagattagtcgcagctctggtgaacagcagaacaagggaaggattgtgtccccatctctcctaagcgaggagccgctggccccctcctccatagacgcagaaagtaatggtgagcagcctgaagagcttaccctcgaggaagagtctccagtcagtcaactattcgagttggagatagaggcattgccgctcgacacacccagctctgtggaaactgatatctcaagttctagaaagcagtcagaggaacccttcacaaccgtcctggaaaacggggctggaatggtctcaagcacaagcttcaacggtggggtgtcccctcataattggggagactccggtcctccatgcaagaagtctcggaaggaaaagaagcagacaggctctggacctttgggaaactcatacgtcgagcgccagcgatcagtgcatgaaaaaaacggaaagaaaatatgtaccctaccaagccctccttctcccctggccagcctcgcccccgtggctgactcgagcacacgagtcgatagcccctctcacggcctagtcactagttctctctgcatcccttcaccagctcgcttgagtcagacaccacattcccagccgccacgccctggcacctgtaagaccagcgttgctactcagtgtgaccctgaggagatcattgtcctgagtgattctgactag

SEQ ID NO: 117096 - DNA, 2223 bp, Artificial Sequence
  derived and/or modified sequence
atggccaccgccaacagcatcatcgtgctggacgacgacgacgaggatgaggcagctgcgcaaccaggtccctcgcaccccctgccaaacgctgcatcaccgggcgccgaagctccttcttcatctgaaccacacggcgcccgagggagcagttcaagcggaggaaagaagtgctacaagctggagaacgagaagctgttcgaagaatttctggagctgtgcaaaatgcaaactgccgaccatccagaagtggttcctttcttgtacaatcgccagcagagagcacactcactgtttcttgcttccgccgaattctgcaacatcctttccagggtgctgtctagggccagaagccgcccggctaaactctacgtttacattaatgagttatgcaccgtgcttaaggcgcatagcgcaaaaaaaaaactaaatttggcccccgccgctaccacttctaacgagccgagcgggaataacccacccacacatctctccttggaccctacaaacgccgaaaatactgctagccagtcacctcggacacgcgggtctagaagacaaatccagcggctggagcaactgcttgcactctacgtggctgagatcagacggcttcaagaaaaagagctggacctctctgaactggatgatccggattccgcctatctgcaggaggcgcgccttaaaagaaaactgatacgcctgttcgggcgcctgtgcgaactgaaggactgctcttctcttacaggccgagtgatcgaacagcgcattccgtatcgtggcacccggtaccctgaggttaacagaaggatcgaacggctgatcaataaacccggaccagatacgttcccggattacggcgacgtccttagggccgttgagaaggccgcagcacgacattcattaggcctcccgagacagcagttgcagctcatggcccaagacgccttccgggacgtgggaatccgcttacaggagcggcgacacctggaccttatttacaactttggttgccatctgaccgacgattatagacctggcgtggaccctgccctttcggacccggtgctcgcaaggcggctcagggagaatcgttccctagctatgagcaggttagatgaggtcatctctaaatatgcgatgttacaggacaagtccgaagagggggagcggaagaaacggcgcgcccgcctgcagggtaccagttctcattccgctgacaccccagaggcttctctcgacagtggcgaaggcccgagcggcatggcctcacaaggttgtccctctgctagccgcgcagaaacggacgacgaggacgacgaggaaagtgacgaagaggaggaggaagaggaggaagaggaggaagaggaggccacagactcagaggaggaggaggacctggagcagatgcaggaagggcaagaggacgatgaggaagaagacgaagaggaggaagcagcagccggcaaggacggcgacaagagccctatgagctctcttcagataagcaatgaaaagaacttggagcccggcaaacagattagccgatcatctggagaacaacagaacaaaggcagaatagtgtcaccaagtctgctctcagaggaaccattggccccaagttccatcgacgcggagtcaaacggcgagcaacccgaagaactgacactcgaggaggagagccccgtgtcccagttgtttgagctcgagatcgaagctctccccttggatactccaagttcagtcgagaccgacatctcttcaagccgcaagcaatcagaggagcccttcaccactgtgcttgagaatggagctggaatggtgagctccactagtttcaacgggggggtttccccccataattggggcgatagcgggcctccgtgcaaaaaatctcgtaaggagaagaaacagaccgggtctggtcccctgggtaactcttacgttgaaaggcaacgctcagtgcatgaaaagaacgggaaaaagatttgcactctccctagtccaccctcacccctggcttcactggctccagtggcagactccagcacccgcgtggactcccccagtcacggcctagtgacttccagcttatgcatcccctctccggcgcggctgtctcagacacctcactctcagccacccaggccaggcacttgcaagacctctgtcgcgactcagtgcgaccccgaggaaatcattgtccttagtgatagcgactag

SEQ ID NO: 117097 - DNA, 2223 bp, Artificial Sequence
  derived and/or modified sequence
atggccaccgccaacagcatcatcgtgctggacgacgacgacgaggatgaagccgctgcccagcccggacctagccaccccctgccaaatgcagcaagcccgggggcagaggccccgtcaagctccgagcctcacggggcccgcggatcatcctcctctggtggcaaaaagtgctacaaattggaaaatgagaagctgtttgaagagtttctggagttatgcaagatgcaaacagcagaccacccggaggtggtgccattcctatataatcggcagcaacgcgctcattccctgttcctcgcctcggccgaattctgtaatattctctcgagagtcctatccagagccagatcccgccccgctaaactgtatgtgtatataaatgagctgtgtactgtcctgaaggcccactccgcaaagaagaagctgaacctggctccagctgccaccacatcaaatgagcccagtggaaacaacccacctacccatcttagcttggacccaaccaacgcagaaaacacggctagccagtcgccacggactaggggttctaggcgccagatccagcgcctcgaacaactgctggccctttacgtcgctgagatacgacgcttgcaagagaaggagcttgacctatcggaactcgacgatcctgatagcgcatacctccaagaagcacgacttaaaagaaaactaatacgactttttggacgcctctgtgaactcaaggactgtagcagcctgaccggaagagtgattgagcagagaattccttatcgcgggacaaggtatcctgaggtcaaccggaggattgaaaggctgatcaacaaacctggacccgacaccttcccagactacggggacgtcctcagggctgtggaaaaggcagcagcccgccatagtctggggctgcccagacagcagctgcagttgatggcccaggacgcctttagagatgtgggcattaggttgcaggaaagaagacatttagatctcatatacaactttggctgtcatctgaccgatgattatcgacctggagttgatcctgccttgagcgatcccgtgctcgcccgccggctgagagagaaccgctcactcgccatgtcccggctggacgaggtgatttccaagtacgccatgctccaggataaaagtgaggaaggcgagagaaagaaaagacgcgctagactgcagggtacatcatcccatagcgccgatacccctgaggctagtctagactcaggagaaggcccttcaggcatggcatctcagggatgtccatccgccagtagagccgaaaccgacgatgaggacgatgaagaaagcgacgaggaggaagaagaggaagaagaggaggaggaggaggaggccaccgactctgaagaagaagaggacttagaacaaatgcaagagggacaggaggacgacgaggaggaggatgaagaggaagaggccgcggctggcaaagatggagacaaatcgcccatgagttccctgcagattagtaatgagaagaatctcgagcccgggaaacagatctctagatcttccggggagcagcagaataaaggacggatcgtctcaccctccctgctctcagaggaaccacttgcaccaagcagtatagacgccgagtccaatggagaacagccagaggagctgactcttgaggaagaatctccagtgagccagctttttgagctggagatcgaggcactaccgcttgataccccctcgtccgtggagactgacatatcctcctctagaaaacagtccgaagagccatttaccactgtcctcgaaaacggcgcgggcatggtatcctctacatcgtttaacggtggcgtttctccgcacaattggggggactcaggtcccccttgtaagaaatctcgcaaggagaagaagcagacaggctccggtccactgggcaattcctacgtagagcgacagcgatctgtgcacgagaagaatggcaaaaagatatgcacattaccttcccccccatcccccctcgcatccttggcccccgtagccgactcgagcaccagagttgattcaccttctcacggcctggtgacctcttcgctctgcataccatctcccgcaagacttagccaaacgccccactcacagccgcctcgccccggtacatgcaagacctctgttgccacacagtgcgatcctgaagagatcatagtcctgtccgatagcgactag

SEQ ID NO: 117098 - DNA, 393 bp, Artificial Sequence
  derived and/or modified sequence
atggccaccgccaacagcatcatcgtgctggacgacgacgacgaggatgaagccgctgcacagcctgggcccagccacccgctcccgaatgcagcttcccctggtgcggaagccccatcttcttctgagccacacggcgcaaggggcagcagttctagtggggggaagaaatgttacaagctggagaacgagaaattgtttgaagagttcctcgagctctgcaagatgcagactgctgatcaccccgaagtagtccccttcttatacaaccgccagcaaagagctcacagtctgttcctggcaagcgctgagttttgtaacatcctctcccgcgtcctttctagggctagatccaggccagccaagctctatgtatacatcaacgaattatag

SEQ ID NO: 117099 - DNA, 147 bp, Artificial Sequence
  derived and/or modified sequence
atggccaccgccaacagcatcatcgtgctggacgacgacgacgaggatgaggctgcagcccagccagggccttctcatcccctgccgaatgcagcgtcacccggggccgaggcaccaagcagctcagaaccgcacggggctcggtag

SEQ ID NO: 117100 - DNA, 393 bp, Artificial Sequence
  derived and/or modified sequence
atggccaccgccaacagcatcatcgtgctggacgacgacgacgaggatgaggccgccgcccagcctggtccatctcatccgttgccaaatgccgccagcccaggcgcggaggcgccgtcttcctctgagccgcacggggcacgcggctcctcgtcctccggcgggaaaaaatgttacaaacttgagaatgagaagcttttcgaggaattcctggaactgtgcaagatgcagaccgcagatcacccggaggttgttcctttcctctacaacaggcaacaacgcgcccacagtctgttcctggctagtgcagagttctgtaacattcttagcagagttctctcacgcgcaagaagccggcctgcaaagctgtatgtctatataaatgagctctag

SEQ ID NO: 117101 - DNA, 147 bp, Artificial Sequence
  derived and/or modified sequence
atggccaccgccaacagcatcatcgtgctggacgacgacgacgaggatgaggccgctgctcaaccaggtccaagccaccccctaccaaacgctgcgtctcctggagcagaggccccttcttcaagcgagccacatggagcgagatag

SEQ ID NO: 117102 - DNA, 537 bp, Artificial Sequence
  derived and/or modified sequence
atggccaccgccaacagcatcatcgtgctggacgacgacgacgaggacgaagcagctgcccagccaggccctagccatccgctacccaatgccgcttcacccggggccgaggctccgagctctagtgaaccgcacggcgctcgtggcagcagtagcagcggcggcaagaaatgttacaaactggagaatgagaaattattcgaggagtttctagagttgtgcaaaatgcaaacagccgatcatcccgaggtggtcccctttctgtataatcggcaacaacgcgcccactctctgtttttggcctctgctgagttttgcaatatcctgtcaagagtgctgtcacgggccagatcgagacctgctaagctgtacgtatatatcaatgagctgtgtacggtgctgaaagctcactctgctaagaaaaagctcaacctggcacctgctgctacaaccagtaatgagccaagcggaaacaacccgccaacgcacctcagtctggatcccacaaacgccgaaaataccgctagtcagagctag

SEQ ID NO: 117103 - DNA, 537 bp, Artificial Sequence
  derived and/or modified sequence
atggccaccgccaacagcatcatcgtgctggacgacgacgacgaggacgaggctgccgcccagccaggcccaagtcaccccctaccaaacgctgcctctcccggggcggaagccccaagctcctccgaaccccatggcgcccggggcagttcttcctccggagggaagaagtgttacaaactggagaacgagaagcttttcgaggagttcctagagctctgtaaaatgcagaccgccgaccaccccgaggtcgtgcccttcctatacaatcggcaacaacgtgcacattctctgttcctagcctccgccgaattctgcaatattctgagtagggtgttgtcccgtgcccgaagtaggcccgccaaactctatgtgtatattaacgaactgtgcactgtgctgaaggcccactctgccaagaaaaagctgaacttggctccagccgccaccacatcaaacgaaccaagcgggaacaatccccctacccatctcagtttggaccccacgaatgcagagaacacggcctcccaatcatag

SEQ ID NO: 117104 - DNA, 2223 bp, Artificial Sequence
  derived and/or modified sequence
atggccaccgccaacagcatcatcgtgctggacgacgacgacgaggacgaagcagcggcccaaccaggaccaagccaccccctcccgaatgcggccagccctggtgcagaagcaccgtcctctagtgagcctcatggtgcccgggggtcttcaagctcgggcggaaagaagtgctataagctagagaatgagaagctatttgaggaatttcttgagctatgtaaaatgcagactgccgaccaccccgaagtagtccctttcctgtacaaccgccagcagagagctcactcactcttcctggcctcggccgagttctgcaatattctttctcgagtgctctctagggctcggtcccgccccgcaaagctgtacgtgtacattaatgagctgtgcaccgttctgaaggcacactcagccaaaaaaaagctcaacctggcccctgccgcaacaaccagtaacgaaccttccggcaacaacccccccacccacctctctctggacccaactaacgccgagaatacggcgtctcagagtcctaggactagaggcagccgtcgacagattcagcgcctcgaacagctgttggccctttatgtcgcggaaattcgaaggctgcaagagaaagaacttgatctttccgaacttgacgatccggactctgcatatttgcaggaggctaggctcaagagaaagctcattaggctgtttggccgtctgtgcgaactgaaggactgttccagtctaaccgggagggttatagagcagcgtatcccttacagagggacgcgctatcctgaggttaataggcgcatcgagaggctgatcaataagcctggcccagatacgttccctgactatggcgacgtgctgagagcggtcgaaaaggctgcagctcgtcactcacttgggctgcctcggcagcagctgcagctgatggcacaagacgcctttagggacgtaggcattcgtctccaggagagaagacacctggatttgatctacaatttcgggtgccacctgacggatgactatcgccccggtgtagatccagctctctctgatcctgttcttgcacgaaggctgagagagaaccgcagtttggctatgtctcgccttgacgaagttatcagtaagtatgcgatgttgcaggacaaatcagaagaaggcgaaagaaaaaagcgccgggctcggctgcaggggacgagctcccatagcgcggacacgcccgaggcatcactcgacagtggtgagggcccgagtggcatggcaagtcaggggtgtcccagtgcctcaagagctgagacagatgacgaagacgatgaagaatcggatgaggaagaggaagaagaggaggaagaagaggaagaggaggccacggatagcgaggaagaagaggacctagagcagatgcaagagggccaggaagacgacgaagaagaggacgaggaggaagaggccgctgcggggaaagacggggataaaagcccgatgtcgtccctccaaatctcaaacgagaagaatctcgaacctggcaaacagatctcacgctcatcaggcgaacaacagaacaaaggtcgcatcgtctccccgtctctgctttctgaggagccactcgcaccctcctcaatcgacgctgaaagcaatggggagcagcctgaagagctgacccttgaagaagagagccccgtgtcccaactgttcgaattggagatagaagcactaccactagatacccctagcagcgtcgaaacagacatatctagcagtagaaagcagagcgaggaaccatttacaacagtgcttgagaacggggcaggcatggtcagttcgacctccttcaatggaggcgtcagcccacacaattggggtgactctgggcctccttgtaaaaagagccgtaaggaaaagaagcagactggttccggtccactggggaactcttatgtagaaagacagcggagcgtgcacgagaaaaacgggaaaaagatttgtactctgcctagtccaccctcccccttggcgagccttgccccagtcgcggattcatccaccagagtggatagcccatcacacggcctcgtcacaagctccctctgtatcccctcacctgcacgattaagtcaaacaccacattcacaaccaccgaggcccggcacttgcaagacaagcgtggccactcagtgtgacccagaggaaatcatcgttctgtccgactctgactag

SEQ ID NO: 117105 - DNA, 2223 bp, Artificial Sequence
  derived and/or modified sequence
atggccaccgccaacagcatcatcgtgctggacgacgacgacgaggacgaggcagccgctcaacccggaccgagtcaccctctgcccaatgcagccagccccggcgctgaagctccctcctctagcgagcctcatggcgctagggggtcttcctccagcggcggcaagaaatgctacaagctggagaatgaaaaattatttgaggagttcctggagctgtgtaaaatgcagactgctgaccacccagaggtggtccctttcttgtacaacagacagcagagagctcacagcctgttcctggccagtgcagaattttgtaatattttgagtagggtcttgtctcgggcccggtcgaggccagcaaagctttacgtctacataaacgaattgtgcacagttctgaaagcgcactctgcaaaaaaaaagctcaatctagcaccagcagcaaccacttccaatgagccctcaggcaataacccccccacccacttgagccttgaccccactaatgcagagaacaccgcatcacaaagcccacgcacaagaggtagccggcgccagattcagcggcttgagcagctcttggctctctatgtcgccgagattaggcgcctgcaagaaaaggagctggatctgtctgagttagatgacccagactcagcctacttacaggaagcccgcctgaagcgtaagctcatccgcctcttcgggaggctgtgcgaactgaaggactgttccagcctgacgggccgggtgatcgagcagaggattccatacagaggcacccgataccccgaagtcaaccgaaggatcgaacggctgatcaacaagcctggtcccgatacgttcccggactatggggacgttctgcgcgcagtggagaaagccgctgcccgtcactctttaggcctgcctcgacagcagctccaactgatggctcaggacgccttccgggacgtgggcattaggcttcaggaacgcaggcatttggatttaatatataacttcggatgccatctgactgacgactacagaccgggggtggatcctgctctgagtgaccctgtgttggcccggagactgcgtgaaaatcgatcactcgctatgtcacggctcgatgaggttatctccaaatatgccatgctccaagataagagtgaggagggagagcgcaaaaagcggagagcccggttacagggcacatccagtcacagcgcagacactccggaggcatctctggacagtggggagggtcccagtggcatggctagccaggggtgcccttcagcaagtcgcgccgagacagatgatgaggacgatgaagagtcagatgaagaagaagaggaagaggaggaagaggaagaagaggaggcgaccgactcagaggaggaagaggatctcgaacagatgcaggagggccaagaagacgacgaagaagaagacgaggaagaagaagcggccgccggcaaggatggcgataagtcccctatgtcatccctgcagatctctaacgagaaaaacctcgagcctggcaagcagatctccagatcttccggtgaacagcagaataaggggcgcatcgtttccccatccctgctgtccgaggaacctttagctccctcttcaatagacgctgagagcaatggggagcaacccgaggagctcacactggaagaggaaagtcctgtcagccagctattcgaactggaaatagaggccctgccccttgacacccctagctccgtggagaccgatatctcgagtagtcgcaagcagtcagaggaaccctttaccacagtgctcgagaatggggctggaatggtgtcatccacctctttcaatggtggagtctccccacacaactggggagatagcgggccgccttgcaaaaaaagtagaaaagagaagaagcagacagggtccgggcctctgggcaatagctatgtggaaaggcagagatcggtccatgagaagaacggaaaaaagatttgtactctcccttctcccccatcaccactggcctctcttgctcctgtggctgatagttcaactagggttgactctccaagccatggactggtaaccagttctctgtgcattcccagtccagctaggctgagtcagaccccacattctcagcctcctcggcccgggacttgtaaaacctcagttgctactcagtgtgacccagaggagattatagtccttagcgattcagactag

SEQ ID NO: 117106 - DNA, 393 bp, Artificial Sequence
  derived and/or modified sequence
atggccaccgccaacagcatcatcgtgctggacgacgacgacgaggatgaggccgcagcccagccaggcccatcacacccgctgcctaatgctgcaagtcccggcgccgaggctccatcatcctccgaacctcacggggcacgggggagttccagcagcggcggcaaaaagtgttataaacttgagaacgagaagttatttgaggaatttctagagctgtgtaagatgcagaccgccgaccatcccgaagtggtgccatttctctacaacagacagcaacgggcacattcactgttcctcgccagcgccgaattttgcaatattctgagtagagtactatcgcgcgctcgatcccgcccagctaagctgtacgtgtacatcaatgagctgtag

SEQ ID NO: 117107 - DNA, 537 bp, Artificial Sequence
  derived and/or modified sequence
atggccaccgccaacagcatcatcgtgctggacgacgacgacgaggacgaagcggctgcccagcctgggccctctcaccctcttcccaacgcagcttcaccaggagctgaggcccctagttcctctgaacctcacggtgctcgcggctctagcagtagtggcggtaaaaaatgttacaagctggagaatgagaaattattcgaagagttcttggaactctgcaagatgcagaccgccgatcaccccgaagttgtgccattcttatataacagacagcaaagagctcatagcctctttctcgcctctgcggagttttgtaatatactctcccgagtcctgagccgcgcacgatctagaccagcgaaactgtatgtctacataaatgagctgtgtaccgtactgaaggcccattctgctaagaagaagctaaatctcgctcctgcagcaacaacatctaatgaacccagcggtaataacccacccactcaccttagcctggatccaaccaatgcggagaatacggcgtcgcagagctag

SEQ ID NO: 117108 - DNA, 2223 bp, Artificial Sequence
  derived and/or modified sequence
atggccaccgccaacagcatcatcgtgctggacgacgacgacgaggatgaagctgctgctcaaccaggtcccagccaccctctccctaacgccgcgagtccaggggcggaggctccctcctcttctgagccccatggagcccgggggtcttcttcaagtggcgggaaaaagtgttataaactggagaacgagaaactcttcgaggaatttctggagttgtgcaagatgcaaacagccgaccaccccgaagtggtgccgttcctgtacaaccgccagcaacgtgcacactccctttttttggcatcggctgagttctgcaacatacttagccgcgtcctctcacgagccaggtcaagacccgccaaactctatgtgtatattaatgagctctgtaccgtcttaaaagcccacagcgcaaagaagaaacttaatctcgctcctgcagccaccacttcgaacgagccctcaggcaataaccccccaacccacctgagcctcgatccaacaaatgccgagaacacagcgtcccagtctcctcgtacccgggggtctaggaggcagatccagcgactggagcaactactcgcattgtatgtcgcagagattcgcagacttcaagagaaggagctggatctgtccgagctggacgacccggactctgcataccttcaggaggccagattaaagaggaaattgatcaggctgttcgggagactatgcgagctcaaagactgtagctctctgacaggacgggtgatagaacaacgcataccctacagaggtactaggtatcctgaggtgaaccgaagaatagagaggctgatcaacaaaccaggaccagatactttcccagattacggagacgttctgcgggccgtagaaaaggccgctgctagacattccctcggactgcctcgacagcagctccagcttatggcccaagatgcattccgcgatgttggtatccggctgcaggaacgccgacatctcgatttgatttacaacttcggatgccacctgacagacgactacagaccaggcgttgatcccgccctctccgatcccgtgctggcacgacgcctcagagaaaaccggtctctagccatgagtaggctggacgaggtcatttccaagtatgccatgctgcaagataagtctgaagaaggagaaagaaaaaagcgcagggccagactgcaaggtacaagcagtcactctgctgatacacccgaagcctccctcgacagtggcgagggaccctcaggtatggcgagccaagggtgtccctcagcatccagagctgaaaccgacgatgaggacgacgaggaaagcgacgaggaggaagaggaggaagaagaagaggaagaggaggaagccacagactccgaggaggaggaggatctcgagcagatgcaagaaggtcaggaggacgacgaggaagaggacgaagaggaagaagctgccgctggtaaagacggagataagtctccgatgtccagcttgcagatttccaacgagaagaatctcgaaccggggaaacagatcagtcgtagcagtggtgagcagcaaaataagggaagaatcgtttcccccagccttctttccgaggaacctctggcgccctcgagcattgatgccgagtctaatggagagcagcctgaggagctcactctggaggaggaatccccggttagccagctattcgagctggagattgaagcactgccgttagacacaccttcttctgttgagactgatatctcttcgagccgcaagcagtcagaagagccatttacgaccgtgcttgaaaacggggccggcatggttagttccacctcatttaatggcggtgtgagcccccataattggggagattccggccccccttgcaaaaagagccgaaaggagaagaaacagacaggctccgggcctctgggcaattcctacgtggaaaggcagcgatccgtccatgagaaaaacggaaagaaaatctgtactttgccaagccctccaagccctcttgccagcctggcccccgtcgcggactcaagcacgcgagtggacagtccatcccacggcctggttacttcctccctctgtattcctagtccagcgaggctgtcgcagaccccccactcgcaaccaccccgcccgggtacctgcaagacgtctgtcgctacccagtgcgatcccgaagagatcatcgtgctcagtgattcagattag

SEQ ID NO: 117109 - DNA, 147 bp, Artificial Sequence
  derived and/or modified sequence
atggccaccgccaacagcatcatcgtgctggacgacgacgacgaggacgaggcggctgcccagcccggccctagtcacccacttccaaatgcagcgtcacccggggctgaggccccctctagctcagagccccatggagctaggtag

SEQ ID NO: 117110 - DNA, 393 bp, Artificial Sequence
  derived and/or modified sequence
atggccaccgccaacagcatcatcgtgctggacgacgacgacgaggacgaagccgccgcccagcctggccccagccaccctttacctaacgctgctagcccaggagcagaggccccttctagctcagaacctcacggagccagaggatcaagtagcagcggcggcaagaaatgctacaagttagagaacgagaagctgttcgaagaattccttgaactatgcaagatgcaaacagcagaccaccccgaagtggtgcctttcctgtataacaggcaacagcgcgcccactctttgttcctggcttccgctgagttttgcaacatcctctccagagttctgtcccgggcgagatcgcggcccgccaagctctatgtctacattaatgagctgtag

SEQ ID NO: 117111 - DNA, 537 bp, Artificial Sequence
  derived and/or modified sequence
atggccaccgccaacagcatcatcgtgctggacgacgacgacgaggacgaggccgcggcccagccaggaccttcacacccattacctaacgcggcaagtcccggagctgaggctccatcgagctcagaaccacacggggcgagggggagtagtagctctggaggcaagaagtgctacaaactggaaaacgagaaactgttcgaagaatttctggagctgtgtaaaatgcagaccgctgatcaccctgaggttgtcccgttcctctataaccgccagcagcgggcccactcactgtttctggcctccgctgaattttgtaacatactgagcagagtactatccagagccagatctagacccgcaaagttgtatgtgtacataaatgaactgtgtactgtcctcaaagctcatagtgcaaagaaaaaactgaatctcgcccccgctgccaccaccagcaatgagccttcaggcaacaaccctccaacacacttgtccctggacccaaccaacgccgaaaacactgccagtcagagctag

SEQ ID NO: 117112 - DNA, 2223 bp, Artificial Sequence
  derived and/or modified sequence
atggccaccgccaacagcatcatcgtgctggacgacgacgacgaggacgaggcagccgcccaaccaggcccatctcacccactgccaaatgccgcatctcccggcgctgaagccccgtcaagctctgagccccacggcgccagaggttcctctagttccggaggcaagaagtgttacaaactggaaaacgaaaaactcttcgaagagttcctggagttatgtaaaatgcagactgccgaccaccccgaggtggtccccttcctctataaccggcagcagagagctcatagtctgttcctggcatccgccgaattttgcaatatcctctcgcgagtgctgtcccgggccaggtcacgcccggccaaactctatgtttacattaatgagctgtgtacagtactgaaggcccactcagccaagaagaaattgaacctggcccctgcagccaccacatcgaatgagccatctggaaataatcccccaacgcatctgtccctcgatcccactaacgctgaaaataccgcgagccagtcacccaggacacggggatccaggcggcagatacaacgcctggaacaactgcttgcactctacgttgcagagatacggcggctgcaggaaaaagaactggatctgtctgagctggacgatccggactctgcttacctccaagaggccagattgaagaggaaacttataaggctcttcggccggctttgcgagttgaaggattgttccagcctgaccgggagggtgatcgaacagcggatcccctatcgaggtactcgttaccccgaggttaatagacgtatcgaaagactgattaacaaaccagggccggatacttttcccgattacggggacgttctgagagcagttgaaaaggctgccgcccgccatagtctaggacttccccgccagcaactacaactgatggcccaggacgcctttagagacgttggtatcagactgcaggaaagaagacatctggatctaatatacaacttcggctgccatctcacagatgattacaggcctggagtggatcccgctctcagtgatccagtgcttgccaggcgcctgcgcgaaaaccgcagtttagcaatgagccgccttgatgaggttataagtaagtacgccatgctgcaggataagtccgaagagggcgaacggaagaagaggcgcgcccggctgcaaggaacctcaagccattcagctgacacccctgaggctagcctcgatagcggggagggaccatctggcatggcctcacaaggatgcccaagtgcaagccgtgccgagaccgatgatgaagatgacgaggaatctgatgaggaagaggaggaggaggaagaagaagaagaggaggaggctactgactccgaagaggaggaggatctagaacaaatgcaagaagggcaagaggacgatgaggaagaggatgaagaggaggaggccgcagcaggcaaagatggcgacaagtctcctatgagttccctgcagatctctaacgaaaagaatcttgagcctggtaaacagatatcccggagctctggagaacaacagaacaagggccgcatcgtttccccctctctgctgtccgaggaacctctcgctccctcatcgatcgacgctgagtcaaacggagagcaacctgaggagctgaccctggaggaagagtctccggtctcccagctgtttgagttagaaatcgaggctttgcccctggatacccccagttccgtggagactgatatttcctcaagtcggaaacagtcagaggaaccgttcacgaccgtgttggagaatggcgcgggcatggtctccagtacaagttttaatggcggcgtgtcccctcataactggggggatagcggtcccccctgtaagaagtctaggaaagagaaaaaacagaccgggagcggtccactggggaatagttacgtagagcgacaacgatccgttcatgagaagaacgggaagaagatatgcaccctcccctcgcccccgagcccccttgcaagtttggcaccagtcgctgacagcagcacgcgcgtggattccccctcacatggattggtaacttcttccctgtgcatccccagtcccgcccggctctctcaaactccgcattcccagccccccaggccagggacttgtaagacttccgtggccacccagtgtgacccagaggaaatcattgtcttaagtgattcagactag

SEQ ID NO: 117113 - DNA, 147 bp, Artificial Sequence
  derived and/or modified sequence
atggccaccgccaacagcatcatcgtgctggacgacgacgacgaggatgaggccgccgcccagcctggaccttcccacccattaccaaacgctgcctctccaggggcggaggcaccctctagcagcgagcctcatggtgcacgatag

SEQ ID NO: 117114 - DNA, 2223 bp, Artificial Sequence
  derived and/or modified sequence
atggcaactgcgaattcaattattgtcctggatgatgacgatgaagatgaggccgctgcacaacctggtccttcgcatcctctgcctaatgcagcatccccgggagccgaggcgccatcttctagtgagccacacggagcgcgtgggtcctccagcagtggtggaaagaaatgttataaactcgaaaacgagaaactgttcgaggaatttttggagctgtgtaagatgcagacggccgaccatccggaagtggtgcccttcttgtataaccggcagcagcgggctcactccctgtttttggccagcgcggagttttgtaatattctcagccgggtgttgtctagagcaaggtctaggcctgcaaagttgtacgtttacattaacgagctctgtaccgtgctgaaagcgcactctgctaaaaaaaaattgaacctggcccctgcagcaactacgagcaacgagccatcaggcaataacccccctactcacctgtcactggatccaaccaacgctgagaatacagcttcacagtctcctcgaacccggggaagccggaggcagatccagcggttggaacagcttctcgcattgtatgtggccgagatcaggagactccaggagaaagagttggatctgagtgaattggacgaccctgattctgcttacctgcaagaagccagattgaagaggaagctgatccgacttttcggtcggttgtgcgaactgaaggattgctcatctttaactggcagagttattgagcagcggatcccctacagaggtacgcgctatcccgaagttaatagaagaattgaaaggctgattaacaaaccagggcctgacacatttccagattatggcgacgtactccgcgcagtcgaaaaagctgcagcgcgacacagcctgggcctgccacggcaacagctgcagttaatggcacaagacgctttccgggacgtggggataagactgcaggagcggaggcatctggacttaatttacaactttgggtgtcacctcactgacgattacaggcccggtgtcgatccagccctcagcgacccagtcttggccaggcgccttcgcgagaatcgctccctggcgatgagccgcctggatgaggtaatttccaaatacgccatgctgcaggacaaaagcgaggagggagaacgaaaaaaaagacgtgccagactgcaagggacaagcagccattcagcggatacaccagaagctagccttgactctggtgaaggaccctctggcatggccagtcaggggtgcccctctgcgtctagagcagaaactgatgatgaagatgacgaggagtcggatgaagaggaagaggaggaggaggaagaagaggaggaagaggcgactgatagcgaggaagaggaggacctcgagcaaatgcaggaaggccaggaggacgatgaagaggaagacgaggaggaggaggcggctgcaggcaaggatggcgacaagtcacccatgtcctcactgcaaatatcgaacgaaaagaatctggagccgggtaagcagattagtaggtcctctggggagcagcagaacaagggcagaatcgtgagccctagcctcctgagcgaggagcccctggccccttccagtatcgatgccgagtcgaacggagagcaacctgaggaactgacgcttgaagaggagtcacctgtgtcccaattgttcgaactggaaattgaggcactcccactggacaccccaagctctgtggaaactgacataagctcgtcaaggaaacaatccgaagagccttttaccacagtgcttgagaacggcgctggtatggtttccagtacctccttcaatggtggagtgtcccctcacaattggggcgatagcggccctccctgcaaaaagtcccgcaaggagaaaaagcaaaccggatctggtcctcttggaaatagttacgtggagaggcaaaggagcgttcatgagaagaatggtaagaagatctgcactctgcctagccccccatcacctctggccagtctggcccctgtagcagatagtagcaccagggtcgatagtccctcccatggtctggttacctcgagcctgtgtatcccatcacccgctagactaagtcagacgccacattcacagccacctagaccaggtacgtgcaagacgtctgtcgccacccaatgcgatcctgaagaaattattgttctctctgattcagactag

SEQ ID NO: 117115 - DNA, 2223 bp, Artificial Sequence
  derived and/or modified sequence
atggcaacggctaactccattatcgtgctggatgacgatgacgaggatgaagctgctgcccagccgggacctagtcatccccttcccaatgccgcaagccccggtgccgaagcaccctctagttccgagccccacggagcacgcggttctagcagctcaggtgggaagaaatgctataagctagagaatgagaagctcttcgaggaattcctggaactgtgtaagatgcagaccgccgaccacccagaggtggtgccatttctgtacaatcggcaacaaagagcgcactctctgtttttagcctcagcagagttctgcaatatcctgtcccgggtcctgagcagggctaggagcagaccagccaagctgtacgtgtatatcaacgagctttgtacagttctgaaggctcatagcgcgaaaaagaagctgaatcttgctcctgccgcaacaacgtcaaatgagccatctgggaacaatcctccaactcacctgtcccttgatcctacgaatgccgagaacacagcctcacagtcacccaggacacggggaagcagaagacagatccagcggctcgagcaattacttgccctgtatgtggcggagattcggaggctccaggaaaaggaactcgacctgtctgaattagatgatcctgatagcgcttaccttcaggaggccaggttaaaacggaagctcatccgcctgtttggccgactgtgcgaactcaaagactgctctagcctaacaggcagggtcatcgagcaacgtatcccgtacagaggcacacgctaccctgaggttaataggaggatcgagagactaataaataagcctgggcctgacacgttccctgattacggtgacgtgctgagggctgtggaaaaggcagctgcccgacactccctgggcctgccgcgtcagcagctgcagttaatggcacaggatgcatttcgtgatgtcggcataaggctgcaggagaggcgtcatctggacctcatctacaactttgggtgtcacctaactgatgactatcgcccaggggtggaccccgctctgagtgatccagtgcttgcccgtaggctacgggagaatagatctctcgctatgtctaggcttgatgaggttatttccaaatatgcgatgctgcaggataaatcggaggagggggaacgcaaaaagaggcgcgctcgccttcaaggaacctccagtcactccgccgacacaccggaagcctctttggatagcggcgagggtccctctggtatggcttcacaaggatgtcctagcgcaagtagggcagagactgacgacgaggacgacgaggagtctgacgaggaagaagaagaggaagaggaagaagaagaggaggaagccaccgactccgaggaggaggaggacctggagcagatgcaggaggggcaggaagatgatgaagaagaggatgaggaggaggaggcagccgctggcaaggacggtgataagagcccaatgtcaagcttacagatttccaatgaaaaaaatctcgagccaggcaagcaaattagccggtccagtggggaacagcaaaacaaggggaggatcgtgagtcccagcctactgtctgaagaacccctggcgccttcttccattgatgcagaaagtaacggagaacagcctgaagaactaacactggaagaggagtcaccagtcagccagctcttcgaattggaaattgaggcgctccctttagacacaccctcatctgtggagaccgacatcagcagcagcagaaagcaatccgaagagcccttcaccaccgtgctggaaaatggcgcaggtatggtgtcctctacatctttcaacggaggggtgtcgccccacaattggggggactcagggcctccatgtaaaaagagccggaaagagaagaaacagaccggctcgggtccactcggcaattcatacgtggagcgccaacgctctgtgcatgagaagaatggtaagaaaatttgcacattgccctcccctccatcccctctcgcatctcttgcacctgtggctgacagcagtacacgggttgactctcccagccatgggctggttacatctagcctgtgcattccctctccagcgagattaagtcagactccccacagtcagcctcctaggccaggtacttgcaagacatcggttgcaacccagtgtgaccccgaagagattattgtactgagcgactctgactag

SEQ ID NO: 117116 - DNA, 2223 bp, Artificial Sequence
  derived and/or modified sequence
atggcaacagctaacagcataattgttctcgatgacgacgacgaagacgaggccgctgcccagcccggtccctcccacccactgcccaacgccgcttcccccggtgccgaggccccatcctcaagcgaaccacacggcgcaagggggtcaagttcatcaggcggtaagaagtgttataagttagaaaacgagaaattgttcgaagagttcttggagctatgcaaaatgcagaccgcggatcatcccgaggtggttcccttcctgtataatcgacagcagcgagcacacagcttgtttctcgcctccgccgagttttgcaacatcttgagccgagtcctgtcccgtgccaggagtcgccctgccaaactgtacgtttacattaacgagctctgcactgtgctgaaagcccactccgccaaaaagaaacttaatctagccccagctgcgactacctctaatgagccgtccgggaataacccgccaacccatttgagtcttgaccccactaacgcagagaacaccgcaagccagtccccacgcacaagaggatctagacgacagattcagaggctggagcagcttctggccctctacgtcgctgaaattcgacgcctgcaggagaaggaactggacctctcagagcttgacgaccccgattccgcgtatctgcaggaggccaggttaaaacggaaactcatcagactgtttgggaggctgtgcgaactgaaagattgctcctctttgactggccgtgtgattgaacaacgaataccctatcgcggaacccggtatcctgaggttaatcggcgaatagagcgtctaattaataaaccgggaccagatacttttccggactatggagacgtcctgcgggcagtggaaaaggccgctgccaggcattccttgggccttccgagacagcagctgcagttgatggctcaggacgcttttagagatgtcgggataagactgcaggaacggcgacacctggacctgatctacaactttggctgtcacttaacagatgactatcggccaggggtcgaccccgcacttagcgatcctgtgctcgcaagacggctccgtgagaataggtctctggccatgagtagactggatgaggttatttccaaatatgcgatgctccaggacaaatcagaagagggagagaggaagaagcggagagcacggctgcaggggacatccagtcactctgcggatacccccgaggcctctctggattccggtgaaggcccttctggcatggcctcccaggggtgcccgagcgcctcgcgtgctgaaaccgacgatgaggacgacgaggaatccgacgaagaggaagaggaggaagaagaggaagaagaagaagaagctaccgacagcgaagaggaagaagaccttgagcagatgcaggagggacaggaagacgacgaagaagaagatgaagaggaagaagccgctgccggaaaagatggggataaatcacctatgtcttccttacaaatctccaacgagaaaaacctcgagcctggcaaacaaatttcccgcagctcaggggagcagcaaaacaagggacgaattgtgagtccaagcctgctgagcgaggagcctctggcccctagcagtattgacgcagaaagcaatggagaacagccagaggagcttacacttgaagaggaatcccctgtctcccagctgttcgagctggagatcgaggccctacccctcgacaccccttcttcagtagagacagacattagttcaagcagaaagcagagtgaggagcccttcactaccgtgctggaaaatggggctggaatggtatcctctacctccttcaacggcggagtgagcccccacaattggggcgattccgggcctccctgtaagaagtctcggaaagaaaagaagcagacaggttctgggcctcttggaaactcttacgtggagcggcagcgctccgtgcacgagaaaaacggaaagaagatttgcacactgccaagtccacccagtccgctggcctctcttgcacccgtggctgacagctcaacacgcgttgactcccctagccacggcctcgtaaccagcagcctgtgtattccatcgcctgccaggctttcacaaacaccccacagtcaacctcccaggcctggcacctgcaagacctccgtggcgacacagtgtgacccagaggaaataattgtactgtctgacagcgattag

SEQ ID NO: 117117 - DNA, 2223 bp, Artificial Sequence
  derived and/or modified sequence
atggctacggccaattcaatcatcgtgctcgatgatgatgacgaagatgaagccgcagctcagcccggtccaagccaccccttgcctaacgcggcttctccgggtgctgaggctcccagttctagcgaaccccatggcgcacgcggatccagcagtagcggagggaaaaaatgctacaagctggagaacgagaagctgtttgaagagtttctggaactgtgcaagatgcagactgccgatcatcctgaggtggtgccgtttctgtataataggcagcagcgggctcacagcttgttcctggcctctgcagaattttgtaacatcttaagcagagttctctccagagctcgctctcggcctgccaaactgtacgtgtatatcaacgaactctgcaccgtgcttaaggcccattccgccaagaaaaagctgaatctcgcccctgccgctacaacatcaaatgagccctccgggaataacccgccaacccatttgagcctggacccaacaaatgctgaaaataccgcctctcagtctccccgaacaagaggctcacgcagacaaattcagagactcgagcagctgctggctctgtatgtggctgaaatccgaagactgcaggagaaggagctcgacctgtccgagctcgatgatccagacagtgcatatctccaggaggcacgactaaaaagaaaactcatccgcctttttggccgattgtgcgaattgaaggattgcagttccctgacaggaagggtgatcgagcagagaattccctacaggggtacaaggtaccccgaggtgaatcggagaatcgagcgtcttataaataagcccggtccagacaccttccctgattacggagacgtacttagagcagtagagaaggcggcagcacggcactcactcggccttcccaggcagcagctccagctcatggcccaggatgctttcagggatgtcggaattaggttgcaagaacggcgacatctggaccttatctacaatttcggctgtcacctcacagacgactacaggccgggagtggatccagctcttagtgacccggtgttggccagaagactgagagaaaatcgaagtctcgctatgagcaggcttgacgaggtaatcagtaagtacgctatgctgcaagacaagagtgaggaaggggaacggaaaaaaaggcgcgcaagactccaaggcactagctctcactcagccgacactccagaagcatccctcgattcgggggaaggacctagcggcatggcctcccagggctgcccatccgccagtagagcagaaactgacgacgaggatgatgaagagagtgacgaggaggaagaggaagaagaggaggaggaggaagaggaggccaccgattctgaggaggaagaggatttggagcaaatgcaagaaggccaggaagacgacgaggaggaggatgaagaggaggaggctgcagctgggaaagatggagacaaatctccaatgtcttcactacagataagcaatgagaaaaatctcgaaccaggcaaacagatctccaggtcctccggcgagcaacaaaacaaaggtagaatcgtgagccccagtctcctgtctgaggaaccactagcacctagtagtatcgacgctgaatctaatggggagcagccagaagaactcaccctcgaggaggagagtccagtatctcagctgttcgagcttgaaattgaggcactaccgctcgatactccctctagcgtggagaccgatatctcttcgtctcgtaaacaatctgaggagccgtttactacagtgcttgagaacggagcagggatggtgtcatcaaccagcttcaacggtggcgtttcaccacacaactggggtgactccggcccaccctgtaaaaaaagccgcaaagaaaagaagcaaacaggtagtggcccattgggcaattcatacgttgaaagacagcgttcagtgcatgaaaaaaacgggaagaagatctgtaccctgccttcccctcctagtccgttggcttccctagcaccggtagccgactcctccacccgggttgattctccgagccatggactagtaacctcgagtctgtgcattcctagcccggcacggttatcgcagactccacattcccagccaccacggcctggaacctgcaaaacaagcgtcgcaacccagtgcgatcccgaggaaatcatagtgctcagcgactccgactag

SEQ ID NO: 117118 - DNA, 393 bp, Artificial Sequence
  derived and/or modified sequence
atggccacggcaaatagtattattgtgttagatgacgacgacgaggatgaagctgccgctcagcctgggccatcccatcccctgcctaatgccgcttcacctggggcagaagccccatcaagctccgaacctcatggcgctcgagggtcgtcgtccagtgggggtaagaaatgctataagctcgaaaacgagaaactgttcgaagaatttctcgagctatgcaaaatgcagacagccgatcatcctgaggtcgtccctttcctgtacaacagacaacagagagcacacagcctctttctggcgtcagcggaattttgcaacattttgagcagggtcttgagccgggctcgctcaaggcccgcaaaattgtacgtgtatataaatgagctgtag

SEQ ID NO: 117119 - DNA, 147 bp, Artificial Sequence
  derived and/or modified sequence
atggctactgctaatagtattattgtgctcgatgatgatgacgaagatgaggccgctgcccagcctggccctagtcaccccctaccaaacgccgcaagccctggtgctgaggcccctagttcgagtgagcctcatggcgctcggtag

SEQ ID NO: 117120 - DNA, 393 bp, Artificial Sequence
  derived and/or modified sequence
atggctaccgccaactctatcattgtgctggatgacgacgacgaggatgaagctgctgcccagcctggtccctcccatcccctccctaatgcagcctctccgggagctgaagcaccctcaagtagcgagcctcatggcgcaagagggtcaagttcctcaggtggaaagaagtgctataaacttgagaacgaaaagctgtttgaggaattcctcgagctgtgtaagatgcagaccgcagatcacccagaagtggttccttttctgtacaatcgacagcagagggcccactctcttttccttgcgagcgcggagttctgtaacatacttagcagggtgctcagtcgcgcacgaagccgcccagccaagctttatgtctacattaacgaactttag

SEQ ID NO: 117121 - DNA, 147 bp, Artificial Sequence
  derived and/or modified sequence
atggccacggctaacagcattattgtgctggatgacgatgacgaagacgaggcggcagctcagcctggtccttcccaccctcttccgaacgccgctagccccggtgctgaagccccaagctcaagcgagcctcacggggctaggtag

SEQ ID NO: 117122 - DNA, 537 bp, Artificial Sequence
  derived and/or modified sequence
atggccactgccaatagcattatcgtgttagacgacgacgacgaagacgaggcagctgcccagcccggacccagtcacccgctgcccaacgcagcctctcctggggctgaggcgccttcttcttctgagccccacggagcaagaggcagctcatcaagcggcggaaaaaaatgttacaagctggagaacgaaaaactctttgaggaatttctcgaactgtgcaaaatgcagaccgctgaccatccagaggttgtgccgtttctctataataggcaacagagggcacattccctgtttctggcctctgccgaattttgtaatatcctttctcgcgttctcagtagagcacgcagccggcctgcgaagttatatgtgtatatcaatgagttgtgcaccgttctgaaggcacattccgccaaaaaaaagctgaacctggccccagcagccaccacatctaacgagccaagcggaaataatcctcccacacacttatctctggatcctaccaacgccgagaacactgctagtcaatcatag

SEQ ID NO: 117123 - DNA, 537 bp, Artificial Sequence
  derived and/or modified sequence
atggcaaccgccaactccattatcgtgctggatgacgacgacgaagatgaggcagcagcccaacccggaccgtcacaccctcttccaaacgcagcctctcctggagccgaagcgccttcatcttctgaaccgcacggcgctcggggatccagttcatccggcggtaaaaagtgctacaagttagaaaatgagaagctctttgaggagttcctggagttatgtaagatgcagactgcagatcatcccgaagtagttccttttctctacaacagacaacagagagcgcattctctcttcttggctagtgccgagttctgcaatattctttctagggtgttgtctcgggctaggtcaaggccggctaaattatatgtgtacatcaacgagctgtgtaccgtgctgaaagctcactccgcgaagaagaagctgaacctggcccctgctgccactactagtaatgaaccatcgggtaataatcctcctacccatctctcgctggacccaaccaatgccgaaaacacagcctcccagtcctag

SEQ ID NO: 117124 - DNA, 2223 bp, Artificial Sequence
  derived and/or modified sequence
atggccacagcgaattccattattgtgctggacgacgatgacgaggatgaagcggcagcccagccaggcccttcacatcctctgccgaacgccgcttcccccggagcagaggctccttcttcatctgaaccacatggcgcaaggggctccagctcatccggagggaaaaagtgctacaaactcgaaaatgaaaagctatttgaggagtttctggagctttgcaaaatgcagacagctgaccatccagaggtggtgcctttcttgtacaatcgccagcagcgggctcattctctcttcctggcttcagcagagttctgcaatattctcagtagggtgctttcacgggctaggagccgccctgccaagctttatgtgtatattaatgaactttgcacagtgcttaaggcccactccgcgaagaaaaagctgaatttagctcctgccgctacgactagtaacgagcccagcggcaacaaccctccaactcatctgtctctggaccctactaatgctgaaaacactgcatcccaaagccccagaacccgcggttctcgccgacagattcagcgcctagagcagctgcttgccctgtatgtcgctgagatcagacgactgcaggagaaagagttggacctgtccgagttggatgatcccgactccgcatacctgcaggaagctcgcctaaaacgtaagctgattagacttttcggccgtctgtgcgagctgaaggactgctcttctttgactggaagagtaatcgaacaacggattccttacagagggaccagataccctgaggtgaatcggagaattgaacgtctgatcaataagcctggacctgacacctttcccgattacggggatgtactacgggcagtagaaaaagcagcagccagacactccctgggactgccacggcaacaactgcagctgatggctcaagacgctttccgcgacgttgggatcagattgcaggagcgaaggcacctggacttgatttacaattttggctgccacctgactgacgattacagaccaggcgttgatcccgcactgtcagacccagtgttggctaggcgcctgagggaaaatcgaagcctggcgatgagccggttggacgaggtcatttcaaagtatgcaatgcttcaggacaaaagcgaagaaggggaacgcaaaaagcgtcgagccaggttgcagggcacatcctcacatagcgccgacacacctgaagcgtcactcgactccggcgaaggtccttctggaatggcatctcagggctgtccaagcgcatctcgggcagagacagatgatgaagacgatgaggaaagcgacgaggaggaggaggaagaggaagaggaggaagaggaggaggccaccgattcagaagaagaagaggacctcgagcaaatgcaggaagggcaggaggacgacgaagaagaggacgaggaagaggaagcagccgcaggtaaagatggcgataagtctccaatgagctcgttgcagatttccaacgagaagaacttagagccagggaaacaaatcagccggagcagcggagagcagcagaataagggccgaatagtgtcacccagcctcctgagtgaggaacctttggccccatcgagcatagacgcagagtctaatggggagcagccagaagaacttactctcgaagaggagagtccagtttcccagctgttcgagctcgagattgaggcactgcctctcgacacaccaagctccgtggagacagacatcagcagcagtcgaaaacaatctgaggaaccctttactacagtgttggagaacggggcaggtatggtgtcgtccactagttttaacggcggtgtatctcctcataactggggcgactcagggcctccatgcaaaaaatcccgcaaagagaaaaagcagactggctcaggccctttaggtaactcgtacgtcgagcgccagcgatccgtgcatgagaagaacggtaagaagatatgtacacttccgtccccaccgtctccgttggcttccttggctccggtggccgattcaagcacccgagtggacagcccttcccatgggctggtgacaagctctctctgtattccttctcccgctcgtctgtcccagacacctcacagccaaccgccaagaccgggaacatgcaaaacctccgtggctactcagtgtgacccagaggagatcatcgtacttagcgactcagactag

SEQ ID NO: 117125 - DNA, 2223 bp, Artificial Sequence
  derived and/or modified sequence
atggccacggccaacagcatcatcgtcctagacgatgacgatgaggacgaggccgcagctcagccgggtccgtcccaccctctacctaacgccgctagtccaggcgcagaggcccctagtagttccgagcctcacggagcccgtggatcttccagctcgggcggaaaaaaatgctacaaactggaaaatgagaagcttttcgaggagttcctcgaattgtgcaagatgcagacggcagatcaccctgaggtggtcccctttttgtacaaccggcagcaacgcgcacacagcttgtttttggcttcagcggaattctgtaacattctcagtagggtcctatctagagcacgttcccgtccagcaaagctttacgtgtacatcaacgagctttgtacggtgttgaaggctcactctgccaagaagaaactgaatctcgcaccagctgctacaacttctaacgaaccatccggaaataaccccccaacccacctgtccctcgatccgacaaatgctgaaaacacggctagccagtcccctcgcactcgaggcagcagacggcagattcagcgcctggaacagttgctcgctctctatgtggccgagatccgaaggttacaggagaaagaactggacctgtccgagctcgatgatcccgactccgcctacctgcaggaagccaggctgaagcggaaactgatccggctatttggcaggctctgtgaactaaaagattgcagctcattaactggtcgcgtcatcgaacagagaattccatacagaggtacaagatatcccgaggtaaatcgaaggatcgagaggttaatcaacaaacctggaccggacacatttccagattacggggacgtgttgcgcgctgtagagaaagctgccgcacgacacagcctgggactcccacgccagcaactgcagctgatggcccaggatgcattccgagatgttgggattagactccaggagaggcggcacttggatctgatctacaacttcggctgtcaccttacggatgattaccgtccaggggtcgaccctgccttgtcagatcctgtgctggctcgacgattgcgggagaacagatcactggctatgtcacgtctggatgaagtcattagtaaatatgccatgcttcaggacaagagcgaggagggagagcgtaaaaaaaggcgggcacggctccagggcacttctagtcacagtgccgatacgcctgaggctagcctggattcgggcgagggaccatccggaatggccagccagggctgcccatcagcctcccgggcagaaactgatgacgaggacgatgaggaatctgacgaggaagaggaggaagaagaagaggaagaagaagaggaggccactgatagtgaggaggaagaggatcttgagcaaatgcaagaagggcaagaggatgatgaagaggaggatgaggaggaagaagccgctgctggaaaggacggcgataaaagcccgatgtctagcttgcaaattagcaatgagaagaatctcgaacccggtaaacagatcagccgctcctctggggaacagcagaataaggggagaatcgtgtccccttcattactctctgaggaaccactggccccatcctcgattgacgctgaaagcaacggagagcagcccgaagagttaactctcgaagaggaaagtcccgtgtcacaactctttgaacttgagatagaggccctcccattggacacgccctcgagcgtggagaccgatatttccagttctagaaagcaatccgaggagccctttacaaccgtgctcgagaacggggcaggtatggtcagcagcactagcttcaacggcggtgtgtccccgcacaactggggtgatagcgggccaccatgcaagaagtcacgcaaagaaaagaagcaaaccggatctggaccactgggtaatagctacgtggaaagacaacgtagcgtacatgagaagaatggaaaaaaaatctgcaccctgccctcaccaccttcacctttagcgagcctcgccccagtggcagatagctcaacccgcgtagattcaccatctcacgggctggtgactagcagcctctgtatcccaagtccggcaaggcttagtcagaccccccactcccagccccctagacctggcacatgcaaaacatcagtagccacacagtgtgatcccgaggagataattgttctctcagattcagattag

SEQ ID NO: 117126 - DNA, 393 bp, Artificial Sequence
  derived and/or modified sequence
atggcaactgccaatagcataatagtgcttgacgatgacgacgaagatgaagccgcagcacagcccggaccctcccaccccctgccaaatgctgcatcgccaggggctgaggcaccctctagtagcgagccacatggcgctcggggtagttcttccagtggcggtaagaagtgctataagctagagaatgaaaaactgttcgaggaattcctggaattgtgtaaaatgcagacagcggaccaccctgaagtcgtgccgtttctttataacagacagcagagagctcatagcttgtttttggctagtgccgaattctgtaacattctaagccgggtgttatcccgcgctcgctcacgaccagccaaactttacgtttatattaatgagttgtag

SEQ ID NO: 117127 - DNA, 537 bp, Artificial Sequence
  derived and/or modified sequence
atggccaccgcgaactccatcatcgtgctggacgatgacgacgaagacgaagccgcagcacagcccggacccagtcaccccttgcccaacgccgcaagtccaggcgctgaggcgccaagttcctcggagccccacggagcccgtggatcaagtagctcaggcggaaagaagtgctataagctagagaacgagaaattgtttgaggagttcctggaactctgcaagatgcaaacagcagatcaccctgaagtagtgccgtttttgtacaaccgccagcaaagggcccattcactgttcttggcttcagctgaattttgcaatattctctcacgcgtgctcagcagggcaaggagcaggcccgcaaagctgtacgtctatataaacgaactatgcaccgttctgaaagcccacagcgcaaagaagaagctgaacctggcccctgctgcgaccacctccaatgaacccagcggcaataatcctcccactcacctgtccctggatcctactaatgctgaaaatactgcctctcagtcctag

SEQ ID NO: 117128 - DNA, 2223 bp, Artificial Sequence
  derived and/or modified sequence
atggccactgccaactcaatcatcgtattggacgatgacgacgaggacgaggccgcagctcagcctgggccttcccaccctctccctaatgctgccagtcctggcgctgaggccccttcgagcagcgaaccccacggagccaggggctccagctcttcggggggtaagaagtgctacaagttggaaaatgaaaagttatttgaggagttcctggagctgtgcaagatgcagactgcggaccacccagaggtggtgcctttcctctataacaggcagcagagagcacattcactattcctggcatcagctgagttttgcaacatcctgagcagggttctgagtcgcgcaagatcccggcctgcgaagctctacgtttatataaatgagttgtgtacggtcctgaaagcccacagtgccaaaaagaaactcaacctggcacccgctgctactacctccaatgagccaagcgggaataacccgccaacccatctttccctggacccaacaaacgccgagaacaccgccagccaaagcccaaggactcgcggatcacgcagacagatccagcgcctcgagcaattgctggcactgtatgtggcagagatccgtcgcctgcaggagaaggagttggacctgtctgagctcgacgaccccgactctgcatacttgcaggaggcgcgactcaaaaggaaactgatccgactgttcggccgattatgcgaactgaaggattgctccagtcttaccggcagggttatcgaacagagaatcccttaccggggtacccgctatcctgaggtaaaccgccgtatcgaacgcctgatcaataagccaggacccgacacctttccagattacggcgatgttcttagggcagtcgagaaggcagctgcacgccactcactgggtctacctcggcagcagctgcaactgatggctcaagatgccttcagagatgtgggaatccggctccaggaacggagacacctggacctaatctataatttcggttgccacctgactgatgactatcgccctggagtggatcccgctctgtccgaccctgtcctggccaggagactgagagagaaccggtctctggccatgtcacgtctggacgaggttattagtaagtatgcaatgctgcaggacaagagcgaggagggcgagagaaaaaaaagacgcgcaagactgcagggtacctcatcccatagtgccgacacgccagaggcctccctcgattctggagaaggccctagtgggatggcatcacagggctgtccctcagcctcgagagctgaaacagatgacgaagacgacgaagagagtgatgaagaggaggaagaagaagaagaggaggaagaagaagaggccaccgattccgaggaggaggaagacctggaacaaatgcaggagggccaagaggacgacgaggaggaggatgaagaagaggaagctgcagcaggcaaagatggggataaatccccaatgagttccttacagatctctaatgagaaaaaccttgaaccaggcaagcagatctcccgctcgagcggagagcagcagaacaaaggacgcattgtgagtccaagtcttttaagcgaggaaccattggcccctagttctattgatgccgagtcaaacggcgagcagcccgaggaactcactctagaggaggaatctcctgtgtcccaattgttcgagttggaaatagaagctctgcccctggataccccgtcctccgtggaaaccgacatctcttcttcccgaaagcagtccgaggagccctttacaactgtattagaaaacggcgctggaatggtctcaagcacaagcttcaatggaggcgttagcccgcataactggggggattctggccctccatgcaagaagtccagaaaagaaaagaaacagacgggttccggcccactcggaaactcctacgttgaaagacagcggagcgtgcacgagaaaaacggcaaaaagatatgcaccctgccgtctccgccaagccccctggctagcctggctcctgttgctgattccagtaccagggtagattctcccagccatggtctagtgacatcttcactgtgtatcccaagcccggctcgcctcagccagacccctcattctcagccaccgagacctggaacttgcaaaacgtccgtggccacacagtgtgatccagaagaaattattgtgctcagcgactcagactag

SEQ ID NO: 117129 - DNA, 147 bp, Artificial Sequence
  derived and/or modified sequence
atggccaccgctaatagtattatcgttctcgacgatgacgacgaggatgaggcggctgcacagccaggccctagccaccctctccccaacgcagcctccccgggagctgaggccccatcatctagcgaaccccacggagctcgctag

SEQ ID NO: 117130 - DNA, 393 bp, Artificial Sequence
  derived and/or modified sequence
atggctacagctaactccataatcgtgctagatgacgatgatgaggatgaagccgctgcacagcccggaccaagtcatccactcccgaacgccgcaagcccaggcgctgaggccccttcgagcagtgagccccacggagccaggggaagctcctcctctgggggtaaaaaatgttacaagttggaaaacgagaaactgtttgaagagttcctggaactgtgtaagatgcagactgcggatcacccagaggttgtgccatttctctacaatcgacagcagagggcccacagcctgtttctggcctccgcggagttttgcaacatcctctctagggtcctgagcagggcgagatcacgtccagccaaactctacgtttacatcaatgagctgtag

SEQ ID NO: 117131 - DNA, 537 bp, Artificial Sequence
  derived and/or modified sequence
atggctactgccaatagtataattgtcctggatgatgatgatgaagacgaggcagcagcacaaccgggaccatcgcaccctctcccaaacgccgcatctcctggtgctgaagcgccaagcagttctgagcctcacggcgcacgagggagcagctcttcaggcggtaaaaaatgctataaactcgaaaatgaaaaactctttgaggaattcctggaactatgcaagatgcagacagctgaccacccagaggtcgtgcccttcctctataaccgccagcagcgggctcactctttgtttcttgcctcggccgaattctgcaatatcctttcaagggttctcagtcgcgcacggtcaaggcccgcaaagctgtacgtctacataaacgagttatgtactgttctcaaggcccatagtgccaagaagaagctgaaccttgctcctgctgccacaacatccaatgagccatcaggaaataacccacctacccacttaagtctcgaccccaccaacgcagaaaatacggcctcccagagttag

SEQ ID NO: 117132 - DNA, 2223 bp, Artificial Sequence
  derived and/or modified sequence
atggcaactgccaatagcattattgtgctggacgatgacgacgaagatgaggctgcggctcagcctgggccaagccatccacttccaaatgcagccagcccgggagccgaagccccatctagctcagagccacacggggctaggggaagcagcagctctggaggtaagaagtgttacaaactagagaacgaaaaactgttcgaggagttcctggaactctgcaaaatgcagaccgcagatcacccagaagttgtgccgtttctctataatcgccagcagcgcgcacactctctgtttctcgcctccgctgagttttgtaacattttgtccagggtcctgtctagagcaaggtcaagacctgcgaagctttacgtgtatataaacgagctttgtacggtgctcaaggcccactcggcgaagaagaagctcaacttggcgcctgctgctaccacgagtaacgaaccctcaggaaataaccctcctacccatctgtccctggaccctaccaacgccgaaaatacggccagccagtcgccaagaacacggggatcaaggagacagattcagaggctggagcagctgctggccttatacgtggccgagatcaggaggctgcaagagaaggagttggatctgtctgagttagatgatcccgactctgcgtatctccaagaggccaggctgaagcggaaactaattcgattgtttgggagattatgtgaattaaaagactgttcttccctaaccgggcgagtcattgaacagcgcatcccataccggggaactcggtatccggaagtaaataggcggatcgaacgactgatcaataagccgggacccgacaccttccccgattatggtgacgtgcttcgggcagtcgagaaagctgcagccagacactccctcgggttaccccgtcagcagctgcagctgatggctcaggacgcattccgggacgttggaattcggctgcaggagaggcgccatctggatcttatctataactttgggtgccatcttaccgacgattaccgccctggcgtggatcccgctcttagcgaccctgtcctggctcgtagattgcgggagaaccgctccctcgccatgagtagattggacgaagtgatctccaaatacgccatgctacaagacaagtcagaagagggcgaacgcaaaaagcgtcgtgcacgcctgcagggaacgagttcccactcagccgatacaccggaagcttccctggactccggagagggtcccagcggcatggcttctcaggggtgccccagtgcctccagagcagaaacagatgacgaagatgacgaggaatctgacgaggaagaggaggaggaagaagaggaagaagaagaagaggctacagattctgaagaggaagaagacctggagcagatgcaggaggggcaggaagatgacgaggaagaggacgaagaagaagaagctgccgctggcaaggatggggacaaaagccccatgtcaagtttgcagattagcaacgaaaagaatcttgagccaggcaaacaaatttccaggtccagtggcgaacaacagaacaagggaagaatcgtgtccccaagcctgctcagtgaggagcccctggccccaagtagcatcgacgctgaaagcaacggcgaacaacccgaggagcttacgttggaggaggaaagccctgtgtcccagctgttcgagctggagatcgaagctctgccccttgatacgccgtcctctgtggaaactgacatctcgtcttccaggaaacagagcgaagagccgttcactacagtactggaaaacggcgcaggcatggtgagcagcacctcatttaatgggggagtctcaccccacaactggggagactcaggtccaccttgcaagaaatcccgaaaggaaaagaagcagaccggctccggccctctaggcaactcttacgttgagcggcagagaagcgtgcacgaaaagaacgggaaaaaaatatgcaccctaccctcaccgccttccccactggcaagcctcgcccctgtcgcagactcttcaacaagggtcgattcaccatcgcacggcctggtcacttcgtcactctgcattcccagccctgccaggctgagtcagacaccacattcccagcctccccgacccggtacatgcaaaacaagcgtggccacacaatgtgaccccgaggaaatcatagtactcagcgattccgactag

SEQ ID NO: 117133 - DNA, 147 bp, Artificial Sequence
  derived and/or modified sequence
atggctaccgcaaacagcataattgtgctcgatgacgacgacgaagatgaagccgcagcccagcccggaccgtcccacccgctacctaatgctgccagtccaggggctgaggcgccaagctccagtgagcctcatggggcacgatag

SEQ ID NO: 117134 - DNA, 371 bp, Artificial Sequence
  derived and/or modified sequence
ttggggagagctgggcgctgagtctgaggggaatgctgtggtaccttcctgtccctgaaagggagtggagcggccgggggctgaactgggggagggggatttggcgggaagcgcatctagcggaccggccggacccacggttgggatctaagaggaatcgcgagagcgtagcgcgcaggaattctgaaatccccaccacttcctccctccgggggatttgatcccctatggccaccgctaacagcatcatcgtgctggatgatgatgacgaagatgaagcagctgctcagccagggccctcccacccactccccaatgcggcctcacctggggcagaagcccctagctcctctgagcctcatggggccaga

SEQ ID NO: 117135 - protein, 295 aa, Artificial Sequence
  derived and/or modified sequence
MSTANPETPNSTISREASTQSSSAATSQGYILPEGKIMPNTVFVGGIDVRMDETEIRSFFARYGSVKEVKIITDRTGVSKGYGFVSFFNDVDVQKIVESQINFHGKKLKLGPAIRKQNLCAYHVQPRPLVFNHPPPPQFQNVWTNPNTETYMQPTTTMNPITQYVQAYPTYPNSPVQVITGYQLPVYNYQMPPQWPVGEQRSYVVPPAYSAVNYHCNEVDPGAEVVPNECSVHEATPPSGNGPQKKSVDRSIQTVVSCLFNPENRLRNSVVTQDDYFKDKRVHHFRRSRAMLKSV

SEQ ID NO: 117136 - DNA, 888 bp, Artificial Sequence
  derived and/or modified sequence
atgtcgacagctaatcctgaaaccccgaacagcacaatctctcgggaggcttccacacagtccagcagcgctgcaacatctcaaggttacatcttgcctgaaggcaaaattatgcccaatacggtgttcgtggggggcatcgacgtccggatggatgagacagagataagatctttctttgcccggtatggttcagtcaaggaagttaagattatcaccgaccggacgggggtgtctaagggttatggcttcgtttctttttttaatgatgtggacgtgcagaagatagtagaatctcagattaatttccatgggaagaagctcaaacttggccccgccattaggaaacaaaacctgtgcgcttaccacgtccagccacggcctctggtgttcaatcacccaccaccaccgcagtttcagaatgtgtggacgaacccgaacaccgaaacatacatgcagcccactaccaccatgaatcccatcactcagtacgtccaggcatacccaacatatcctaactctccagtgcaggttattaccggttatcagctgcccgtgtacaactatcagatgccacctcagtggcccgtcggggaacagcggtcttacgtggtaccaccagcatatagtgctgtgaattatcattgtaacgaagtagacccaggcgcggaagtggtgcctaacgagtgtagtgtgcacgaggcgacccctcctagtgggaatgggccacagaagaagtccgttgacagaagtatccagaccgttgttagttgcctgttcaaccctgagaacagattacgcaactctgtagtcacccaggatgattactttaaggacaaacgggtgcaccattttaggcgcagtagggctatgctgaaatctgtgtag

SEQ ID NO: 117137 - DNA, 888 bp, Artificial Sequence
  derived and/or modified sequence
atgagcacagccaaccctgagacccccaacagcaccatcagccgggaggccagcacccagagcagcagcgctgccaccagccagggctacatcctgcctgagggcaagatcatgcccaacacagtgtttgtgggcggcattgatgtgaggatggatgaaacagagatccgctccttctttgcccgctatggctctgtgaaggaggtgaagatcatcacagacagaactggagtgtccaagggctacggctttgtgtccttcttcaatgatgtggatgtgcagaagatcgtggagagccagatcaacttccacggcaagaagctgaagctgggccctgccatcaggaagcagaacctgtgtgcctaccacgtgcagccccggcccctggtgttcaaccaccccccaccaccccagttccagaatgtgtggaccaaccccaacacagagacctacatgcagcccaccaccaccatgaaccccatcacccagtatgtgcaggcctaccccacctaccccaacagccctgtgcaggtgatcaccggctaccagctgcctgtgtacaactaccagatgccaccccagtggcctgtgggggagcagaggagctatgtggtgcccccagcctacagcgctgtgaactaccactgcaatgaggtggaccctggagctgaggtggtgcccaatgaatgttctgtgcatgaggccaccccaccttctggaaatggcccccagaagaagtctgtggacaggagcatccagacagtggtgtcctgcctcttcaacccagaaaatcggctgagaaattctgtggtgacccaggatgactacttcaaggacaagagggtgcaccacttccgccgcagccgggccatgctgaagtctgtgtag

SEQ ID NO: 117138 - DNA, 888 bp, Artificial Sequence
  derived and/or modified sequence
atgagcaccgccaaccccgagacccccaacagcaccatcagccgggaagcctccacccagagtagtagcgcggccacctctcaaggctatattttgcccgagggcaaaattatgccgaatactgtgtttgttggcgggatcgacgtccggatggatgagacggaaattagatctttctttgctcgatacggctcagtgaaggaagtcaaaattataacagacagaactggggtctctaagggatatgggttcgtctctttctttaatgacgtggatgtgcaaaagatagttgagtctcagataaacttccacggcaagaagctgaaactgggaccggctattaggaaacagaatttgtgtgcctatcatgtgcaaccaaggcccctcgttttcaaccacccgccaccaccccaatttcagaacgtttggacaaaccctaacactgagacatacatgcagccaacaacgactatgaacccaattacccaatatgtccaagcgtatcctacgtaccccaactctcctgtgcaagtaattacaggctaccaattgcccgtgtataactatcaaatgccaccccagtggcctgtgggcgagcagcgctcttacgtggtccctcctgcctatagcgccgtaaactaccactgtaacgaagtcgatcccggtgctgaggtggttcctaatgaatgttctgttcacgaagcaactcccccctctgggaacggcccacagaagaagtctgtcgacagatctatacagacagtggtatcttgtttattcaacccggaaaatcggctgcggaatagcgtagtgactcaagacgactactttaaagataaacgcgtgcatcacttcagacgctcacgggccatgttgaaatcagtatag

SEQ ID NO: 117139 - DNA, 888 bp, Artificial Sequence
  derived and/or modified sequence
atgagtacagcaaatccagagactcctaactctactatctcccgagaggcctcaacccagagcagcagcgccgcaacgtctcaaggttacattctgccagaaggtaaaatcatgcctaatacagtgtttgtcgggggaattgacgttagaatggacgagacggaaattaggagcttttttgcacgctacggctctgttaaggaagtgaaaatcattaccgatcgtactggagtctctaagggctatggttttgtctcttttttcaacgatgtggatgtgcagaaaattgtagaatcacagattaattttcatggtaagaaacttaaattaggaccggcaatcagaaaacagaacttatgtgcctatcacgtgcagccccgaccccttgttttcaaccacccaccgccaccacagttccaaaatgtttggaccaaccctaacaccgaaacttacatgcagcccaccaccaccatgaatccaattactcaatacgttcaggcttatcccacgtaccctaatagtccagtccaggtgatcacaggttaccagctgcctgtgtataattatcagatgccgccacagtggcccgtgggagagcagcgttcctacgtcgtgccgcctgcctatagtgctgtcaattaccattgtaatgaggtagatcccggagcggaagtagtacctaatgaatgcagtgtccatgaagcgaccccgcctagcggtaatggtccccagaagaaaagcgtggaccgcagcattcagacagttgttagctgcttgtttaatccggaaaacagacttaggaattcagtggtaacccaagatgattactttaaggataaaagagtccaccactttcgccgttcccgcgcaatgttgaagtccgtgtag

SEQ ID NO: 117140 - DNA, 888 bp, Artificial Sequence
  derived and/or modified sequence
atgagcaccgccaaccccgagacccccaacagcaccatcagcagagaggccagcacccagagcagcagcgccgccaccagccagggctacatcctgcccgagggcaagatcatgcccaacaccgtgttcgtgggcggcatcgacgtgagaatggacgagaccgagatcagaagcttcttcgccagatacggcagcgtgaaggaggtgaagatcatcaccgacagaaccggcgtgagcaagggctacggcttcgtgagcttcttcaacgacgtggacgtgcagaagatcgtggagagccagatcaacttccacggcaagaagctgaagctgggccccgccatcagaaagcagaacctgtgcgcctaccacgtgcagcccagacccctggtgttcaaccaccccccccccccccagttccagaacgtgtggaccaaccccaacaccgagacctacatgcagcccaccaccaccatgaaccccatcacccagtacgtgcaggcctaccccacctaccccaacagccccgtgcaggtgatcaccggctaccagctgcccgtgtacaactaccagatgcccccccagtggcccgtgggcgagcagagaagctacgtggtgccccccgcctacagcgccgtgaactaccactgcaacgaggtggaccccggcgccgaggtggtgcccaacgagtgcagcgtgcacgaggccaccccccccagcggcaacggcccccagaagaagagcgtggacagaagcatccagaccgtggtgagctgcctgttcaaccccgagaacagactgagaaacagcgtggtgacccaggacgactacttcaaggacaagagagtgcaccacttcagaagaagcagagccatgctgaagagcgtgtag

SEQ ID NO: 117141 - DNA, 3050 bp, Artificial Sequence
  derived and/or modified sequence
attggctgaggccgataccacgcgccccgatacccggcgcaggagccacctccctgagccccgcggaccacgcctcagtccgcctgcgctcctcagcctgacggtccgcctttcggggctcctcagccttgtcacccgctcttggttttccttttctcttcatctttggctcctttgaccactcgaagccgcgcagcgggttccagcggacctcacagcagccccagaagtggtgcgccaagcacagcctctgctcctcctggagccggtcgggaactgctgcctgccgccatcatgtctactgcaaatcctgaaactccaaactcaaccatctccagagaggccagcacccagtcctcatcagctgcaaccagccaaggctatattttaccagaaggcaaaatcatgccaaacactgtttttgttggaggaattgatgttaggatggatgaaactgagattagaagcttctttgctagatatggttcagtgaaagaagtgaagataatcactgatcgaactggtgtgtccaaaggctatggatttgtttcattttttaatgacgtggatgtgcagaagatagtagaatcacagataaatttccatggtaaaaagctgaagctgggccctgcaatcaggaaacaaaatttatgtgcttatcatgtgcagccacgtcctttggtttttaatcatcctcctccaccacagtttcagaatgtctggactaatccaaacactgaaacttatatgcagcccacaaccacgatgaatcctataactcagtatgttcaggcatatcctacttacccaaattcaccagttcaggtcatcactggatatcagttgcctgtatataattatcagatgccaccacagtggcctgttggggagcaaaggagctatgttgtacctccggcttattcagctgttaactaccactgtaatgaagttgatccaggagctgaagttgtgccaaatgaatgttcagttcatgaagctactccaccctctggaaatggcccacaaaagaaatctgtggaccgaagcatacaaacggtggtatcttgtctgtttaatccagagaacagactgagaaactctgttgttactcaagatgactacttcaaggataaaagagtgcatcactttagaagaagtcgggcaatgcttaaatctgtttgatcctcctggcttatctagttacatgggaagttgctggttttgaatattaagctaaaaggtttccactattatagaaattctgaattttggtaaatcacactcaaactttgtgtataagttgtattattagactctctagttttatcttaaactgttcttcattagatgtttatttagaaactggttctgtgttgaaatatagttgaaagtaaaaaaataattgagactgaaagaaactaagatttatctgcaaggattttttaaaaattggcattttaagtgtttaaaagcaaatactgattttcaaaaaaatgtttttaaaaacctattttgaaaggtcagaattttgttggtctgaatacaaacatttcacttctccaacaagtacctgtgaacagtacagtatttacagtattgagctttgcatttatgatttctccagaaatttaccacaaaagcaaaatttttaaaactgcatttttaatcagtggaactcaatatatagttagctttattgaagtcttcttatctaaacccagcaaaacagattcaaagcgaacagtccaatcagtgggtcatatgtttattcaaaatattttatcttttagctagaatccacacatatatatcctatttgattagggtagtaattaggataactaaaattctgggcctaattttttaaagaatccaagacaaactaaactttactaggtacataagcttctcaatgagtcaccattcttcttttttgtaaaaacttttttctttgaaatgctaaacttggctgtatgtcaaattgtgcaaaatattggtattaaagaatgctgcaacttttttatgtctcttagaggttaatcagagtatctgaagggaattgtttttataaaaacattgaaatattagttacttgctataaatagatttagtctgttatatttccttttgtaaagtaaaatatgtccagaagagtcaaagtagttagttttggttatttctaaaccacaaaagttgtttaataagtatatcttaagaatgtgctagagttaaaagttagcattgtttctagattagctggtgtcttcattttacattgtgacaaacagctagagcatcagagcccttttgctataccacagtctttcgtttccagcctttgtcactagtctttgaggaggtttgctcctagaactggtgatataaagaatgaaagtagctgtatgagcagagcagttcaagggccaaaccctggaacggtagcaatgggatataatacctttctaagggaaaaagttgtatcagtaccatttgatctgccatggacatgagtttaaagcggctttctggcccttctttcagtgacttcttccctaaaatgtagaaattctaacttaatgtagttactgtgagccatattactagtgccccctagggtctataattccttaaaattttcattctgaatctgaaggagagagtcttttaactttagaattcccaagagggctttattacacctcagaaattgaaagcactatgaatttgtccatttaaaaatgatctgtagtttttttggtgctataacattctgacacatatcattctgtgattaaatctccagcttactataaatgatatctatattctaaagagctacttctaattattccaatatgaccttaaggaaaagtaagggaataaatttttgtctttgttggagtgaagcatttaaaagagtaagggtaaaaaagataaagtcctgaacctttcaaaatggaaaattaattctaaacttagaaatatgcttctgcctattgctgatactgtctttgcatacatgaataaaaataaagtttttttcttcaaaa

SEQ ID NO: 117142 - protein, 325 aa, Artificial Sequence
  derived and/or modified sequence
MARPVSDRTPAPLLLGGPAGTPPGGGALLGLRSLLQGTSKPKEPASCLLKEKERKAALPAATTPGPGLETAGPADAPAGAVVGGGSPRGRPGPVPAPGLLAPLLWERTLPFGDVEYVDLDAFLLEHGLPPSPPPPGGPSPEPSPARTPAPSPGPGSCGSASPRSSPGHAPARAALGTASGHRAGLTSRDTPSPVDPDTVEVLMTFEPDPADLALSSIPGHETFDPRRHRFSEEELKPQPIMKKARKIQVPEEQKDEKYWSRRYKNNEAAKRSRDARRLKENQISVRAAFLEKENALLRQEVVAVRQELSHYRAVLSRYQAQHGAL

SEQ ID NO: 117143 - DNA, 1658 bp, Artificial Sequence
  derived and/or modified sequence
cgcgcacacctctcggtgcagattgcaaagcgccttccgttgcgagagctgcagattttgcaagagccaggctcgcccaccttgtagaaggagcgccttgagtcccctctcaccctcggttgcaaagagccgaccgcttgatctggacaccccctcgcccagattgcatgatctcccgggaccctcttgagttgcacgtttctgcaccgaggacctcaaatccccgtcgctcctaggatttgcagcgttctggatactggagggttgcaggctacactcgcccgcccctgggcagacactcgtccaaaccactggagtgtgctggtgactggcaggccagcccttcgcctctccatgaacccgtgagcctgggggcaggtgccaggcgatggcgcggcctgtgagcgacaggaccccggcccctctgctgctgggcggcccggccgggacaccccctggcgggggagcgctgcttgggttgcggagccttctgcaggggaccagcaagcccaaagagccggccagctgtctcctgaaggaaaaggagcgcaaggcggccctgcctgcagccacaacccctgggccaggcctggagactgcgggcccggcggatgccccggctggggcagtggtgggcggagggtccccgcgggggcgcccggggccggtgcccgccccgggtctgttggcgccactgctgtgggagcgcacgctgccgttcggcgatgtggagtacgtagacctggacgccttcctgctggagcacgggctcccgcccagcccgccgccccccggtggcccgtcgccggagccgtcgcccgcgcggacgcccgcaccctccccagggccgggttcgtgcggctcggcttccccccgctcctctcctgggcacgcccccgcccgggctgccctcgggaccgccagcggccaccgcgcaggcctgacctctcgggacacacccagccctgtggacccagacaccgtggaggtgttgatgacctttgaacccgacccagctgatcttgccctatcaagcattcctggccacgagacctttgaccctcgaagacatcgcttctcagaagaggaacttaagccccagccaatcatgaagaaggcaagaaaaatccaggtgccggaggagcagaaggatgagaaatactggagccggcggtacaagaacaacgaggcagccaagcggtcccgtgacgcccggcggctcaaggagaaccagatatcggtgcgggcggccttcctggagaaggagaacgccctgctgcggcaggaagttgtggccgtgcgccaggagctgtcccactaccgcgccgtgctgtcccgataccaggcccagcacggggccctgtgaggctgccccacatccccacctggcggagctctcctccgccttgctgagacttacgccctgttcccttcctgccctgtggcccacgggccggccagctgggtgccccagggacgtgataatgcagataaatacatttatatttttaagaaaaagcgagcctcccccctcccttgcgggggcggggagggttctctgtgtgtgtccccggcacgtcagggaccctatcctcccaccgcctccgttaacacgatcctgaataaatcttgagaaccccagaaaaaaaaaaaaaaaa

SEQ ID NO: 117144 - DNA, 978 bp, Artificial Sequence
  derived and/or modified sequence
atggccaggcctgtgagcgaccggacccctgccccgcttctgcttgggggcccagcgggaacaccccctggaggcggggccctgttaggtctgcgcagtctcctgcagggtaccagtaagcctaaagagcctgcaagctgcttgcttaaggagaaagagcggaaagccgccctacctgccgccaccacgcccggaccagggcttgagacggcaggtcccgctgacgcgccagccggtgccgtggtcggtggcggttctcctcgcgggaggcccggaccagtgcccgcaccagggctcctggcacccctcttgtgggagcggacactccccttcggggacgttgaatatgtcgacctcgacgctttcttgttggagcatgggctcccgcccagtccccctccacccggaggcccaagtcctgaaccctctcccgcacggacccctgcgccaagcccgggtcccggctcctgcggttctgcgagcccccgctcctccccagggcacgctccggccagagcagccctggggactgcgagcggtcaccgggccggcctgacctcacgtgatacgccgagcccagtagaccctgacaccgtggaggttctcatgacatttgaacctgatccagcggacctcgcgctgtccagcattccaggccacgagacattcgacccccggcggcatcgattctcggaggaggaactgaagccccagccaattatgaagaaagcccgcaaaatccaggtacctgaagagcagaaggatgaaaagtattggtctagaagatacaaaaataacgaagccgccaagaggagcagggatgctcggaggcttaaagagaatcagattagcgtcagggctgccttcttagagaaggagaacgcactgttacgccaagaggtggtggccgtcaggcaagaactcagccactatcgcgccgtgctaagccggtaccaggcacaacatggcgcgctctag

SEQ ID NO: 117145 - DNA, 978 bp, Artificial Sequence
  derived and/or modified sequence
atggcccggcctgtgtctgacaggaccccagcccccctgctgctgggcggccctgctggcaccccacctgggggcggggccctgctgggcctgcggagcctgctgcagggcaccagcaagcccaaggagcccgccagctgcctgctgaaggagaaggagaggaaggccgccctgcctgctgccaccaccccaggccctggcctggagacagctggccctgcagatgccccagctggagctgtggtgggcggcggcagcccccggggccggcccggccctgtgcctgcccctggcctgctggcccccctgctgtgggagaggaccctgccctttggagatgtggagtatgtggacctggatgccttcctgctggagcacggcctgccccccagccccccacctcctgggggccccagccctgagcccagccctgcccggaccccagcccccagccctggccctggcagctgtggcagcgccagccccaggagcagccctggccacgccccagcccgggccgccctgggcacagccagcggccacagagctggcctgaccagccgggacacccccagccctgtggaccctgacacagtggaggtgctgatgacctttgagccagaccctgctgacctggccctgagcagcatccctggccacgagacctttgacccccggcggcaccgcttcagcgaggaggagctgaagccccagcccatcatgaagaaggccaggaagatccaggtgcctgaggagcagaaggatgagaagtactggagccgccgctacaagaacaatgaggccgccaagaggagcagagatgcccggcggctgaaggagaaccagatctctgtgcgggccgccttcctggagaaggaaaatgccctgctgcggcaggaggtggtggccgtgcggcaggagctgagccactacagagctgtgctgagccgctaccaggcccagcacggggccctgtag

SEQ ID NO: 117146 - DNA, 978 bp, Artificial Sequence
  derived and/or modified sequence
atggcccggcccgtgagcgaccggacccccgcccccctgctgctggggggacctgcaggcactccacccgggggaggcgcactccttggactgcgctctctgctgcagggtacctctaagccaaaagagcctgccagctgtctccttaaagagaaggagcgcaaagccgcgcttcctgctgcgaccactccaggcccggggctcgaaactgctggaccggccgacgcacctgcaggagcagttgtaggcggcgggtctcccaggggtagaccaggtccggtgcccgctccaggactcttggctccgctactgtgggaacgaaccctcccattcggtgatgtagaatatgttgacctcgacgctttcctgctggaacatggactgccgccaagccctccccctcctggagggccctcacctgagccgagcccagcaaggacacccgcgcccagccctggacctggctcctgcggctctgcatcacctcggtcctcccccggacacgcccccgcccgggccgctttgggcacagcaagtggccaccgagctggtttaacgtctagggatacacctagccctgtcgacccagatactgttgaggtcctgatgacattcgaaccagatcctgcggacctggcattgtcctctatccccggccatgaaactttcgaccctagaagacatcggttcagcgaggaggagttgaaaccacagcccattatgaaaaaggcccgtaagatacaggtccccgaagagcagaaggatgagaagtattggagtcgccgttacaagaacaacgaggctgccaaaagatcaagagacgctaggcgcctcaaggaaaatcagatcagcgtgcgagccgcatttttggagaaagagaatgccctcctgagacaggaagtcgtagcagtgcgccaggaactgagtcattatcgagctgtgctgtcccgttatcaggctcagcacggcgctctatag

SEQ ID NO: 117147 - DNA, 978 bp, Artificial Sequence
  derived and/or modified sequence
atggcccgacctgtgtcagacaggactcccgctccactgctgctgggaggcccagcagggactccccctggtggtggcgctctgctgggcctcaggtccttactgcagggaaccagcaaacccaaagagccagcctcttgcctgctgaaggaaaaggaaaggaaggccgcactgcctgccgctactactccagggcctggacttgagacagcgggacctgctgacgccccagcaggtgccgtcgtgggaggtggtagtccccgagggaggcctgggccagtgccagcccctggcctgcttgcaccactgctgtgggagcgcacactgcctttcggcgacgtggagtacgtcgatctcgatgcgtttctgctggaacacggactgccccctagccctcctccccctgggggaccttctccagagccttctccggcacggacccctgcaccgtcacccggaccagggtcttgcggatccgcatcacctagaagctcaccaggccacgctccagcgcgtgcagcattggggaccgcttctggacatagggccggactgacaagtcgggacacaccttcaccggtggatcccgacactgtagaagtccttatgacatttgagcccgatccagctgacctggcgctgtccagcatcccaggccatgaaacattcgaccccagaagacaccggttctcggaagaggagttaaaaccccagcctattatgaaaaaagcgaggaaaattcaggtaccggaggaacagaaggacgagaaatattggagcagacgctacaaaaataatgaggccgctaagcgatcccgagatgcccgtcggctcaaggagaatcagatttctgtccgagccgcttttttggagaaagagaacgcattgttgcgccaggaggtagtcgccgtaaggcaggagctttctcattatcgtgcagtgctgtcaagatatcaggctcagcacggggctctatag

SEQ ID NO: 117148 - DNA, 978 bp, Artificial Sequence
  derived and/or modified sequence
atggccagacccgtgagcgacagaacccccgcccccctgctgctgggcggccccgccggcaccccccccggcggcggcgccctgctgggcctgagaagcctgctgcagggcaccagcaagcccaaggagcccgccagctgcctgctgaaggagaaggagagaaaggccgccctgcccgccgccaccacccccggccccggcctggagaccgccggccccgccgacgcccccgccggcgccgtggtgggcggcggcagccccagaggcagacccggccccgtgcccgcccccggcctgctggcccccctgctgtgggagagaaccctgcccttcggcgacgtggagtacgtggacctggacgccttcctgctggagcacggcctgccccccagcccccccccccccggcggccccagccccgagcccagccccgccagaacccccgcccccagccccggccccggcagctgcggcagcgccagccccagaagcagccccggccacgcccccgccagagccgccctgggcaccgccagcggccacagagccggcctgaccagcagagacacccccagccccgtggaccccgacaccgtggaggtgctgatgaccttcgagcccgaccccgccgacctggccctgagcagcatccccggccacgagaccttcgaccccagaagacacagattcagcgaggaggagctgaagccccagcccatcatgaagaaggccagaaagatccaggtgcccgaggagcagaaggacgagaagtactggagcagaagatacaagaacaacgaggccgccaagagaagcagagacgccagaagactgaaggagaaccagatcagcgtgagagccgccttcctggagaaggagaacgccctgctgagacaggaggtggtggccgtgagacaggagctgagccactacagagccgtgctgagcagataccaggcccagcacggcgccctgtag

SEQ ID NO: 117149 - DNA, 1640 bp, Artificial Sequence
  derived and/or modified sequence
cgcgcacacctctcggtgcagattgcaaagcgccttccgttgcgagagctgcagattttgcaagagccaggctcgcccaccttgtagaaggagcgccttgagtcccctctcaccctcggttgcaaagagccgaccgcttgatctggacaccccctcgcccagattgcatgatctcccgggaccctcttgagttgcacgtttctgcaccgaggacctcaaatccccgtcgctcctaggatttgcagcgttctggatactggagggttgcaggctacactcgcccgcccctgggcagacactcgtccaaaccactggagtgtgctggtgactggcaggccagcccttcgcctctccatgaacccgtgagcctgggggcaggtgccaggcgatggcgcggcctgtgagcgacaggaccccggcccctctgctgctgggcggcccggccgggacaccccctggcgggggagcgctgcttgggttgcggagccttctgcaggggaccagcaagcccaaagagccggccagctgtctcctgaaggaaaaggagcgcaaggcggccctgcctgcagccacaacccctgggccaggcctggagactgcgggcccggcggatgccccggctggggcagtggtgggcggagggtccccgcgggggcgcccggggccggtgcccgccccgggtctgttggcgccactgctgtgggagcgcacgctgccgttcggcgatgtggagtacgtagacctggacgccttcctgctggagcacgggctcccgcccagcccgccgccccccggtggcccgtcgccggagccgtcgcccgcgcggacgcccgcaccctccccagggccgggttcgtgcggctcggcttccccccgctcctctcctgggcacgcccccgcccgggctgccctcgggaccgccagcggccaccgcgcaggcctgacctctcgggacacacccagccctgtggacccagacaccgtggaggtgttgatgacctttgaacccgacccagctgatcttgccctatcaagcattcctggccacgagacctttgaccctcgaagacatcgcttctcagaagaggaacttaagccccagccaatcatgaagaaggcaagaaaaatccaggtgccggaggagcagaaggatgagaaatactggagccggcggtacaagaacaacgaggcagccaagcggtcccgtgacgcccggcggctcaaggagaaccagatatcggtgcgggcggccttcctggagaaggagaacgccctgctgcggcaggaagttgtggccgtgcgccaggagctgtcccactaccgcgccgtgctgtcccgataccaggcccagcacggggccctgtgaggctgccccacatccccacctggcggagctctcctccgccttgctgagacttacgccctgttcccttcctgccctgtggcccacgggccggccagctgggtgccccagggacgtgataatgcagataaatacatttatatttttaagaaaaagcgagcctcccccctcccttgcgggggcggggagggttctctgtgtgtgtccccggcacgtcagggaccctatcctcccaccgcctccgttaacacgatcctgaataaatcttgagaacccc

SEQ ID NO: 117150 - protein, 323 aa, Artificial Sequence
  derived and/or modified sequence
MDSKYQCVKLNDGHFMPVLGFGTYAPAEVPKSKALEATKLAIEAGFRHIDSAHLYNNEEQVGLAIRSKIADGSVKREDIFYTSKLWCNSHRPELVRPALERSLKNLQLDYVDLYLIHFPVSVKPGEEVIPKDENGKILFDTVDLCATWEAVEKCKDAGLAKSIGVSNFNRRQLEMILNKPGLKYKPVCNQVECHPYFNQRKLLDFCKSKDIVLVAYSALGSHREEPWVDPNSPVLLEDPVLCALAKKHKRTPALIALRYQLQRGVVVLAKSYNEQRIRQNVQVFEFQLTSEEMKAIDGLNRNVRYLTLDIFAGPPNYPFSDEY

SEQ ID NO: 117151 - protein, 205 aa, Artificial Sequence
  derived and/or modified sequence
MGVVSLFLCIVEQIFTSSKKIQFRGIFMAKVPKSKALEATKLAIEAGFRHIDSAHLYNNEEQVGLAIRSKIADGSVKREDIFYTSKLWCNSHRPELVRPALERSLKNLQLDYVDLYLIHFPVSVKPGEEVIPKDENGKILFDTVDLCATWEAVEKCKDAGLAKSIGVSNFNRRQLEMILNKPGLKYKPVCNQPRDNSIFSLSPDW

SEQ ID NO: 117152 - protein, 248 aa, Artificial Sequence
  derived and/or modified sequence
  misc_feature (1)..(1): Xaa can be any naturally occurring amino acid
XSKYQCVKLNDGHFMPVLGFGTYAPAEVGLAIRSKIADGSVKREDIFYTSKLWCNSHRPELVRPALERSLKNLQLDYVDLYLIHFPVSVKPGEEVIPKDENGKILFDTVDLCATWEAVEKCKDAGLAKSIGVSNFNRRQLEMILNKPGLKYKPVCNQVECHPYFNQRKLLDFCKSKDIVLVAYSALGSHREEPWVDPNSPVLLEDPVLCALAKKHKRTPALIALRYQLQRGVVVLAKSYNEQRIRQNV

SEQ ID NO: 117153 - DNA, 972 bp, Artificial Sequence
  derived and/or modified sequence
atggacagcaagtaccagtgcgtgaagctgaacgacggccacttcatgcccgtgctgggcttcggcacctacgcccccgccgaggtgcccaagagcaaggccctggaggccaccaagctggccatcgaggccggcttcagacacatcgacagcgcccacctgtacaacaacgaggagcaggtgggcctggccatcagaagcaagatcgccgacggcagcgtgaagagagaggacatcttctacaccagcaagctgtggtgcaacagccacagacccgagctggtgagacccgccctggagagaagcctgaagaacctgcagctggactacgtggacctgtacctgatccacttccccgtgagcgtgaagcccggcgaggaggtgatccccaaggacgagaacggcaagatcctgttcgacaccgtggacctgtgcgccacctgggaggccgtggagaagtgcaaggacgccggcctggccaagagcatcggcgtgagcaacttcaacagaagacagctggagatgatcctgaacaagcccggcctgaagtacaagcccgtgtgcaaccaggtggagtgccacccctacttcaaccagagaaagctgctggacttctgcaagagcaaggacatcgtgctggtggcctacagcgccctgggcagccacagagaggagccctgggtggaccccaacagccccgtgctgctggaggaccccgtgctgtgcgccctggccaagaagcacaagagaacccccgccctgatcgccctgagataccagctgcagagaggcgtggtggtgctggccaagagctacaacgagcagagaatcagacagaacgtgcaggtgttcgagttccagctgaccagcgaggagatgaaggccatcgacggcctgaacagaaacgtgagatacctgaccctggacatcttcgccggcccccccaactaccccttcagcgacgagtactag

SEQ ID NO: 117154 - DNA, 6705 bp, Artificial Sequence
  derived and/or modified sequence
ttttcttaggtaagaaacggttgaactggatgcaatttttatcacagcttgtgtaagactgcctctgtccctcctctcacatgccattggttaaccagcagacagtgtgctcaggggcgttgccagctcattgctcttatagcctgtgagggaggaagaaagaaacatttgccagccaggctagtgacagaaatggattcgaaatatcagtgtgtgaagctgaatgatggtcacttcatgcctgtcctgggatttggcacctatgcgcctgcagaggttcctaaaagtaaagctttagaggccaccaaattggcaattgaagctggcttccgccatattgattctgctcatttatacaataatgaggagcaggttggactggccatccgaagcaagattgcagatggcagtgtgaagagagaagacatattctacacttcaaagctttggtgcaattcccatcgaccagagttggtccgaccagccttggaaaggtcactgaaaaatcttcaattggattatgttgacctctaccttattcattttccagtgtctgtaaagccaggtgaggaagtgatcccaaaagatgaaaatggaaaaatactatttgacacagtggatctctgtgccacatgggaggccgtggagaagtgtaaagatgcaggattggccaagtccatcggggtgtccaacttcaaccgcaggcagctggagatgatcctcaacaagccagggctcaagtacaagcctgtctgcaaccaggtggaatgtcatccttacttcaaccagagaaaactgctggatttctgcaagtcaaaagacattgttctggttgcctatagtgctctgggatcccaccgagaagaaccatgggtggacccgaactccccggtgctcttggaggacccagtcctttgtgccttggcaaaaaagcacaagcgaaccccagccctgattgccctgcgctaccagctacagcgtggggttgtggtcctggccaagagctacaatgagcagcgcatcagacagaacgtgcaggtgtttgaattccagttgacttcagaggagatgaaagccatagatggcctaaacagaaatgtgcgatatttgacccttgatatttttgctggcccccctaattatccattttctgatgaatattaacatggagggcattgcatgaggtctgccagaaggccctgcgtgtggatggtgacacagaggatggctctatgctggtgactggacacatcgcctctggttaaatctctcctgcttggtgatttcagcaagctacagcaaagcccattggccagaaaggaaagacaataattttgttttttcattttgaaaaaattaaatgctctctcctaaagattcttcacctactttggtctccataacttctatgttttctttccttctgacacactagtgcccctaaattgtgatttgcctatacgtttagggccggggttggaagatgttaacaaccatttaagattcatttctgcagtgggagtgggtggagtttcaccctctgggaaaggggcaggtgacaggtatttatcagtcagtgcctctctagctcttgtaggaagaagcacacgcaggatggagtctagaggatgagcgatattgactagcaattcatgggctccctccagcagtgcgagggtcagagtttctggagccttgggaggaggcatccctgtgagggggggttagggagatgggagggcaccaggaaaagtgattagaagtcaggtatgggaaggctaaataggacagagtcgagtacatctctgcttggaaaaacatatcaacacccttttttttgaacattatatcttgctcataaaagaaaactttccacattgttttaacaaaccccacagctgagagtcaggcctgaatctttgatgtgtgcccattcacaacgttgaccctattggtttgtggtggggcagggcatcaaagacatcattgactaatcacattcccctgaatagctcatatttagaaaatattcttagattctaaaaatgtactattaatttgtgatattcagtcttttaaatattttatacattaaacaggcatagttacaaatataaaacaaaaatatcccaaagccattatgcatggcactcaagattaaaatgggaaataatacatctaataaatcaaatgttccaagacttcaaaggtcttttggaaacaggctatgtaaaacagcacactggtttcaaactttggtaaattttaagaacaactcttacaaaggcatttaattcttatacataattttcaggggacctaagttaatcagctaatcatgaagacatgattttcattttagaaaacacttttgaaaacttgggataatctcatgccttaatgatcaaagcattatgagaaggacagtggtttttaacctgggcatatgttctaacacatttactctccactattcgtactctggtagccatgttaaccccatcagagattccttctcaagccatgtctcagagctgagaggcatcccagcaagttttgcagctcacagttttttccgtaaattacttattctataaaattggagtaggccataaactttggagggccctagaccaattttttggattatttttcgtcttctatcattccgctgatcttagatattctctgcattaaatattaaatatcacttctaggctgaaaaatccccctaaaaatatttctagctcagatttttcctccaaattctgcaatagaagatcacaatgtgaactctgcatctccatgttaaagtctaatggacattcacacttagcatgtctcaaagaaatctcatgtaaaccatggccatcctgttctaccttaactttctgagtctatggaatgataatttcacatctcataaacttgactgatgtaagtgtcaagaaaagattgacattttgttaaaagttagtagtgaagtgtgtaacgcttaagcaaactttcatatttcaaatctctttagcaagtgtaactcttttttcaagatgtgaaataatcattaggtcagtcatttgtaaatagtacatctgctatggactttttccagttcttcaccatccatttttataaaactcttattgttaaaaaaaaagttactcagaatttcataaagccaaacacctgatttcaggaacacttgagatgtaagaaaattttatagggacctccaatcactaattttcctattttttctctcaaagaaatgctgaagggaggaattcaggttgaatgaaaggaaatagtaacttacagccatatagagttataaagacttcttgtaaatgtgaacatatggtaaaatataaaaacatgtatttttgaaattttggattctactcattattttacttcaatttaagatataaatgtatagaaataagtataattctaagctaatacgtatgcaatgtaggaagctgtaattactgaccaaaactatgtgaagtggagaaaacctggggaagtggatggttttagatgaaactgaagttaaattcatattgatttaaagtaaattgttataactttataaagtttttcatcatcaccacagcaatcacaaagagaataattatgaatatacgcaagaggaaatgagaagggaatccaaatgtcattaaaaaaaaatcacgccacctcacaaaatggtaacagtggatataaaggatagaaagctataaacctggtaggaaaacattgaaaatggcacaagtgactccttccctgtcaccaatgacagtcatgtgttgcataatgcctgggctatcttctgagaatggctttgttaggcaactgtgtcatggtggggacatgatagcattagagagaattctctcaaacactgtcatggccttatcaactatgcttctgtaatattctgaatccttcgctgcctttccaacagtgtttacaacggtttcctaagaaatgaaatccatttcaccaaaccacttttcttgctcatccataagaaacacttctcctttgttaaaattacatcatgagattgcaagcattcagtaacttgcaagctccaatttgaattctagttgtcttgctatttccaccacatctgcaattactttctccactgaaatcttgcattcctccaagtcatccaggagggttgaattcacttctttcaaactcctgttcaagtaaatgttttgccctcctgtcacgaatcatgaatgtttttaatggcatctagaatagtaaatctttttcagaagattttcaattttcttttcccaggttcttcagacaagtcaccatggtagctgtagacttatgaaatgtatttcctgaaccataaaacaagaacatcaaaattactctatgatccatgggaaacagaatgcatgttgtgttagcaggcatggaaagaacagtaatctctttcaacctctgtaagagagttcttggttgattaggtaccttgtcgataggcagttctaatttcaaagaactttttcttttgctgagcagtaagtcttaacagtgggcttaaaatattcagtaaaccattatttaaggagatgtggcttaaatatctaggctttcttgctttatttatagaacacttacagagtagatatagattaaatcttaaggaccctaggattgttagaatagtaaatgaacatcatatgttgtaatatagttagccagggaggggaaagatctctacaagaaataattttaaaaactactcaaagaaatcagagatatcacaaaatgacaaaacaagtacaggggcagcaaaaggtaacagatgtcaactatgagatctcatcaagaactaagaaaatggagaaaagtaccagatggcagatgggaggcagtgtgagcatgcctctcccacttggagattagtgtgtagagatttacattgtgaatttcttttcaagaaccaatgcagagacttaacagatatatgaaaaaatttcacatacactctgaagaagtctcaggcacaatcctactccatgaaataagaaaaaaccatcacatccccagattctgaggggagagagttcactccagagcatacatccccactggggatctggaaattcaggccacaagagaaggctttgatcctgtgcggacaagtgccttgagcagaatccacaggggagagctggaagtgcatggcagatatgagcacagaagctgggtgtccagccttgtgggcagaccgggagggatgtggcctgaaagccatggttattatctcagcgtgtaagctgatgatctgaggctggtcagagttctgtgcgcagactgcctggatgtaaacctggcactgttagcagagcactgcatgaatgaaaggaatgaaaatagccttgccaactgcataggtgctgggtgaggctcactgtggggggcgcacggcaagctattcaacattacgtacaggcatttgaggtcggggcatggaaaaatactgaggcagtgtgtgtatgttatttgtgctgagaatgaaactccttgaccttgaaaacaggacagggagtggtgtgtgtgctgtgataaggaatgctgaaaacggtctcctgagaatgcggtttgagtgcttttacaaggccacaggtgtctcacgacctgacctcataaagccatctagtggatgtttgtggcttaacaagccccttcaataagtacttggcggagggatgctggggggaccttcttagaagagctgcgccccacccccctccctggacagcccagctacaattgtctgagaactcactgcaagctgtaagcggcccactacttcccactcccttttttgaactcttctgtgcagcagaggcaattaaactctcctctggaacattaccccagcagcctgagaaccaccccttggcgctcacaggggctgcagcctgccttatccaaggacagttagagtgcagacccacctaaccctggacccactggtggtacccatccacccatcctggtagcttaacacaaagatacacttttaggagcttcatagcccctcttcccccattgcctgagaaaccactttccctgggcaacttagggcaagctcaaatcccactgctaccaccacagctggtgctcttttgcaagtgccacctcctagctggagaccaaccagcacagtccacacagcacctcaaggaagaataaatagaactgttcccaggaaggagaaaatgcctgcatgagctcagctgttaccactgcgtaccacaccctgaccagtcagaggtcttgagtcggtccgcatgacaagttcaccgctcgcataaccagcattcaagaaagccagcacactaagcctatctacagccagggagtctcagagtctacgtcactcccctgccacctcaatcagagctggtgctggtatccactgctgggagacttgtgctgaggtgaagcctgggctggatggctggaggatgaagaactgcacggaggagatggaggcacccagacagatgccccatggacatcctgaagcagagctgcctcactgccctgcacacacatgagagcgcagccaggaacagaaggactgggcaacattcaggcggagcccaggccaattttctaaacatggaatatgagttaaataaatggcttcgtattaaa

SEQ ID NO: 117155 - DNA, 972 bp, Artificial Sequence
  derived and/or modified sequence
atggattcgaagtatcaatgcgtgaagttgaacgacggacactttatgcctgtccttggcttcgggacatacgcacctgccgaggttccaaaaagcaaagcccttgaggccactaagctcgctatcgaggccggctttcgacacattgattccgcgcacctgtataacaacgaggagcaagtgggtttagctattagaagtaagatcgccgatggaagcgtgaagcgggaagacattttctatacctccaagctctggtgcaatagtcatcggcccgagcttgtacgcccagccttagagcgatccctgaaaaacctgcagttggattacgttgacctatacctgattcattttcccgtgagcgtgaagcccggtgaggaagtcatacccaaggatgagaatggaaaaatcctgttcgacacagtggatctgtgcgctacttgggaggcagtggagaagtgcaaagacgcgggtctggccaagtctattggcgtgtctaacttcaatcgtaggcagctggaaatgattctaaacaagcctgggctgaaatacaagccagtttgtaaccaggttgagtgccacccctacttcaaccagaggaaattgctagacttttgtaagtcaaaagacatcgttttagtcgcctacagcgctctcggctctcatcgcgaagagccttgggtggaccccaatagtcccgttctcttggaagacccagttctatgcgctctggccaagaaacacaaacgaacccccgccctgatcgcccttagatatcagctgcagcggggggttgtggtccttgcaaaaagctacaacgaacaacgaatacgtcagaacgtgcaggtgttcgagttccagctgacttccgaagagatgaaggctatagatggcctcaacagaaacgtgcggtacttaaccctggacatcttcgccggccctcccaattatccttttagcgacgagtattag

SEQ ID NO: 117156 - DNA, 972 bp, Artificial Sequence
  derived and/or modified sequence
atggacagcaagtaccagtgtgtgaagctgaatgatggccacttcatgcctgtgctgggcttcggcacctacgccccagctgaggtgcccaagagcaaggccctggaggccaccaagctggccatcgaggccggcttccgccacattgattctgcccacctgtacaacaatgaggagcaggtgggcctggccatccgcagcaagattgctgatggctctgtgaagcgggaggacatcttctacaccagcaagctgtggtgcaacagccacaggcctgagctggtgcggcctgccctggagaggagcctgaagaacctgcagctggactatgtggacctgtacctgatccacttccctgtgtctgtgaagccaggagaggaggtgatccccaaggatgaaaatggcaagatcctgtttgacacagtggacctgtgtgccacctgggaggccgtggagaagtgcaaggatgctggcctggccaagagcattggagtgagcaacttcaacagacggcagctggagatgatcctgaacaagccaggcctgaagtacaagcctgtgtgcaaccaggtggagtgccacccctacttcaaccagaggaagctgctggacttctgcaagagcaaggacatcgtgctggtggcctacagcgccctgggcagccaccgggaggagccctgggtggaccccaacagccctgtgctgctggaggaccctgtgctgtgtgccctggccaagaagcacaagaggaccccagccctgattgccctgcgctaccagctgcagaggggcgtggtggtgctggccaagagctacaatgagcagaggatccggcagaatgtgcaggtgtttgagttccagctgaccagcgaggagatgaaggccattgatggcctgaacagaaatgtgcgctacctgaccctggacatctttgctggcccccccaactaccccttcagtgatgagtactag

SEQ ID NO: 117157 - DNA, 972 bp, Artificial Sequence
  derived and/or modified sequence
atggacagcaagtaccagtgcgtgaagctgaacgacggccacttcatgcctgtgctgggatttggcacatatgctccagccgaagttcctaagagcaaggccttagaagctacaaaattggctatagaagctggatttaggcatattgattctgctcacttgtacaacaacgaggagcaagtgggtctggccattcgctccaagatcgctgatgggtctgtgaaaagggaggacatcttctataccagtaaactctggtgcaatagtcacagaccagagctggtgaggcctgccctggagagatctctgaagaacctgcagcttgactacgtcgacctctacttgattcatttccccgtttcagttaagcccggtgaagaggttatccctaaggacgaaaacggaaagatccttttcgacacagtggatctgtgtgccacctgggaagcggtcgaaaaatgcaaggatgcaggccttgccaaatctattggcgtttccaacttcaatagacgacagcttgagatgatactcaacaaaccagggcttaagtataaacccgtctgcaaccaagtagaatgccatccttactttaatcaaagaaaactgctggatttctgtaaatccaaagatatcgtgctggtggcgtactcggcgctgggatctcacagagaagaaccttgggtggaccctaactctccagtgctcctcgaagatccggtcttatgtgccctcgccaagaagcacaagcggacccccgcactgattgcattgcgctatcaacttcagagaggggttgttgtgcttgcaaagtcctacaatgagcagaggatcagacagaatgtccaagtattcgaattccagctgacttcggaagagatgaaagcaatcgacgggctgaacagaaatgttcggtacctgacgctagacatcttcgcaggaccccccaattatcccttcagcgatgaatattag

SEQ ID NO: 117158 - DNA, 972 bp, Artificial Sequence
  derived and/or modified sequence
atggattccaagtatcagtgcgtgaagctcaacgatggacatttcatgccagtgcttgggtttggtacatatgccccagccgaggttcccaaatccaaggccctggaggcaaccaagctggccatcgaggctggctttcgacacattgactctgcccatctttacaacaacgaggagcaggtagggctcgcgattcgatccaaaattgccgatggatctgttaagcgagaggacattttctatacatctaaactgtggtgcaactcccaccggccagagttggtgaggcccgctctggaaaggtcgctgaagaatttacagttagactatgtcgatctttacctcattcacttccccgtgtctgtcaagcctggagaagaagtgatccctaaagatgagaacggcaagatcctgttcgacactgtggacctgtgtgccacatgggaagcagtcgaaaagtgtaaagacgcgggattggcaaaatcgattggtgtctccaacttcaaccggcgacagctcgagatgattctgaataagccaggtctaaagtataaaccagtctgtaaccaggttgaatgccacccttattttaatcaaagaaagctgcttgacttctgtaagtctaaagatatcgtgcttgtcgcttacagcgccctaggaagccaccgagaagagccttgggtagatcctaactccccagttttgcttgaggacccagtgctgtgcgctctagcaaaaaaacataaacggactcctgctctgatagctcttcgatatcagctgcagcggggtgtagtggttctggccaaatcttataatgaacagaggattcggcagaatgtgcaagtgtttgagttccagctgacctccgaagagatgaaggctatcgacggcttgaacaggaatgtgcgctatctcacactggatatttttgctggtcccccaaactaccccttttcggacgagtactag

SEQ ID NO: 117159 - DNA, 618 bp, Artificial Sequence
  derived and/or modified sequence
atgggtgttgtgtcgctattcttgtgcatcgttgagcagatctttacgagctccaagaaaatacagttcaggggtatattcatggctaaggtaccaaaatctaaagcgctcgaggccacaaagctggccattgaggcagggttcagacacattgactcagctcacttatataacaacgaggagcaggtaggcctcgcaatccgttccaaaattgcggatggttcagtcaagcgcgaggatattttttatactagtaaattgtggtgtaatagccataggccggaactggtgcgccccgccttggaacggagcctcaagaatctgcagctggattacgttgatctgtatctgattcacttccctgtgtctgtgaagcccggagaggaggtaataccgaaagacgaaaacggaaaaatcctgttcgatacggtggacctgtgtgcaacatgggaggctgtggaaaaatgcaaagatgccggattggcaaaatctattggagtgagtaactttaacagacggcagctggagatgatactcaataagcccggcctgaaatacaaaccagtttgtaatcaacctcgagacaacagcatattctccttgtccccagactggtag

SEQ ID NO: 117160 - DNA, 972 bp, Artificial Sequence
  derived and/or modified sequence
atggattctaaataccagtgtgtgaagctgaacgatggacactttatgcctgtcctcggtttcggtacctacgctcctgcagaagtacctaaatctaaagccctagaagccacgaaactggccatcgaggctggctttagacacattgactccgcgcacctgtacaacaacgaggagcaggttggactagcaattcggtctaaaatagccgacggatctgtcaaacgggaagacatcttttatacttccaagctgtggtgtaacagtcaccgaccggaactggtgcgtcccgccttagaacggtcactgaaaaacctgcaactcgactacgtagacctgtacctgatacacttccctgtcagcgtgaagccaggagaagaggtgatcccgaaagacgaaaacggcaagatactgtttgacacggtcgacctatgcgcaacctgggaagccgtcgagaagtgtaaagatgctggtctagccaagtccatcggcgtttcgaacttcaacaggcgccaattggaaatgatattaaataagcctggtctcaagtataagcctgtgtgcaatcaagtggaatgccacccttactttaaccagcgcaagctgctggacttttgtaaatctaaggacatcgtgctggtcgcctatagtgctctcggctcacatagagaggagccttgggtggaccccaattccccagttctgctcgaggaccctgttctttgcgccctcgcgaaaaagcataaaaggaccccagctctgattgctctgcgatatcagcttcagcgcggggtggtcgtgctagcaaagagctacaatgaacagcggatccgacagaacgtgcaggtctttgaattccagctaacatccgaggagatgaaagcaatagatggactcaatcgcaatgtaagatacttgactctcgacatctttgcagggcccccaaactatccattcagcgacgagtactag

SEQ ID NO: 117161 - DNA, 972 bp, Artificial Sequence
  derived and/or modified sequence
atggattccaaataccagtgtgtgaaattaaacgatggccacttcatgccagtcctcggctttggcacctacgctccagcagaagtgcctaagtcaaaggcgctggaagccaccaagttggcaatcgaggccggtttcagacacatcgactccgcccatctttacaacaatgaggaacaggtcggcctcgcaatcaggtctaagatagccgacggctccgtgaaaagagaagacatattctatacatctaaactgtggtgcaattcacaccgccccgaactcgttaggccagctctggaaaggagtttgaaaaatctgcaattagattatgtggatctttatctcattcactttccagtcagcgtgaaacctggggaggaggtcatccctaaagatgaaaatggaaagattctgtttgatactgttgatctgtgcgcgacttgggaagccgtggaaaagtgcaaagacgcaggcctcgccaaatctataggagtgtctaattttaataggcgccagctggagatgatcctcaacaaacccgggttgaaatataaaccagtgtgtaatcaggtagagtgccatccctacttcaatcagcggaagttactcgacttttgcaagtcaaaagacatcgtcctggtggcctattccgccctgggcagtcacagggaagagccatgggtggatcctaactcaccagtcttgctcgaggaccctgtcttgtgtgccctcgcaaaaaagcataaacgcactcccgctttaatcgctctaaggtatcagctgcagaggggggtggtcgttctagccaagagttacaacgaacagcgtatccggcagaatgtgcaggtatttgagtttcaactgacatcagaagaaatgaaagccatcgacgggctgaacagaaatgtgaggtacctgacccttgacatttttgccggaccacctaactaccccttcagcgacgaatactag

SEQ ID NO: 117162 - DNA, 747 bp, Artificial Sequence
  derived and/or modified sequence
taatctaagtaccagtgcgttaagctaaacgatgggcacttcatgcctgtcctgggcttcggcacctacgcacccgccgaagtcggtctggcaattcgcagcaagattgcagatggctctgtcaagagagaagatatcttttacacttctaaactgtggtgtaactctcaccggcccgagctcgttcggcccgcactagaaaggtccctcaagaacctccaattggactacgttgatctctacctgattcattttcctgttagcgttaaacctggtgaagaagttatccctaaggacgagaatgggaaaattctgttcgacacggtcgacctgtgcgcaacatgggaggcagtagagaagtgcaaggacgctggcttggctaaatccattggggtttctaattttaatcgaagacagctagagatgatcctcaacaaacctggcctgaagtacaagcccgtgtgcaaccaggtggagtgtcacccctattttaaccagaggaagcttctggatttctgcaaatccaaagacatagtgctggtcgcctacagtgccctcgggagtcatagagaggagccctgggttgaccccaattcccctgtcctgctggaggaccccgtgctatgcgctttggctaaaaaacataagaggacacctgccctcattgcattacgatatcagctgcagagaggcgtcgtcgtcctggccaaatcctacaatgaacagcgaatccggcaaaacgtatag

SEQ ID NO: 117163 - DNA, 618 bp, Artificial Sequence
  derived and/or modified sequence
atgggcgtggtgtccctcttcctgtgcatcgtggagcagatcttcaccagcagcaagaagatccagttccggggcatcttcatggccaaggtgcccaagagcaaggccctggaggccaccaagctggccatcgaggccggcttccgccacattgattctgcccacctgtacaacaatgaggagcaggtgggcctggccatccgcagcaagattgctgatggctctgtgaagcgggaggacatcttctacaccagcaagctgtggtgcaacagccacaggcctgagctggtgcggcctgccctggagaggagcctgaagaacctgcagctggactatgtggacctgtacctgatccacttccctgtgtctgtgaagccaggagaggaggtgatccccaaggatgaaaatggcaagatcctgtttgacacagtggacctgtgtgccacctgggaggccgtggagaagtgcaaggatgctggcctggccaagagcattggagtgagcaacttcaacagacggcagctggagatgatcctgaacaagccaggcctgaagtacaagcctgtgtgcaaccagccccgggacaacagcatcttcagcctgagcccagactggtag

SEQ ID NO: 117164 - DNA, 747 bp, Artificial Sequence
  derived and/or modified sequence
tgaagcaagtaccagtgtgtgaagctgaatgatggccacttcatgcctgtgctgggcttcggcacctacgccccagctgaggtgggcctggccatccgcagcaagattgctgatggctctgtgaagcgggaggacatcttctacaccagcaagctgtggtgcaacagccacaggcctgagctggtgcggcctgccctggagaggagcctgaagaacctgcagctggactatgtggacctgtacctgatccacttccctgtgtctgtgaagccaggagaggaggtgatccccaaggatgaaaatggcaagatcctgtttgacacagtggacctgtgtgccacctgggaggccgtggagaagtgcaaggatgctggcctggccaagagcattggagtgagcaacttcaacagacggcagctggagatgatcctgaacaagccaggcctgaagtacaagcctgtgtgcaaccaggtggagtgccacccctacttcaaccagaggaagctgctggacttctgcaagagcaaggacatcgtgctggtggcctacagcgccctgggcagccaccgggaggagccctgggtggaccccaacagccctgtgctgctggaggaccctgtgctgtgtgccctggccaagaagcacaagaggaccccagccctgattgccctgcgctaccagctgcagaggggcgtggtggtgctggccaagagctacaatgagcagaggatccggcagaatgtgtag

SEQ ID NO: 117165 - DNA, 858 bp, Artificial Sequence
  derived and/or modified sequence
tgaagattgattgcaatgggagtggtttctctgtttctttgtatagtcgaacagatatttacttcttccaagaagatacaattcagaggaatttttatggcaaaagttcctaaaagtaaagctttagaggccaccaaattggcaattgaagctggcttccgccatattgattctgctcatttatacaataatgaggagcaggttggactggccatccgaagcaagattgcagatggcagtgtgaagagagaagacatattctacacttcaaagctttggtgcaattcccatcgaccagagttggtccgaccagccttggaaaggtcactgaaaaatcttcaattggattatgttgacctctaccttattcattttccagtgtctgtaaagccaggtgaggaagtgatcccaaaagatgaaaatggaaaaatactatttgacacagtggatctctgtgccacatgggaggccgtggagaagtgtaaagatgcaggattggccaagtccatcggggtgtccaacttcaaccgcaggcagctggagatgatcctcaacaagccagggctcaagtacaagcctgtctgcaaccagcctagagataattccatcttttccttgagtcctgactggtgattccaggcctccttgatcaaattgactgtccccaaatgttacacacatttcagcattaaagttactacacttttcccagtaaattacatttttttgttttattttatgttttaaaacttagagtcaatcagtgaagatctacagtggaaatacatatgtataaaattagtgaatttggtataatgatacggtgctgtgataatttaataaaagcattgagaaatt

SEQ ID NO: 117166 - DNA, 3389 bp, Artificial Sequence
  derived and/or modified sequence
ttttcttaggtaagaaacggttgaactggatgcaatttttatcacagcttgtgtaagactgcctctgtccctcctctcacatgccattggttaaccagcagacagtgtgctcaggggcgttgccagctcattgctcttatagcctgtgagggaggaagaaagaaacatttgccagccaggctagtgacagaaatggattcgaaatatcagtgtgtgaagctgaatgatggtcacttcatgcctgtcctgggatttggcacctatgcgcctgcagaggttcctaaaagtaaagctttagaggccaccaaattggcaattgaagctggcttccgccatattgattctgctcatttatacaataatgaggagcaggttggactggccatccgaagcaagattgcagatggcagtgtgaagagagaagacatattctacacttcaaagctttggtgcaattcccatcgaccagagttggtccgaccagccttggaaaggtcactgaaaaatcttcaattggattatgttgacctctaccttattcattttccagtgtctgtaaagccaggtgaggaagtgatcccaaaagatgaaaatggaaaaatactatttgacacagtggatctctgtgccacatgggaggccgtggagaagtgtaaagatgcaggattggccaagtccatcggggtgtccaacttcaaccgcaggcagctggagatgatcctcaacaagccagggctcaagtacaagcctgtctgcaaccaggtggaatgtcatccttacttcaaccagagaaaactgctggatttctgcaagtcaaaagacattgttctggttgcctatagtgctctgggatcccaccgagaagaaccatgggtggacccgaactccccggtgctcttggaggacccagtcctttgtgccttggcaaaaaagcacaagcgaaccccagccctgattgccctgcgctaccagctacagcgtggggttgtggtcctggccaagagctacaatgagcagcgcatcagacagaacgtgcaggtgtttgaattccagttgacttcagaggagatgaaagccatagatggcctaaacagaaatgtgcgatatttgacccttgatatttttgctggcccccctaattatccattttctgatgaatattaacatggagggcattgcatgaggtctgccagaaggccctgcgtgtggatggtgacacagaggatggctctatgctggtgactggacacatcgcctctggttaaatctctcctgcttggtgatttcagcaagctacagcaaagcccattggccagaaaggaaagacaataattttgttttttcattttgaaaaaattaaatgctctctcctaaagattcttcacctactttggtctccataacttctatgttttctttccttctgacacactagtgcccctaaattgtgatttgcctatacgtttagggccggggttggaagatgttaacaaccatttaagattcatttctgcagtgggagtgggtggagtttcaccctctgggaaaggggcaggtgacaggtatttatcagtcagtgcctctctagctcttgtaggaagaagcacacgcaggatggagtctagaggatgagcgatattgactagcaattcatgggctccctccagcagtgcgagggtcagagtttctggagccttgggaggaggcatccctgtgagggggggttagggagatgggagggcaccaggaaaagtgattagaagtcaggtatgggaaggctaaataggacagagtcgagtacatctctgcttggaaaaacatatcaacacccttttttttgaacattatatcttgctcataaaagaaaactttccacattgttttaacaaaccccacagctgagagtcaggcctgaatctttgatgtgtgcccattcacaacgttgaccctattggtttgtggtggggcagggcatcaaagacatcattgactaatcacattcccctgaatagctcatatttagaaaatattcttagattctaaaaatgtactattaatttgtgatattcagtcttttaaatattttatacattaaacaggcatagttacaaatataaaacaaaaatatcccaaagccattatgcatggcactcaagattaaaatgggaaataatacatctaataaatcaaatgttccaagacttcaaaggtcttttggaaacaggctatgtaaaacagcacactggtttcaaactttggtaaattttaagaacaactcttacaaaggcatttaattcttatacataattttcaggggacctaagttaatcagctaatcatgaagacatgattttcattttagaaaacacttttgaaaacttgggataatctcatgccttaatgatcaaagcattatgagaaggacagtggtttttaacctgggcatatgttctaacacatttactctccactattcgtactctggtagccatgttaaccccatcagagattccttctcaagccatgtctcagagctgagaggcatcccagcaagttttgcagctcacagttttttccgtaaattacttattctataaaattggagtaggccataaactttggagggccctagaccaattttttggattatttttcgtcttctatcattccgctgatcttagatattctctgcattaaatattaaatatcacttctaggctgaaaaatccccctaaaaatatttctagctcagatttttcctccaaattctgcaatagaagatcacaatgtgaactctgcatctccatgttaaagtctaatggacattcacacttagcatgtctcaaagaaatctcatgtaaaccatggccatcctgttctaccttaactttctgagtctatggaatgataatttcacatctcataaacttgactgatgtaagtgtcaagaaaagattgacattttgttaaaagttagtagtgaagtgtgtaacgcttaagcaaactttcatatttcaaatctctttagcaagtgtaactcttttttcaagatgtgaaataatcattaggtcagtcatttgtaaatagtacatctgctatggactttttccagttcttcaccatccatttttataaaactcttattgttaaaaaaaaagttactcagaatttcataaagccaaacacctgatttcaggaacacttgagatgtaagaaaattttatagggacctccaatcactaattttcctattttttctctcaaagaaatgctgaagggaggaattcaggttgaatgaaaggaaatagtaacttacagccatatagagttataaagacttcttgtaaatgtgaacatatggtaaaatataaaaacatgtatttttgaaa

SEQ ID NO: 117167 - DNA, 2021 bp, Artificial Sequence
  derived and/or modified sequence
agaaagccatgtaaccatgaaggcagagattgaagtgattcaactataagccaaggcatgccaactgctactgggagccaccaaaagctagtcaaaggcaagggaaccatcttcccgagagctttcatggggagcatggccctataaacaactggatttttgactcaagtctccagaactggaagagaatacaatcctcttttgttgttctaaaccatccaatttgcacaaaaacgtgttttgaacctactctaaccaactgtcaaaaggctgtgttaagtgattctctgacaagaaccgggatttagctgaactaagaagcaaaaattctgcatcattttggtggcgtgtacagggacatgaggaaggaaccttggccattctgatgtttaaccaagagttgagctgagtggctctgaccagcgtggaagatgagagcagcctgaacttacactgtgaaaatgccctggagaaatgcagagatgcaggtttaatgaagtccatcagggtgtccagtttcaatcactaactgttggaactgatcctcagacaagccaggactcaagtacaagcccatctacaaccagatgagcccttagggccactggggccatttctgactttgtgctcttcacacacttccttacattagaataatgtaagaaacggttgaactggatgcaatttttatcacagcttgtgtaagactgcctctgtccctcctctcacatgccattggttaaccagcagacagtgtgctcaggggcgttgccagctcattgctcttatagcctgtgagggaggaagaaagaaacatttgccagccaggctagtgacagaaatggattcgaaatatcagtgtgtgaagctgaatgatggtcacttcatgcctgtcctgggatttggcacctatgcgcctgcagaggttcctaaaagtaaagctttagaggccaccaaattggcaattgaagctggcttccgccatattgattctgctcatttatacaataatgaggagcaggttggactggccatccgaagcaagattgcagatggcagtgtgaagagagaagacatattctacacttcaaagctttggtgcaattcccatcgaccagagttggtccgaccagccttggaaaggtcactgaaaaatcttcaattggattatgttgacctctaccttattcattttccagtgtctgtaaagccaggtgaggaagtgatcccaaaagatgaaaatggaaaaatactatttgacacagtggatctctgtgccacatgggaggccgtggagaagtgtaaagatgcaggattggccaagtccatcggggtgtccaacttcaaccgcaggcagctggagatgatcctcaacaagccagggctcaagtacaagcctgtctgcaaccaggtggaatgtcatccttacttcaaccagagaaaactgctggatttctgcaagtcaaaagacattgttctggttgcctatagtgctctgggatcccaccgagaagaaccatgggtggacccgaactccccggtgctcttggaggacccagtcctttgtgccttggcaaaaaagcacaagcgaaccccagccctgattgccctgcgctaccagctacagcgtggggttgtggtcctggccaagagctacaatgagcagcgcatcagacagaacgtgcaggtgtttgaattccagttgacttcagaggagatgaaagccatagatggcctaaacagaaatgtgcgatatttgacccttgatatttttgctggcccccctaattatccattttctgatgaatattaacatggagggcattgcatgaggtctgccagaaggccctgcgtgtggatggtgacacagaggatggctctatgctggtgactggacacatcgcctctggttaaatctctcctgcttggtgatttcagcaagctacagcaaagcccattggccagaaaggaaagacaataattttgttttttcattttgaaaaaattaaatgctctctcct

SEQ ID NO: 117168 - DNA, 744 bp, Artificial Sequence
  derived and/or modified sequence
attcgaaatatcagtgtgtgaagctgaatgatggtcacttcatgcctgtcctgggatttggcacctatgcgcctgcagaggttggactggccatccgaagcaagattgcagatggcagtgtgaagagagaagacatattctacacttcaaagctttggtgcaattcccatcgaccagagttggtccgaccagccttggaaaggtcactgaaaaatcttcaattggattatgttgacctctaccttattcattttccagtgtctgtaaagccaggtgaggaagtgatcccaaaagatgaaaatggaaaaatactatttgacacagtggatctctgtgccacatgggaggccgtggagaagtgtaaagatgcaggattggccaagtccatcggggtgtccaacttcaaccgcaggcagctggagatgatcctcaacaagccagggctcaagtacaagcctgtctgcaaccaggtggaatgtcatccttacttcaaccagagaaaactgctggatttctgcaagtcaaaagacattgttctggttgcctatagtgctctgggatcccaccgagaagaaccatgggtggacccgaactccccggtgctcttggaggacccagtcctttgtgccttggcaaaaaagcacaagcgaaccccagccctgattgccctgcgctaccagctacagcgtggggttgtggtcctggccaagagctacaatgagcagcgcatcagacagaacgtgc

SEQ ID NO: 117169 - DNA, 618 bp, Artificial Sequence
  derived and/or modified sequence
atgggcgtggtgagcctgttcctgtgcatcgtggagcagatcttcaccagcagtaagaagattcagtttcggggaatcttcatggcaaaggtccctaaatctaaggctctggaggcgacgaagctggcaatcgaagctggtttccggcacatcgattccgcgcacctgtacaacaacgaggaacaggtcgggctcgcaattaggtccaagatcgcggatgggtccgtcaaaagggaggacatattttacacttccaaactgtggtgtaacagccatcggcccgagcttgttaggccggccctggaacggagtctaaaaaacttgcagttagactacgtcgacttgtacctgattcattttcctgtcagtgttaaacctggcgaggaggtgatacccaaggacgaaaatgggaagattttgtttgacaccgtggacctctgtgcgacctgggaggctgtggaaaagtgcaaggacgccgggctagccaaaagcataggggtctctaactttaaccgccgtcagctagagatgatcctcaacaaaccagggctcaagtacaagcccgtttgcaaccagccgagggataattcgatcttttcattgagcccagattggtag

SEQ ID NO: 117170 - DNA, 972 bp, Artificial Sequence
  derived and/or modified sequence
atggacagcaagtaccagtgcgtgaagctgaacgacggccacttcatgccagtgctaggttttggaacatatgcacctgccgaggtacccaaatccaaggcactagaggccaccaagttggccatcgaagccggcttccgccacattgattctgcccacctgtacaataacgaggaacaagttggactggctatcagaagtaagatcgccgacggctcagtcaagagggaagatatcttctatacatcaaaactgtggtgcaactctcaccggccagagctggtccggcccgccctggagcgtagccttaaaaacctgcagttagattatgttgatctgtacctgatccacttcccggtttccgtgaagcctggtgaggaagtgatccccaaggacgaaaacggcaaaatcctcttcgataccgtggatctttgtgcgacctgggaggctgttgaaaagtgcaaggatgccggactggcaaaaagcattggggtaagcaattttaacagaaggcaattagaaatgatccttaacaaacccggacttaagtacaaacccgtatgtaaccaggtcgaatgccacccctactttaatcagcggaaacttttagatttctgcaaaagtaaggacatagttctagtagcttattccgccctcggaagtcaccgggaagagccttgggtagaccccaatagccccgtgctcctggaggaccctgtgctgtgcgctctggccaagaagcataagcgtactcccgctctcatcgccttacggtaccagctgcagagaggagtggtcgtacttgctaaaagctacaacgagcagcgcattagacagaatgtccaagtctttgaatttcagctgacatcggaagagatgaaggccattgatggcctcaaccgcaacgtgaggtacctgaccctggacatctttgccgggccccctaattatccgttctccgacgaatactag

SEQ ID NO: 117171 - DNA, 972 bp, Artificial Sequence
  derived and/or modified sequence
atggacagcaagtaccagtgcgtgaagctgaacgacggccacttcatgccggtgctcggcttcggcacctacgcaccagccgaggttcctaagtctaaggccctggaggcaactaagctcgcaattgaggccggtttccggcacatcgattctgcccacctatataataacgaggagcaggtggggctggccatcagatcaaaaatcgccgacggttcagtgaagagagaggatatcttttacacttccaaactttggtgcaactcccatcggccagagctggttcggccagccctggagaggtccctcaaaaacctgcagcttgactacgttgatctttaccttatccacttcccagtgtctgtgaaacctggggaggaggtcattcctaaggatgaaaacgggaaaattttatttgacacggtcgatctgtgcgctacttgggaggctgtcgagaaatgtaaagacgcgggtctggcaaagagtatcggcgtatcgaacttcaatcggcgacagctggagatgattcttaacaagcccggcctgaagtacaaacccgtgtgtaatcaggtcgaatgccatccttacttcaatcagcggaaactgctggacttttgtaaatccaaagacatcgtgctggtagcttattctgcactgggcagccacagggaggagccctgggtggatcccaattctcctgttctgctggaggatccagttctttgtgcgttagctaagaagcacaagcgtacccctgccttgatagctctgcgttatcagctgcagcggggcgtggtggtgctggcaaaatcctacaacgagcagagaattagacagaatgtgcaggtctttgaatttcagcttacatccgaagagatgaaggctatagatggactcaatcggaatgtccgctatttgactctcgatattttcgctggccctcctaattacccattctccgacgagtattag

SEQ ID NO: 117172 - DNA, 747 bp, Artificial Sequence
  derived and/or modified sequence
tgaagcaagtaccagtgcgtgaagctgaacgacggccacttcatgccagtgctgggcttcgggacttacgcccctgccgaggtgggtctggccattagaagcaagatcgcagacggaagcgtaaaaagggaagacatcttttatacaagtaaactatggtgcaattctcatcggcctgagctagtgaggccagctctggagaggtctttaaagaacctccagttggactatgtggacttatacctcattcattttcctgtcagcgttaagcctggtgaggaggtgattccaaaggacgaaaacgggaagattctctttgacaccgttgacctatgtgctacatgggaagctgtcgaaaagtgcaaagacgccggtctcgccaaatccatcggtgtctctaatttcaatcgccggcaactcgaaatgatattaaacaaacctgggctcaagtataagccagtgtgcaatcaagtcgagtgtcatccttatttcaaccagagaaagcttttggatttttgtaaatctaaggatatcgtcctggttgcctattcagccttggggagccaccgggaagagccgtgggtggacccaaatagtcccgtgttgctggaggaccccgtcctgtgtgctctcgccaagaagcacaaacgtacccctgccctgatcgcgctacgctaccagctgcagaggggagtcgttgttctggctaaatcttataatgaacagcgcatccggcaaaatgtgtag

SEQ ID NO: 117173 - DNA, 618 bp, Artificial Sequence
  derived and/or modified sequence
atgggagtcgtttcgcttttcctttgtattgtcgaacagatatttacttcgagcaaaaaaattcagttcagaggcatatttatggcaaaagtgcctaagtccaaggcattggaggcaaccaagctggcaatcgaggctgggtttcggcatattgactctgcacatctgtataacaacgaagagcaggtgggtctggctatcaggtcgaaaatcgctgatggatcagtgaaacgcgaagatatcttctatacctccaagctctggtgcaactcacaccgccctgagctggtgagaccagccctcgagcgcagcctgaagaaccttcaactggactatgtggatctctatctgattcacttccctgtctctgtgaaacccggagaagaggtgatcccaaaagatgagaatgggaagattcttttcgataccgtcgatctctgcgccacctgggaggcagtggagaagtgcaaggacgccggactggccaaaagtattggagtgtcaaattttaataggcgccaacttgagatgatcctcaataagcctggcctgaagtacaagcccgtctgcaatcagcctcgtgacaattctatttttagcctgtccccagactggtag

SEQ ID NO: 117174 - DNA, 972 bp, Artificial Sequence
  derived and/or modified sequence
atggattcaaaatatcaatgcgtgaaactcaacgatggacatttcatgccagtactgggctttgggacttatgcgcctgctgaggtcccaaagtccaaggccctggaggctaccaagctggctatcgaagccggatttaggcacattgattccgcacacttatacaacaatgaagagcaggtgggtttagcgatcagatcaaaaatagcagacggatccgtgaagcgagaggatatcttttacactagtaagctatggtgtaattcgcatcgaccagagctcgtgaggccggcactggaacgatcattgaagaacctccagctggactatgtggacctgtatcttatacactttccagtgtcagtgaaaccaggggaggaggtcatccccaaagacgagaacggcaaaatcctgttcgacaccgtggatctttgcgccacatgggaagccgtggagaagtgtaaggacgccggattggccaagtctatcggcgtttctaatttcaatcgcagacagctagagatgatccttaataagcctgggcttaagtacaagccagtatgtaatcaggtggaatgtcacccctacttcaatcagcgtaaattattggatttctgtaagtcaaaagatattgtgttggtagcttattctgccctcggttctcacagagaagaaccttgggttgaccctaattcacccgttctgctggaggaccctgtgctgtgcgctctcgctaagaaacacaaaagaactccggctttgatagccttacgttaccaactgcaacgaggcgtcgtcgtgctggctaaatcctacaacgagcagcgcattagacagaacgtacaggtcttcgaatttcagctgacctctgaagagatgaaagcgattgatggcttgaaccggaatgtgcgctatctaacccttgatattttcgctggcccacccaactatccattcagtgacgaatattag

SEQ ID NO: 117175 - DNA, 972 bp, Artificial Sequence
  derived and/or modified sequence
atggacagcaagtatcagtgcgtcaaactgaatgatgggcacttcatgcccgtcttgggatttggcacctacgccccagcagaggtcccaaagagcaaggccctggaagccacaaagctggctatagaggctgggttcaggcacatcgactccgcccacctttacaacaacgaagaacaggtgggtttggccattcgcagtaagattgctgatggcagcgtgaagagggaagatatcttttacacatccaaactgtggtgcaattcccaccggcctgaactggtccgccctgctctcgagaggtccttgaagaatcttcagctggactacgtggacctgtatctgattcacttcccagtttccgttaagccaggtgaagaggtgatccccaaggatgagaacgggaaaatcctctttgacacagtggatctgtgcgcaacctgggaagccgtggagaaatgcaaagacgctggccttgctaagtcaataggagtcagtaatttcaaccggcgacagctagagatgattttgaacaagcccggattgaagtacaagcccgtatgcaaccaagttgagtgccacccatatttcaatcagcgcaagttacttgacttttgcaaaagcaaggatattgtgttagtggcatattcagccctagggtcccaccgggaagaaccttgggtcgacccaaatagtcccgtgctcctggaagacccagttctgtgcgccttagcaaagaaacacaaacgcacccccgctctcattgccctaagataccagttacagcggggagttgtcgtgcttgcgaaaagttacaacgagcaacggatcaggcagaatgtccaggtcttcgaattccagttgaccagcgaagagatgaaagcgatcgatgggctgaatcgaaatgtgcggtaccttacactcgacatctttgccggaccacctaattatccattctccgatgagtactag

SEQ ID NO: 117176 - DNA, 747 bp, Artificial Sequence
  derived and/or modified sequence
tagtccaaataccagtgtgtgaaactcaatgatggccacttcatgcctgtgttgggttttggaacgtacgccccagccgaggtaggcctagccatccggagcaaaattgctgatggcagtgtgaagagggaggatattttttatacctcgaaattgtggtgtaatagccatcggccagaattggttcgcccagctcttgagcgctcgctgaaaaatctacagctagactacgtggatctgtaccttattcacttcccagtctcagtgaagcccggtgaagaagtcattcccaaagacgagaatgggaagattctctttgacaccgttgatctctgcgcaacatgggaggcagtcgaaaaatgcaaagacgccggtctggctaagtctatcggagtgagcaattttaatcggagacaacttgagatgatactgaacaagcctggcctcaagtacaaacctgtgtgtaaccaggttgagtgccatccgtatttcaaccagagaaagttgctagacttctgtaaaagtaaggacattgtcctcgttgcttactcagcccttggatcccacagggaagaaccatgggtagatccgaactccccagtacttctggaggatcccgtcctttgcgcgcttgctaagaaacataaacgcacacctgctttaatcgctctacgctaccagctgcaaaggggagtcgtggtgctcgcaaaaagctacaacgagcagagaatccggcagaatgtgtag

SEQ ID NO: 117177 - DNA, 618 bp, Artificial Sequence
  derived and/or modified sequence
atgggcgtggtgagcctgttcctgtgcatcgtggagcagatcttcaccagcagcaagaagatccagttcagaggcatcttcatggccaaggtgcccaagagcaaggccctggaggccaccaagctggccatcgaggccggcttcagacacatcgacagcgcccacctgtacaacaacgaggagcaggtgggcctggccatcagaagcaagatcgccgacggcagcgtgaagagagaggacatcttctacaccagcaagctgtggtgcaacagccacagacccgagctggtgagacccgccctggagagaagcctgaagaacctgcagctggactacgtggacctgtacctgatccacttccccgtgagcgtgaagcccggcgaggaggtgatccccaaggacgagaacggcaagatcctgttcgacaccgtggacctgtgcgccacctgggaggccgtggagaagtgcaaggacgccggcctggccaagagcatcggcgtgagcaacttcaacagaagacagctggagatgatcctgaacaagcccggcctgaagtacaagcccgtgtgcaaccagcccagagacaacagcatcttcagcctgagccccgactggtag

SEQ ID NO: 117178 - DNA, 747 bp, Artificial Sequence
  derived and/or modified sequence
tgaagcaagtaccagtgcgtgaagctgaacgacggccacttcatgcccgtgctgggcttcggcacctacgcccccgccgaggtgggcctggccatcagaagcaagatcgccgacggcagcgtgaagagagaggacatcttctacaccagcaagctgtggtgcaacagccacagacccgagctggtgagacccgccctggagagaagcctgaagaacctgcagctggactacgtggacctgtacctgatccacttccccgtgagcgtgaagcccggcgaggaggtgatccccaaggacgagaacggcaagatcctgttcgacaccgtggacctgtgcgccacctgggaggccgtggagaagtgcaaggacgccggcctggccaagagcatcggcgtgagcaacttcaacagaagacagctggagatgatcctgaacaagcccggcctgaagtacaagcccgtgtgcaaccaggtggagtgccacccctacttcaaccagagaaagctgctggacttctgcaagagcaaggacatcgtgctggtggcctacagcgccctgggcagccacagagaggagccctgggtggaccccaacagccccgtgctgctggaggaccccgtgctgtgcgccctggccaagaagcacaagagaacccccgccctgatcgccctgagataccagctgcagagaggcgtggtggtgctggccaagagctacaacgagcagagaatcagacagaacgtgtag

SEQ ID NO: 117179 - protein, 323 aa, Artificial Sequence
  derived and/or modified sequence
MDSKYQCVKLNDGHFMPVLGFGTYAPAEVPKSKALEAVKLAIEAGFHHIDSAHVYNNEEQVGLAIRSKIADGSVKREDIFYTSKLWSNSHRPELVRPALERSLKNLQLDYVDLYLIHFPVSVKPGEEVIPKDENGKILFDTVDLCATWEAMEKCKDAGLAKSIGVSNFNHRLLEMILNKPGLKYKPVCNQVECHPYFNQRKLLDFCKSKDIVLVAYSALGSHREEPWVDPNSPVLLEDPVLCALAKKHKRTPALIALRYQLQRGVVVLAKSYNEQRIRQNVQVFEFQLTSEEMKAIDGLNRNVRYLTLDIFAGPPNYPFSDEY

SEQ ID NO: 117180 - DNA, 972 bp, Artificial Sequence
  derived and/or modified sequence
atggacagcaagtaccagtgcgtgaagctgaacgacggccacttcatgcccgtgctgggcttcggcacctacgcccccgccgaggtgcccaagagcaaggccctggaggccgtgaagctggccatcgaggccggcttccaccacatcgacagcgcccacgtgtacaacaacgaggagcaggtgggcctggccatcagaagcaagatcgccgacggcagcgtgaagagagaggacatcttctacaccagcaagctgtggagcaacagccacagacccgagctggtgagacccgccctggagagaagcctgaagaacctgcagctggactacgtggacctgtacctgatccacttccccgtgagcgtgaagcccggcgaggaggtgatccccaaggacgagaacggcaagatcctgttcgacaccgtggacctgtgcgccacctgggaggccatggagaagtgcaaggacgccggcctggccaagagcatcggcgtgagcaacttcaaccacagactgctggagatgatcctgaacaagcccggcctgaagtacaagcccgtgtgcaaccaggtggagtgccacccctacttcaaccagagaaagctgctggacttctgcaagagcaaggacatcgtgctggtggcctacagcgccctgggcagccacagagaggagccctgggtggaccccaacagccccgtgctgctggaggaccccgtgctgtgcgccctggccaagaagcacaagagaacccccgccctgatcgccctgagataccagctgcagagaggcgtggtggtgctggccaagagctacaacgagcagagaatcagacagaacgtgcaggtgttcgagttccagctgaccagcgaggagatgaaggccatcgacggcctgaacagaaacgtgagatacctgaccctggacatcttcgccggcccccccaactaccccttcagcgacgagtactag

SEQ ID NO: 117181 - DNA, 3381 bp, Artificial Sequence
  derived and/or modified sequence
ttttcttaggtaagaaacggttgaactggatgcaatttttatcacagcttgtgtaagactgcctctgtccctcctctcacatgccattggttaaccagcagacagtgtgctcaggggcgttgccagctcattgctcttatagcctgtgagggaggaagaaacatttgctaaccaggccagtgacagaaatggattcgaaataccagtgtgtgaagctgaatgatggtcacttcatgcctgtcctgggatttggcacctatgcgcctgcagaggttcctaaaagtaaagctctagaggccgtcaaattggcaatagaagccgggttccaccatattgattctgcacatgtttacaataatgaggagcaggttggactggccatccgaagcaagattgcagatggcagtgtgaagagagaagacatattctacacttcaaagctttggagcaattcccatcgaccagagttggtccgaccagccttggaaaggtcactgaaaaatcttcaattggactatgttgacctctatcttattcattttccagtgtctgtaaagccaggtgaggaagtgatcccaaaagatgaaaatggaaaaatactatttgacacagtggatctctgtgccacatgggaggccatggagaagtgtaaagatgcaggattggccaagtccatcggggtgtccaacttcaaccacaggctgctggagatgatcctcaacaagccagggctcaagtacaagcctgtctgcaaccaggtggaatgtcatccttacttcaaccagagaaaactgctggatttctgcaagtcaaaagacattgttctggttgcctatagtgctctgggatcccatcgagaagaaccatgggtggacccgaactccccggtgctcttggaggacccagtcctttgtgccttggcaaaaaagcacaagcgaaccccagccctgattgccctgcgctaccagctgcagcgtggggttgtggtcctggccaagagctacaatgagcagcgcatcagacagaacgtgcaggtgtttgaattccagttgacttcagaggagatgaaagccatagatggcctaaacagaaatgtgcgatatttgacccttgatatttttgctggcccccctaattatccattttctgatgaatattaacatggagggcattgcatgaggtctgccagaaggccctgcgtgtggatggtgacacagaggatggctctatgctggtgactggacacatcgcctctggttaaatctctcctgcttggcgacttcagtaagctacagctaagcccatcggccggaaaagaaagacaataattttgtttttcattttgaaaaaattaaatgctctctcctaaagattcttcacctactttggtctccataacttctatgttttctctccttctgacacactagtgcccccaaattgtgatttgcctatacgtttagggccggggttggaagatgttaacaaccatttaagattcatttctgcagtgggagtgggtggagtttcaccctctgggaaaggggcaggtgacaggtatttatcagtcagtgcctctctagctcttgtaggaagaagcacacgcaggatggagtctagaggatgagcgatattgactagcaattcatgggctccctccagcagtgcgagggtcagagtttctggagccttgggaggaggcatccctgtgagggggggttagggagatgggagggcaccaggaaaagtgattagaagtcaggtatgggaaggctaaataggacagagtcgagtacatctctgcttggaaaaacatatcaacacccttttttttgatcattatatcttgttcataaaagaaaactttccacattgttttaacaaaccccacagctgagagtcaggcctgaatctttgatgtgtgcccattcacaacgttgaccctattggtttgtggtggggcaggacatcgaagatatcattgactcatcacattcccctgaatagctcatatttagaaaatattcttagattgtaaaaatgtactgttcatttgttatatgcaatcttttaaatgttttatactttaaacaaggcatagttacaagtataaaacataaatatcccaaagccattatgcatggcactcaagattaaaatgggaaataatacatctaataaatcaaatgttccaagacttcaaatgtcttttggaaacaggctatgtaaaacagcacactggtttcaaactttggtaaattttaagaagaactcttacaaaggcatttaattcttatacataattttcaggggaactaatcaaatcagctaatcatgaagacatgattttcgttttagaaaacacttttgaaaacttgggataatctcatgtcttaatgatcaaagcattatgagaaggacagtggttttttacctgggcacactttctaacacatttactctccactattcgtactctggtagccatgttaaccccatcagagattccttctcaagccatgtctcagagctgataggcatcccagcaagttttgcagctcacaatttttctgtaaattacttattctataaaattggaagaggccataaactttggagggccctagaccaattttttggattatttctggtctactctcattccgttgatgatcttagatattctctgcattaaatatcacctctaggctgagaaatccaccaaaaaatatttctagctcagcgttttcctccaaatcttcaatggaagatcataatgtgaactctgcatctccatgttaaagtttaatggacattcacacttagcatgtctcaaagaaatctcatgtaaaccatggccatcctgttctaccttaactttctgagtctatggaatgataatttcacatctcataaacttgactgatgtaagtgtcaagaaaagattgacattttgttaaaacttcgtagccaagtgtgtaacgcttaagcagactttcatatttcaaatctctatagcacgtgtaactcttttttcaagatgtgaaataatcattaggtcagtcatttgtaaatagtacggctgctgtgggctttttccagttcttcaccatccatttttataaaactcttattgttaaaaaaaaaaagttactcagaatttcataaagccaaacacctgatttcaggaacacttgagatgtaagaaaattttatagggacctccaatcactaattttcctattttttctctcaaagaaatgctgaagggaggaattcaggttgaatgaaaggaaatagtaacttacagccatatagagttataaagacttcttgtaaatgtgaacatatggtaaaatataaaaacatgtatttttgaaa

SEQ ID NO: 117182 - DNA, 972 bp, Artificial Sequence
  derived and/or modified sequence
atggatagtaagtaccagtgcgtcaagctcaatgatgggcattttatgcccgtgctcggtttcgggacttacgccccagctgaggttcctaagtcgaaagcccttgaagctgtgaaattagcaattgaggctggcttccatcacattgatagtgctcacgtctacaacaatgaggagcaggtgggtttggcaatcagatcaaagatcgccgatggctctgtaaagagggaagatattttctatacttccaaattatggtcaaattcccatcgaccggagctcgtgcgccctgctttggagagaagcctgaaaaaccttcagttggattatgtggatttgtacctgattcattttcccgtgagtgttaaacctggagaagaagtgatccccaaggatgagaatgggaagatactgttcgacaccgtggacttgtgtgctacctgggaggcaatggagaagtgtaaggacgccgggctcgcaaaatccattggagtctccaactttaaccacaggctcctggagatgatcctcaataaacccggactcaaatataagcccgtgtgtaaccaggtagagtgtcacccctatttcaaccaacggaaattattagacttttgcaaatcgaaagacatcgtgctggtagcctatagcgccctgggctctcatagagaggagccctgggttgatcctaacagtcccgttctcttagaggaccctgtgctttgcgcgctcgctaagaaacataagagaactcctgcactgattgctctcaggtaccaactacaacggggggtcgtggtgctcgctaagagctacaacgaacagcggatccgccaaaatgttcaggtattcgaattccagttgacaagtgaagagatgaaagctatcgacggccttaaccgcaatgtgcgatacctaaccctggatatctttgctggacctccgaattacccttttagtgacgagtattag

SEQ ID NO: 117183 - DNA, 972 bp, Artificial Sequence
  derived and/or modified sequence
atggacagcaagtaccagtgtgtgaagctgaatgatggccacttcatgcctgtgctgggcttcggcacctacgccccagctgaggtgcccaagagcaaggccctggaggccgtgaagctggccatcgaggccggcttccaccacattgattctgcccacgtgtacaacaatgaggagcaggtgggcctggccatccgcagcaagattgctgatggctctgtgaagcgggaggacatcttctacaccagcaagctgtggagcaacagccacaggcctgagctggtgcggcctgccctggagaggagcctgaagaacctgcagctggactatgtggacctgtacctgatccacttccctgtgtctgtgaagccaggagaggaggtgatccccaaggatgaaaatggcaagatcctgtttgacacagtggacctgtgtgccacctgggaggccatggagaagtgcaaggatgctggcctggccaagagcattggagtgagcaacttcaaccaccggctgctggagatgatcctgaacaagccaggcctgaagtacaagcctgtgtgcaaccaggtggagtgccacccctacttcaaccagaggaagctgctggacttctgcaagagcaaggacatcgtgctggtggcctacagcgccctgggcagccaccgggaggagccctgggtggaccccaacagccctgtgctgctggaggaccctgtgctgtgtgccctggccaagaagcacaagaggaccccagccctgattgccctgcgctaccagctgcagaggggcgtggtggtgctggccaagagctacaatgagcagaggatccggcagaatgtgcaggtgtttgagttccagctgaccagcgaggagatgaaggccattgatggcctgaacagaaatgtgcgctacctgaccctggacatctttgctggcccccccaactaccccttcagtgatgagtactag

SEQ ID NO: 117184 - DNA, 972 bp, Artificial Sequence
  derived and/or modified sequence
atggacagcaagtaccagtgcgtgaagctgaacgacggccacttcatgccagtgctggggtttggcacatacgctccagccgaggtccccaagtccaaggcccttgaggccgtcaagctggctattgaggcaggctttcaccatatcgactctgcccacgtgtataacaatgaggagcaggtcgggctggccatcagaagtaagatcgcggacgggagtgtcaagagagaagacatcttttacaccagcaaactgtggagtaatagccatcggccagagcttgtgaggccagccttggagcgctcactgaaaaatctacagctggactacgtcgatctgtatcttattcacttccctgttagcgttaaacctggggaagaggtcatcccaaaggatgagaacggcaagattctcttcgatacagtggacctttgtgccacttgggaggccatggaaaaatgcaaggacgccggcctcgccaaatccattggcgtgtccaactttaatcacagactgctggaaatgatattgaacaaacctgggttgaaatataagcctgtgtgtaatcaggtggagtgccatccatacttcaaccagcggaagctgttggatttctgcaagtccaaggatattgtgctcgtggcctacagcgccttagggtctcaccgggaggagccatgggtcgaccctaacagccctgtgttgctggaggaccctgttttgtgtgcgctcgccaagaagcataagagaactccggctctgattgcgctccggtatcagctacagcgaggtgtcgtggtgctggcgaagagctacaatgaacagaggattcgccagaatgtacaggtttttgaatttcagctgacctccgaagaaatgaaggctattgacggtttgaacaggaatgtcaggtacctcactctggacatattcgctggtccgcccaattatccattttctgacgagtactag

SEQ ID NO: 117185 - DNA, 972 bp, Artificial Sequence
  derived and/or modified sequence
atggatagcaagtaccagtgcgttaaactcaacgacgggcacttcatgccagtactcggcttcggcacatatgccccagccgaagtgcccaagtccaaggccctcgaggccgtcaaattggccatagaagcagggttccaccacatcgacagcgcccacgtttataataacgaggaacaggtgggcctggctatacgcagcaaaatcgccgacgggagtgttaagcgcgaagacatcttttatactagcaaactatggtccaacagtcaccgtcccgagctggtgcgcccagccctggagagatccctgaagaacctgcagctcgattatgtagatctctacctaatccatttcccagtcagtgtgaaaccgggagaagaggtgataccaaaagatgaaaacgggaagattctgtttgataccgtggatttgtgcgccacatgggaagccatggagaaatgtaaagatgctggcctggccaagagcatcggggtgagtaactttaaccacagactgttagagatgattttaaacaagccaggcttgaaatataaacccgtttgtaaccaggtggagtgccacccatatttcaaccagcggaaattgctggacttttgtaagagcaaggacatcgtgctcgtcgcttactcggccctcgggtctcaccgggaggagccctgggtggaccctaactctccagttttactggaagatccagtgctgtgcgccctggccaagaagcacaaacgcacaccggctttgatcgcattgagatatcaactccagagaggggtagtcgtgttggccaagtcctacaacgaacagaggatccgtcagaatgtccaggtctttgagtttcaactgacaagcgaggaaatgaaagctattgacggcctgaacagaaacgtgcgttatctcacattggatattttcgcgggacctcccaattatccgttttctgatgagtattag

SEQ ID NO: 117186 - DNA, 972 bp, Artificial Sequence
  derived and/or modified sequence
atggatagcaaataccaatgtgttaaactgaacgacgggcacttcatgccagttcttggctttggtacatacgcgcccgctgaggtaccaaagtccaaagctctggaggcggtaaagcttgctatagaggccggattccatcacatcgattctgcacatgtgtacaacaacgaagagcaggtgggcctagccatccgtagcaagattgctgacggaagcgtgaaacgggaagacatattctacactagcaagttgtggtccaatagtcacaggccagaactggtccgcccagccctcgaacgctctctgaaaaacttgcagctggactatgtggacttgtaccttatccactttcctgttagcgtgaagcctggggaggaggtaataccaaaagatgagaatggtaagatcctgtttgataccgtcgatctgtgtgccacatgggaagcaatggagaagtgcaaggatgcaggactggctaagagcataggagtttctaacttcaaccacagactcctcgagatgattttgaacaaacccggcttaaaatataagccggtgtgcaatcaggtggagtgccacccttatttcaatcagcgaaagttactggatttctgcaaaagcaaagacatcgtccttgtcgcatattccgccctcgggtctcaccgtgaggagccctgggttgacccaaacagccccgtactgctggaggatcctgtcctgtgcgctttggccaagaagcataagagaacacccgcactgatcgcccttcgctaccagttacagaggggggtggttgtcctggccaagagctacaatgaacagcggatcagacagaacgtgcaggtctttgagttccagctgacaagtgaggaaatgaaggctattgatggcctcaatagaaatgtgcgttatctcactcttgacatcttcgctgggccaccaaactaccctttctcagatgagtactag

SEQ ID NO: 117187 - DNA, 972 bp, Artificial Sequence
  derived and/or modified sequence
atggattcgaagtaccagtgtgttaaactgaatgacggtcatttcatgccagtgctgggcttcgggacctacgcccccgcggaggtgcccaaatccaaggcacttgaagccgtgaaactcgccatcgaagccggattccatcacattgattccgctcatgtttataataatgaggagcaagttggtctggcaattcgctcaaagatcgcggatggttcagtcaaacgggaagacatcttctatacaagtaaactttggagcaatagccatagaccagagctggtgcggcccgcactggaacgatctcttaagaatttgcagctagattacgtggacctgtacttgatccacttccctgtgtcggtgaaacctggggaggaggttatccccaaggacgaaaatggaaagattctgtttgacaccgtggacttgtgtgctacatgggaggcaatggaaaagtgcaaagacgccggcttagccaaatctatcggggtctctaatttcaaccatcggctgctggaaatgatcctcaataagcccggattgaaatataaacctgtgtgtaatcaggtggaatgccacccttatttcaaccaaagaaagctgctcgatttttgtaaatccaaggatatagtcctggttgcatacagtgcactgggctcccatcgcgaggaaccctgggtggatcccaattctccagttttgctcgaggacccggtactatgcgccctcgctaagaagcacaaaaggacccctgccctcatcgccctcaggtaccagctgcaacgcggagtggtggttctggcgaaatcctacaatgaacagaggattaggcagaatgttcaggtgtttgagttccagctgacttctgaggagatgaaagctatcgacggccttaacagaaacgtccggtacttgaccctggatatctttgccggccctccaaattacccgttctcggacgagtattag

SEQ ID NO: 117188 - DNA, 1589 bp, Artificial Sequence
  derived and/or modified sequence
gagatctggttgtttgaaagtgtgtagcacctccaccttctctctctctctccctctccctctcctgccagccaagtgaagacatgcttacttccccttcaccttccttcatgatgttaccattggaatgacatactgcatcctatagttataccatccactctgaaatcaatgtgaatttaacttcagttccatacagaaacttcttttccacaggtaagaaacggttgaactggatgcaatttttatcacagcttgtgtaagactgcctctgtccctcctctcacatgccattggttaaccagcagacagtgtgctcaggggcgttgccagctcattgctcttatagcctgtgagggaggaagaaacatttgctaaccaggccagtgacagaaatggattcgaaataccagtgtgtgaagctgaatgatggtcacttcatgcctgtcctgggatttggcacctatgcgcctgcagaggttcctaaaagtaaagctctagaggccgtcaaattggcaatagaagccgggttccaccatattgattctgcacatgtttacaataatgaggagcaggttggactggccatccgaagcaagattgcagatggcagtgtgaagagagaagacatattctacacttcaaagctttggagcaattcccatcgaccagagttggtccgaccagccttggaaaggtcactgaaaaatcttcaattggactatgttgacctctatcttattcattttccagtgtctgtaaagccaggtgaggaagtgatcccaaaagatgaaaatggaaaaatactatttgacacagtggatctctgtgccacatgggaggccatggagaagtgtaaagatgcaggattggccaagtccatcggggtgtccaacttcaaccacaggctgctggagatgatcctcaacaagccagggctcaagtacaagcctgtctgcaaccaggtggaatgtcatccttacttcaaccagagaaaactgctggatttctgcaagtcaaaagacattgttctggttgcctatagtgctctgggatcccatcgagaagaaccatgggtggacccgaactccccggtgctcttggaggacccagtcctttgtgccttggcaaaaaagcacaagcgaaccccagccctgattgccctgcgctaccagctgcagcgtggggttgtggtcctggccaagagctacaatgagcagcgcatcagacagaacgtgcaggtgtttgaattccagttgacttcagaggagatgaaagccatagatggcctaaacagaaatgtgcgatatttgacccttgatatttttgctggcccccctaattatccattttctgatgaatattaacatggagggcattgcatgaggtctgccagaaggccctgcgtgtggatggtgacacagaggatggctctatgctggtgactggacacatcgcctctggttaaatctctcctgcttggcgacttcagtaagctacagctaagcccatcggccggaaaagaaagacaataattttgtttttcattttgaaaaaattaaatgctctctcctaaagattcttcacct

SEQ ID NO: 117189 - DNA, 972 bp, Artificial Sequence
  derived and/or modified sequence
atggacagcaagtaccagtgcgtgaagctgaacgacggccacttcatgcctgtgctgggtttcggcacctatgcccctgccgaagtgccaaaaagcaaggccctggaagcagtgaagctggcaatcgaggctggattccatcacatcgactccgcacatgtctataacaatgaggagcaggtgggactggccattagaagcaaaatcgccgatggatcagtgaagcgggaggacattttttatacatcaaaattgtggtcaaatagtcataggcccgagctggtcaggccagcacttgaacgctctctcaagaacttgcagttggattacgtagacctgtatctgattcactttcctgtgtcagtgaagccaggcgaggaagtgatcccaaaagacgaaaatggaaaaatcctcttcgacaccgtggacttatgcgcaacttgggaggcaatggagaagtgtaaggatgctggtctcgcaaagtccatcggcgtgtccaactttaaccatcggttgctcgagatgattctgaacaagcccggactcaaatacaagccggtgtgcaaccaagtagagtgccatccctatttcaaccagcgtaagttattagacttttgtaagagcaaagatatcgtgctcgtcgcgtattctgcccttgggagtcatcgagaagaaccatgggttgatccaaactcaccagtgctattggaggatcctgtgctgtgcgcactggcaaagaagcacaaacgcactcccgccctgatcgcactgcgctaccagctgcagcggggcgtggtggtgcttgcaaagagctacaacgagcagaggattaggcagaacgtgcaggtcttcgagttccagctgacaagtgaggaaatgaaggccatcgacggcttgaacagaaatgtgagatacttgacgctggacatcttcgccgggccacccaattatcctttttccgatgagtactag

SEQ ID NO: 117190 - DNA, 972 bp, Artificial Sequence
  derived and/or modified sequence
atggacagcaagtaccagtgcgtgaagctgaacgacggccacttcatgcctgtgttaggcttcggtacgtacgccccggctgaggtaccgaaaagcaaagctctggaggccgttaaacttgcgattgaggcaggatttcaccatatcgattccgcccatgtctataacaatgaggaacaggttggccttgctatccgctcaaaaattgctgacggcagcgtgaagcgggaagatattttttatacaagcaagctatggtccaactctcacagaccagagttggtgagaccagccctagagcggagtctgaaaaacctgcagcttgattacgttgatctgtacctgatacacttccctgtgtcagtgaagcctggggaagaagttatacctaaagatgaaaatggaaagatccttttcgacaccgtggatctgtgcgccacgtgggaggccatggagaagtgtaaggacgctggactcgcaaagagcattggcgtgtcaaacttcaaccatcgcctactggagatgattttgaacaaacctggacttaagtacaaaccagtgtgcaaccaagtcgaatgccatccatatttcaatcaacgcaaactcctggatttctgtaagtccaaggatatagtcctggtggcctacagcgctctgggctcccaccgtgaagaaccctgggtggaccctaattctccagtgttattggaggatcctgtactctgcgccctggctaaaaagcataagcgcacccccgctcttatcgccttacgatatcagctacaacgtggcgtggtggtcctcgcaaagtcgtacaacgagcagagaataagacagaacgtccaggtcttcgagtttcagcttacgagtgaggagatgaaggcaatcgacggcctgaacaggaatgttagatatctgactctggatatttttgcaggacctcctaactatccattcagtgatgagtattag

SEQ ID NO: 117191 - DNA, 972 bp, Artificial Sequence
  derived and/or modified sequence
atggacagcaagtatcaatgcgtcaagttaaacgacggtcatttcatgccagtacttggctttgggacctacgccccagcagaggtcccaaagtccaaggcccttgaggccgtcaagttagccattgaagcaggtttccaccacatagactccgcgcatgtctacaacaatgaggagcaggtgggcctggccatcagatccaagattgctgacggatccgtgaagagggaagatattttttacacaagcaagctgtggagtaactcccataggccagaattggtaaggcccgctttggaacgttctctcaagaatctgcaactcgactacgtagacctatacttaatccactttcctgtttcggtgaaaccaggcgaagaggttattcccaaggacgaaaacggcaagatcctgtttgatacagttgatctgtgtgccacgtgggaggccatggaaaagtgcaaggatgccggactggccaaaagcattggggtgagcaactttaatcatcggctgctggaaatgatactcaacaaaccaggccttaaatacaagcccgtgtgtaaccaggtggagtgtcatccctactttaaccagagaaaactgttagacttttgtaagtccaaggacatcgtgcttgtagcctattccgcactgggcagccacagagaggagccgtgggtggacccaaattctcctgtgctgttagaagatcctgtgctgtgtgcattggctaaaaaacacaagagaacacctgccctgatcgccctcaggtaccagttgcagcggggtgtagtcgtgttggcgaagagctacaatgaacagagaattcgccagaacgtgcaggtttttgaatttcagcttacaagcgaagagatgaaggccatagacggattgaaccggaatgttaggtatttgacattggatatttttgcgggacccccaaactatccattctctgacgaatactag

SEQ ID NO: 117192 - DNA, 972 bp, Artificial Sequence
  derived and/or modified sequence
atggattctaagtaccagtgcgtgaagctcaatgacggacatttcatgccagtcctaggtttcggtacatatgcaccagcagaggtccccaaaagtaaagcactcgaggcagtcaagcttgccatcgaagccggttttcaccacatagactcggcccatgtctacaataacgaagagcaggtcgggctggccatccgctcgaagatcgctgatggctcagtgaaaagggaagacattttttatacatcaaagctttggagcaacagccacagaccagaattagtgcggccagcactggagcggtctctgaagaatctgcagctggattacgttgatttgtacctgatccacttcccagtctcggttaagccgggagaggaggtcatacccaaggacgagaacggcaagatcctcttcgacacagtagacctatgcgccacatgggaggccatggagaagtgtaaagatgctgggctcgcaaaaagcattggagtgagtaactttaaccatagactcctggagatgattttgaacaagcctgggttgaagtacaaacctgtatgtaatcaggtggagtgtcatccctattttaaccagagaaagctgttagacttttgcaagtctaaagatattgtgctagttgcctattctgcccttggatcacaccgggaggaaccttgggtagatcccaacagtccagtgctgctcgaggatccggtgttatgtgccctcgcgaaaaaacacaagagaacacctgccttgatcgccctgcgctaccagctgcagagaggcgtcgtcgtgcttgccaagtcctataacgaacaaaggatacggcagaatgtgcaggttttcgagtttcagctcacctccgaggaaatgaaagctattgatgggctgaatcggaatgtacgctatctgactcttgacatttttgccggacccccaaattaccccttttccgatgagtactag

SEQ ID NO: 117193 - protein, 662 aa, Artificial Sequence
  derived and/or modified sequence
MSHVAVENALGLDQQFAGLDLNSSDNQSGGSTASKGRYIPPHLRNREATKGFYDKDSSGWSSSKDKDAYSSFGSRSDSRGKSSFFSDRGSGSRGRFDDRGRSDYDGIGSRGDRSGFGKFERGGNSRWCDKSDEDDWSKPLPPSERLEQELFSGGNTGINFEKYDDIPVEATGNNCPPHIESFSDVEMGEIIMGNIELTRYTRPTPVQKHAIPIIKEKRDLMACAQTGSGKTAAFLLPILSQIYSDGPGEALRAMKENGRYGRRKQYPISLVLAPTRELAVQIYEEARKFSYRSRVRPCVVYGGADIGQQIRDLERGCHLLVATPGRLVDMMERGKIGLDFCKYLVLDEADRMLDMGFEPQIRRIVEQDTMPPKGVRHTMMFSATFPKEIQMLARDFLDEYIFLAVGRVGSTSENITQKVVWVEESDKRSFLLDLLNATGKDSLTLVFVETKKGADSLEDFLYHEGYACTSIHGDRSQRDREEALHQFRSGKSPILVATAVAARGLDISNVKHVINFDLPSDIEEYVHRIGRTGRVGNLGLATSFFNERNINITKDLLDLLVEAKQEVPSWLENMAYEHHYKGSSRGRSKSSRFSGGFGARDYRQSSGASSSSFSSSRASSSRSGGGGHGSSRGFGGGGYGGFYNSDGYGGNYNSQGVDWWGN

SEQ ID NO: 117194 - DNA, 1592 bp, Artificial Sequence
  derived and/or modified sequence
gcatgcgcgaatcccgactgattagtgacctgggggggtttgcgggagtgcgcagcgcggcgggacgcgactggaggcccttttggcttggagggcttcggccttcacggctggcgcagcctggattcccgtccggaggacctggcggcacccggtgtttgcgtgcctgcgagcaagggtttgctggcctagacctgaactcttcagataatcagagtggaggaagtacagccagcaaagggcgctatattcctcctcatttaaggaaccgagaagctactaaaggtttctacgataaagacagttcagggtggagttctagcaaagataaggatgcgtatagcagttttggatctcgtagtgattcaagagggaagtctagcttcttcagtgatcgtggaagtggatcaaggggaaggtttgatgatcgtggacggagtgattacgatggcattggcagccgtggtgacagaagtggctttggcaaatttgaacgtggtggaaacagtcgctggtgtgacaaatcagatgaagatgattggtcaaaaccactcccaccaagtgaacgcttggaacaggaactcttttctggaggcaacactgggattaattttgagaaatacgatgacattccagttgaggcaacaggcaacaactgtcctccacatattgaaagtttcagtgatgttgagatgggagaaattatcatgggaaacattgagcttactcgttatactcgcccaactccagtgcaaaagcatgctattcctattatcaaagagaaaagagacttgatggcttgtgcccaaacaggaaaatggaaggtatgggcgccgcaaacaatacccaatctccttggtattagcaccaacgagagagttggcagtacagatctacgaggaagccagaaaattttcataccgatctagagttcgtccttgcgtggtttatggtggtgccgatattggtcagcagattcgagacttggaacgtggatgccatttgttagtagccactccaggacgtctagtggatatgatggaaagaggaaagattggattagacttttgcaaatacttggtgttagatgaagctgatcggatgttggatatggggtttgagcctcagattcgtagaatagtcgaacaagatactatgcctccaaagggtgtccgccacactatgatgtttagtgctacttttcctaaggaaatacagatgctggctcgtgatttcttagatgaatatatcttcttggctgtaggaagagttggctctacctctgaaaacatcacacagaaagtagtttgggtggaagaatcagacaaacggtcatttctgcttgacctcctaaatgcaacaggcaaggattcactgaccttagtgtttgtggagaccaaaaagggtgcagattctctggaggatttcttataccatgaaggatacgcatgtaccagcatccatggagaccgttctcagagggatagagaagaggcccttcaccagttccgctcaggaaaaagcccaattttagtggctacagcagtagcagcaagaggactggacatttcaaatgtgaaacatgttatcaa

SEQ ID NO: 117195 - protein, 1270 aa, Artificial Sequence
  derived and/or modified sequence
MGDVKNFLYAWCGKRKMTPSYEIRAVGNKNRQKFMCEVQVEGYNYTGMGNSTNKKDAQSNAARDFVNYLVRINEIKSEEVPAFGVASPPPLTDTPDTTANAEGDLPTTMGGPLPPHLALKAENNSEVGASGYGVPGPTWDRGANLKDYYSRKEEQEVQATLESEEVDLNAGLHGNWTLENAKARLNQYFQKEKIQGEYKYTQVGPDHNRSFIAEMTIYIKQLGRRIFAREHGSNKKLAAQSCALSLVRQLYHLGVVEAYSGLTKKKEGETVEPYKVNLSQDLEHQLQNIIQELNLEILPPPEDPSVPVALNIGKLAQFEPSQRQNQVGVVPWSPPQSNWNPWTSSNIDEGPLAFATPEQISMDLKNELMYQLEQDHDLQAILQERELLPVKKFESEILEAISQNSVVIIRGATGCGKTTQVPQFILDDFIQNDRAAECNIVVTQPRRISAVSVAERVAFERGEEPGKSCGYSVRFESILPRPHASIMFCTVGVLLRKLEAGIRGISHVIVDEIHERDINTDFLLVVLRDVVQAYPEVRIVLMSATIDTSMFCEYFFNCPIIEVYGRTYPVQEYFLEDCIQMTHFVPPPKDKKKKDKDDDGGEDDDANCNLICGDEYGPETRLSMSQLNEKETPFELIEALLKYIETLNVPGAVLVFLPGWNLIYTMQKHLEMNPHFGSHRYQILPLHSQIPREEQRKVFDPVPVGVTKVILSTNIAETSITINDVVYVIDSCKQKVKLFTAHNNMTNYATVWASKTNLEQRKGRAGRVRPGFCFHLCSRARFERLETHMTPEMFRTPLHEIALSIKLLRLGGIGQFLAKAIEPPPLDAVIEAEHTLRELDALDANDELTPLGRILAKLPIEPRFGKMMIMGCIFYVGDAICTIAAATCFPEPFINEGKRLGYIHRNFAGNRFSDHVALLSVFQAWDDARMGGEEAEIRFCEHKRLNMATLRMTWEAKVQLKEILINSGFPEDCLLTQVFTNTGPDNNLDVVISLLAFGVYPNVCYHKEKRKILTTEGRNALIHKSSVNCPFSSQDMKYPSPFFVFGEKIRTRAISAKGMTLVTPLQLLLFASKKVQSDGQIVLVDDWIKLQISHEAAACITGLRAAMEALVVEVTKQPAIISQLDPVNERMLNMIRQISRPSAAGINLMIGSTRYGDGPRPPKMARYDNGSGYRRGGSSYSGGGYGGGYSSGGYGSGGYGGSANSFRAGYGAGVGGGYRGVSRGGFRGNSGGDYRGPSGGYRGSGGFQRGGGRGAYGTGYFGQGRGGGGY

SEQ ID NO: 117196 - protein, 599 aa, Artificial Sequence
  derived and/or modified sequence
MGDVKNFLYAWCGKRKMTPSYEIRAVGNKNRQKFMCEVQVEGYNYTGMGNSTNKKDAQSNAARDFVNYLVRINEIKSEEVPAFGVASPPPLTDTPDTTANAEGDLPTTMGGPLPPHLALKAENNSEVGASGYGVPGPTWDRGANLKDYYSRKEEQEVQATLESEEVDLNAGLHGNWTLENAKARLNQYFQKEKIQGEYKYTQVGPDHNRSFIAEMTIYIKQLGRRIFAREHGSNKKLAAQSCALSLVRQLYHLGVVEAYSGLTKKKEGETVEPYKVNLSQDLEHQLQNIIQELNLEILPPPEDPSVPVALNIGKLAQFEPSQRQNQVGVVPWSPPQSNWNPWTSSNIDEGPLAFATPEQISMDLKNELMYQLEQDHDLQAILQERELLPVKKFESEILEAISQNSVVIIRGATGCGKTTQVPQFILDDFIQNDRAAECNIVVTQPRRISAVSVAERVAFERGEEPGKSCGYSVRFESILPRPHASIMFCTVGVLLRKLEAGIRGISHVIVDEIHERDINTDFLLVVLRDVVQAYPEVRIVLMSATIDTSMFCEYFFNCPIIEVYGRTYPVQEYFLEDCIQMTHFVPPPKDKKKKDKKKK

SEQ ID NO: 117197 - DNA, 3813 bp, Artificial Sequence
  derived and/or modified sequence
atgggtgacgtgaaaaattttctgtacgcctggtgcggaaagcggaaaatgaccccctcctatgagatcagagctgtcggtaacaaaaacagacaaaaattcatgtgtgaagtccaggtcgagggatacaactacacagggatgggaaacagcactaataagaaagatgcacagagtaacgctgcacgcgactttgtgaactacctggtcagaattaacgagataaaatccgaggaagtgcctgcttttggcgtggcttcaccaccgcccctgacggacacacctgatactacggcgaatgctgagggcgatctccccaccactatgggaggtcccctgcccccccacctcgccctcaaagctgagaacaacagcgaggtcggtgcttctggctatggcgttccaggtcctacatgggaccgcggtgctaacttgaaggactactatagtcggaaggaggagcaggaggtccaggcaaccctagaaagtgaagaagtcgatctgaatgccggtcttcacggcaactggacacttgagaacgcgaaagcgcgcttgaaccagtattttcaaaaagagaagattcaaggcgaatacaagtatactcaggtgggtcccgatcataatagatcattcattgcggagatgaccatatatatcaaacagttgggcagaaggattttcgctagggagcacggcagtaataaaaaattagccgcccagtcttgcgcgctgtctctggtccgtcagctgtaccatcttggggtagtcgaggcctattccggccttacgaaaaagaaggaaggcgagactgtggaaccttataaggtcaacctgtctcaagacctagagcaccagctccaaaacatcatacaggagttgaacctagagatcttgcccccgcccgaagatcccagtgttcccgttgctctcaatatcggcaaactggcacaattcgaaccgtctcagaggcagaaccaggtgggtgtggtaccatggtcacccccacagagcaactggaacccctggaccagctcaaacattgatgaaggaccactcgcctttgccactccagagcagatttcgatggatttgaagaacgaactgatgtaccagctggaacaagaccacgaccttcaggcgattttgcaagagcgcgaactcctgccagtaaagaagtttgaatcagagatcctcgaggccatcagccagaacagtgtcgtgattatccgcggggctactggatgcgggaaaacaacccaggttccgcagtttattctggacgactttatccagaatgaccgtgccgccgagtgtaatatcgtggtgacccagccacgcaggatcagtgccgtcagtgtagctgagcgtgtggcattcgaaagaggtgaggaacctgggaagagttgcggttactccgtgcgatttgaatctatcctcccgcggccacatgctagcataatgttttgtaccgttggggtcctcttgcgaaagttagaggccgggataaggggaatctcccacgtaattgttgatgagattcatgagcgagacattaacaccgactttctgctcgtggtccttagagatgtggtccaggcctacccggaggtaagaatagtgctgatgtccgctaccattgatacatccatgttctgcgaatattttttcaattgccctatcattgaggtgtacggccgtacctacccagtgcaggagtactttctggaagactgtattcagatgactcatttcgtccctcctcccaaggataagaagaagaaggataaagatgatgacggtggggaggatgatgatgctaactgtaatcttatctgcggggatgaatacgggcccgaaaccagattgagtatgtctcaacttaatgaaaaggagacccccttcgagctgatagaggcactgctgaagtatattgagactctgaacgtaccgggcgcagtactggtttttctcccaggttggaatctgatttatacaatgcaaaaacatcttgagatgaaccctcatttcggatctcacagatatcaaattctccccttgcacagccagattccccgcgaggagcaaaggaaggtgtttgatcccgtgccagtaggcgtgacaaaagtcatcctgagcaccaatatcgctgaaacaagtatcacgatcaacgacgtggtgtatgttattgacagttgcaagcaaaaggtgaaactatttacagctcacaataatatgacgaactatgcaactgtgtgggccagcaagactaacctggaacaaaggaagggcagagcaggccgagttagacccggtttctgcttccatctctgttcacgagctaggttcgaacgtctagaaacacatatgacccccgaaatgttccgcactccgctgcacgaaattgcgctctcaattaaactcctcagactcggtggtatcggacaattcctcgcaaaggcaattgagcccccccccctggacgctgtgatagaagcggagcacacccttcgcgaactcgatgctttggacgcgaacgatgaactgaccccacttggaagaatcctggccaagttacctatcgaaccacgattcggcaaaatgatgatcatgggatgtatcttttacgtgggagacgcaatttgcactatagccgccgcaacctgcttccctgaacccttcatcaacgagggaaagcgactcggctatattcacagaaacttcgcggggaatagattcagcgaccacgtcgccctcctatcagtcttccaagcctgggatgacgccagaatgggaggagaagaagcagagatccgcttttgtgagcacaagaggctgaacatggccaccctacgaatgacctgggaagctaaggtgcagctaaaggagatcctgataaactctggatttcctgaggattgtctgctgacacaggtgttcaccaataccggacctgacaacaaccttgacgttgtgatctctctcctggctttcggcgtatatccgaacgtgtgttaccataaagagaaacggaaaattctcacaaccgaggggaggaacgcattgatccacaaatccagcgtaaactgcccttttagcagtcaggacatgaagtatccaagccctttcttcgtttttggtgaaaaaattagaactcgcgccatcagtgcgaaaggtatgactctggttacccccctacaactgttgttgtttgcatcgaagaaagttcagagcgacggacaaattgtactcgtggacgattggataaaacttcagattagccacgaagccgccgcatgcattactggactacgcgcggccatggaggctttggtggtggaggtgacaaagcagccagcaatcatcagccaactggaccctgtcaacgagcgtatgttgaatatgatccgacaaattagccgcccctccgcagcgggaatcaatctgatgatcggatccactaggtacggggacggacctcgccctcccaaaatggccagatacgataatgggtccgggtataggaggggtgggagcagctatagcggtggtggttatggcggtggctattcaagcggaggatacgggtcaggagggtatggcggaagcgctaattcattccgagccggatatggagcaggagtcggtggcggctataggggtgtgtcccgtggcggttttcgcggaaactcagggggcgattatcgaggcccgagtgggggctacagaggtagtggcggatttcagcgcggcggcggccggggagcttatggtaccggctatttcgggcagggccgcggagggggcggctactag

SEQ ID NO: 117198 - DNA, 1800 bp, Artificial Sequence
  derived and/or modified sequence
atgggagacgtgaaaaacttcttatacgcatggtgtggcaaacgaaagatgacaccaagttatgaaattagagccgtaggcaacaagaatcgtcagaaatttatgtgcgaagtccaggtggaggggtataactacacgggcatgggaaactctacgaataaaaaagacgcgcaatcgaatgccgcgagggatttcgtaaattacttagttcgcattaatgaaattaaatcggaggaggttcccgcttttggcgtggcatctccccctccgttgactgacaccccggataccaccgccaatgctgaaggggatctgccgacaacaatgggcgggccgctgccccctcatcttgcactcaaggcagagaacaatagcgaggtgggagcttcagggtacggcgtccccggcccaacctgggaccggggcgctaatctgaaggactactactcgcgtaaggaggagcaggaagtgcaagctactctggaatcagaggaagtggatctcaatgcggggttgcacggaaattggacattggaaaatgctaaggcacggctcaaccagtacttccagaaggaaaagattcagggtgaatataaatatactcaagtcgggccggaccacaatcgcagctttatcgcagagatgaccatctacatcaagcagcttgggcgtcgcattttcgcgagagagcacggatcaaacaaaaaattagcagcccaaagctgtgccctgagcttagtgaggcagctgtatcacctaggtgtggtcgaagcatacagcggattgacaaagaagaaagagggggaaactgtggagccttacaaggtgaacctgagccaggacctggaacaccagttgcaaaacataatccaagagctgaacctggagatacttcctccgccagaagacccatctgtaccagtggccctcaatattggcaagctggcccagtttgagccatctcagagacagaaccaggtcggggtagtaccctggtcacccccacaatccaattggaacccctggacatcctccaatattgacgaaggacccctcgccttcgcaacaccagagcagatctccatggatctgaaaaacgagcttatgtatcagctggagcaagatcatgacctacaggccatcctccaggagcgcgaactgttacccgtcaagaagttcgagtctgagattctggaagcaatctctcagaattcagtggtcattatcagaggagccaccggctgcggtaagacaactcaggtgcctcagttcatcctggatgactttattcagaacgatcgcgctgccgaatgcaatatcgtagtaacccaacctaggcgtatttccgctgtgtctgttgcagaaagggtggcgttcgaacggggggaagaacctggaaagtcatgtggttactctgtgcggttcgaaagcattctgccacgccctcacgcgagtatcatgttttgcaccgtgggagtgttgctgcgaaaattagaggctgggattcggggtatatcccacgtcatcgttgacgagatccatgaaagagacataaatactgacttcctgcttgtagtactgcgagatgtggtgcaagcctaccctgaagtgagaattgttttaatgagcgcgaccattgatacatctatgttctgtgagtattttttcaattgcccgatcatcgaggtttacggccggacctatccagtgcaggaatacttcctcgaagattgcatacagatgacccactttgtgcctcccccaaaagacaagaagaaaaaagataaaaagaagaaatag

SEQ ID NO: 117199 - DNA, 3813 bp, Artificial Sequence
  derived and/or modified sequence
atgggagatgtgaagaacttcctgtatgcctggtgtgggaagaggaagatgacccccagctatgagatccgggctgtgggcaacaagaaccggcagaagttcatgtgtgaggtgcaggtggagggctacaactacacaggcatgggcaacagcaccaacaagaaggatgcccagagcaatgctgcccgggactttgtgaactacctggtgcgcatcaatgagatcaagtctgaggaggtgcctgcctttggagtggccagccccccacccctgacagacaccccagacaccacagccaatgctgagggggacctgcccaccaccatgggcggccccctgcccccccacctggccctgaaggccgagaacaacagcgaggtgggcgccagcggctacggcgtgcccggccccacctgggacagaggagccaacctgaaggactactacagcaggaaggaggagcaggaggtgcaggccaccctggagagcgaggaggtggacctgaatgccggcctgcacggcaactggaccctggagaatgccaaggcccggctgaaccagtacttccagaaggagaagatccagggcgagtacaagtacacccaggtgggccctgaccacaacagaagcttcatcgccgagatgaccatctacatcaagcagctgggccgccgcatctttgcccgggagcacggcagcaacaagaagctggccgcccagagctgtgccctgagcctggtgcggcagctgtaccacctgggcgtggtggaggcctacagcggcctgaccaagaagaaggagggggagaccgtggagccctacaaggtgaacctgagccaggacctggagcaccagctgcagaacatcatccaggagctgaacctggagatcctgcccccacctgaggaccccagcgtgcctgtggccctgaacatcggcaagctggcccagtttgagcccagccagaggcagaaccaggtgggcgtggtgccctggagccccccccagagcaactggaacccctggaccagcagcaacattgatgagggccccctggcctttgccaccccagagcagatctccatggacctgaagaatgagctgatgtaccagctggagcaggaccatgacctgcaggccatcctgcaggagcgggagctgctgcctgtgaagaagtttgaaagtgagatcctggaggccatcagccagaacagcgtggtgatcatccggggggccaccggctgcggcaagaccacccaggtgccccagttcatcctggatgacttcatccagaatgacagagctgctgagtgcaacatcgtggtgacccagccccggcgcatctctgctgtgtctgtggccgagcgggtggcctttgagcggggggaggagcccgggaagagctgtggctacagcgtgcgctttgagagcatcctgccccggccccacgccagcatcatgttctgcaccgtgggcgtgctgctgaggaagctggaggccggcatccggggcatcagccacgtgattgtggatgagatccacgagcgggacatcaacacagacttcctgctggtggtgctgagagatgtggtgcaggcctacccagaggtgagaattgtgctgatgtctgccaccatcgacacctccatgttctgtgagtacttcttcaactgccccatcatcgaggtgtatggccgcacctaccctgtgcaggagtacttcctggaggactgcatccagatgacccactttgtgcccccacccaaggacaagaagaagaaggacaaggatgatgatggaggagaagatgatgatgccaactgcaacctgatctgtggagatgaatatggccctgagacccggctgtccatgagccagctgaatgagaaggagaccccatttgagctgattgaggccctgctgaagtacatcgagaccctgaatgtgcctggagctgtgctggtgttcctgcccggctggaacctgatctacaccatgcagaagcacctggagatgaacccccacttcggcagccaccgctaccagatcctgcccctgcacagccagatcccccgggaggagcagaggaaggtgtttgatcctgtgcctgtgggcgtgaccaaggtgatcctgagcaccaacattgctgagaccagcatcaccatcaatgatgtggtgtatgtgattgacagctgcaagcagaaggtgaagctgttcaccgcccacaacaacatgaccaactatgccaccgtgtgggccagcaagaccaacctggagcagaggaagggccgggccggccgggtgcggcccggcttctgcttccacctgtgcagccgggccaggtttgagcggctggagacccacatgaccccagagatgttccgcacccccctgcatgaaattgccctgagcatcaagctgctgcggctgggcggcatcggccagttcctggccaaggccatcgagcccccacccctggatgctgtgattgaggccgagcacaccctgcgggagctggatgccctggatgccaatgatgagctgacccccctgggccgcatcctggccaagctgcccatcgagcccaggtttgggaagatgatgatcatgggctgcatcttctacgtgggagatgccatctgcaccatcgctgctgccacctgcttccctgagcccttcatcaatgaaggcaagaggctgggctacatccacaggaactttgctggcaaccgcttcagtgaccacgtggccctgctgagcgtcttccaggcctgggatgatgccaggatgggcggggaggaggccgagatccgcttctgtgagcacaagaggctgaacatggccaccctgaggatgacctgggaggccaaggtgcagctgaaggagatcctgatcaacagcggcttccctgaggactgcctgctgacccaggtgttcaccaacacaggccctgacaacaacctggatgtggtgatcagcctgctggcctttggagtgtaccccaacgtgtgctaccacaaggagaagaggaagatcctgaccacagagggcagaaatgccctgatccacaagagctctgtgaactgccccttcagcagccaggacatgaagtaccccagccccttctttgtgtttggagagaagatccgcacccgggccatcagcgccaagggcatgaccctggtgacccccctgcagctgctgctgtttgccagcaagaaggtgcagagtgatggccagatcgtgctggtggatgactggatcaagctgcagatcagccatgaggccgccgcctgcatcaccggcctgcgggccgccatggaggccctggtggtggaggtgaccaagcagcctgccatcatcagccagctggaccctgtgaatgaaagaatgctgaacatgatccggcagatcagccggcccagcgctgctggcatcaacctgatgattggcagcaccaggtatggagatggccccaggcctcccaagatggcccgctatgacaatggaagtggctaccgccggggcggcagcagctacagcggcggcggctatggaggcggctacagcagcggcggctacggcagcggcggctatggaggcagcgccaacagcttccgggccggctacggggccggcgtgggcggcggctaccggggcgtgtcccggggcggcttccggggcaacagcggcggggactaccggggccccagcggcggctaccggggcagcggcggcttccagaggggcggcggccgcggggcctacggcaccggctacttcggccagggccggggcggcggcggctactag

SEQ ID NO: 117200 - DNA, 1800 bp, Artificial Sequence
  derived and/or modified sequence
atgggagatgtgaagaacttcctgtatgcctggtgtgggaagaggaagatgacccccagctatgagatccgggctgtgggcaacaagaaccggcagaagttcatgtgtgaggtgcaggtggagggctacaactacacaggcatgggcaacagcaccaacaagaaggatgcccagagcaatgctgcccgggactttgtgaactacctggtgcgcatcaatgagatcaagtctgaggaggtgcctgcctttggagtggccagccccccacccctgacagacaccccagacaccacagccaatgctgagggggacctgcccaccaccatgggcggccccctgcccccccacctggccctgaaggccgagaacaacagcgaggtgggcgccagcggctacggcgtgcccggccccacctgggacagaggagccaacctgaaggactactacagcaggaaggaggagcaggaggtgcaggccaccctggagagcgaggaggtggacctgaatgccggcctgcacggcaactggaccctggagaatgccaaggcccggctgaaccagtacttccagaaggagaagatccagggcgagtacaagtacacccaggtgggccctgaccacaacagaagcttcatcgccgagatgaccatctacatcaagcagctgggccgccgcatctttgcccgggagcacggcagcaacaagaagctggccgcccagagctgtgccctgagcctggtgcggcagctgtaccacctgggcgtggtggaggcctacagcggcctgaccaagaagaaggagggggagaccgtggagccctacaaggtgaacctgagccaggacctggagcaccagctgcagaacatcatccaggagctgaacctggagatcctgcccccacctgaggaccccagcgtgcctgtggccctgaacatcggcaagctggcccagtttgagcccagccagaggcagaaccaggtgggcgtggtgccctggagccccccccagagcaactggaacccctggaccagcagcaacattgatgagggccccctggcctttgccaccccagagcagatctccatggacctgaagaatgagctgatgtaccagctggagcaggaccatgacctgcaggccatcctgcaggagcgggagctgctgcctgtgaagaagtttgaaagtgagatcctggaggccatcagccagaacagcgtggtgatcatccggggggccaccggctgcggcaagaccacccaggtgccccagttcatcctggatgacttcatccagaatgacagagctgctgagtgcaacatcgtggtgacccagccccggcgcatctctgctgtgtctgtggccgagcgggtggcctttgagcggggggaggagcccgggaagagctgtggctacagcgtgcgctttgagagcatcctgccccggccccacgccagcatcatgttctgcaccgtgggcgtgctgctgaggaagctggaggccggcatccggggcatcagccacgtgattgtggatgagatccacgagcgggacatcaacacagacttcctgctggtggtgctgagagatgtggtgcaggcctacccagaggtgagaattgtgctgatgtctgccaccatcgacacctccatgttctgtgagtacttcttcaactgccccatcatcgaggtgtatggccgcacctaccctgtgcaggagtacttcctggaggactgcatccagatgacccactttgtgcccccacccaaggacaagaagaagaaggacaagaagaagaagtag

SEQ ID NO: 117201 - DNA, 3813 bp, Artificial Sequence
  derived and/or modified sequence
atgggcgacgtgaagaacttcctgtacgcctggtgcggcaagcggaagatgacaccatcgtatgaaattcgagccgtgggtaacaagaatcggcaaaagttcatgtgtgaggtgcaggtcgaagggtacaactacaccggaatgggaaattctaccaacaagaaagacgcccagagtaacgccgcccgcgacttcgtgaattacctcgtgcgcatcaacgagattaaaagtgaagaggtcccggcttttggcgtggcctcccctccccccttgactgacactccggacactacagctaatgctgaaggagacctgccgaccaccatgggcggccctcttccaccccatttggccctcaaggcggagaataactccgaagtcggtgccagcggttacggcgtgccagggcccacctgggatagaggtgctaacctgaaggactattacagcagaaaagaagagcaagaggtacaggcgaccctggaaagcgaggaggttgacttgaatgccgggcttcacggtaattggactttagaaaatgccaaggcccggttaaaccaatattttcagaaagaaaagatacagggggaatacaagtatactcaggtggggcctgatcacaaccgtagcttcatagccgaaatgaccatctatattaaacaactcggacgcaggatcttcgccagggagcacgggagtaacaagaagctggctgctcagagctgcgcactctccctggtgaggcagctgtaccatttgggcgttgtggaagcatactctggacttaccaaaaagaaagagggagaaacagtagagccctacaaagtaaatctcagtcaggacctcgaacatcagctacagaacattatccaagagctaaatctggaaattctcccacctcctgaggatcctagtgtgcccgttgccttgaacatcggcaagctggcccaatttgaaccttcacagagacaaaatcaggtgggggtggtgccctggagtccaccccaatccaattggaatccgtggacctcgagcaatatcgacgagggtcctcttgctttcgctacccctgaacagatatctatggatttgaagaacgagctcatgtatcaactggagcaggaccatgatttgcaagctatattacaggaacgagagcttttacccgtgaagaaattcgagtctgagatcctcgaggctatcagtcagaacagcgtggtcatcatcaggggtgcaactggctgtgggaagactacccaggtgccacaattcatcctggacgactttatacagaatgatcgggccgccgagtgtaacatcgtagtcacccagcccagacgaatctccgccgtgtctgtggctgagagagtcgcctttgagcgcggggaagaaccaggcaagtcatgtggttactccgttcgattcgaatctattttgccacggccccacgcgtccatcatgttctgcacagtaggggtgctgctcagaaaactggaagctggcattcgagggatcagccatgtcattgtagacgaaatccatgaaagggacatcaataccgactttctcctggtggtgcttcgagacgttgttcaggcttaccccgaagttcggatagtccttatgagcgcaacaatcgacacgtctatgttctgcgaatatttttttaactgtccaatcatcgaagtgtacggacggacatatcctgtgcaggagtacttcctggaagattgcatacagatgacacacttcgtccctccccccaaagataaaaagaagaaggacaaagatgacgacgggggagaggacgatgatgccaactgtaatcttatctgtggcgacgagtatgggcctgagaccagactcagcatgtctcagctgaatgaaaaagagacgccttttgagcttatagaggcactgctgaaatatattgagactctaaacgtcccaggtgccgtcctcgtttttctcccaggttggaatctgatttatacgatgcagaaacacttggagatgaaccctcacttcgggagtcaccggtaccaaatcctgccacttcactctcagattcctcgcgaggagcaacgaaaggtgtttgacccagttccagtaggggtgaccaaggtgatcctttcgaccaacatcgcagaaacctctattaccatcaatgatgttgtctatgtgatcgattcatgtaagcagaaagtgaaattgtttacagctcacaataacatgacaaactatgctaccgtgtgggccagcaagaccaacctagagcaacgaaaaggtagagccggcagagtccggcccggcttttgcttccacctgtgcagccgcgccagatttgaaagactcgagactcacatgacaccagagatgttcaggacccccctgcatgaaatagctctcagcatcaagctcctccggctgggagggatcggccagtttttggccaaggcgatcgagccaccgcccttggacgcagtgattgaagccgagcacactctaagagagcttgacgctctcgacgccaatgacgaactcactccgttggggaggatcttggcgaagttgcccattgagccccggtttggtaaaatgatgattatgggctgtatcttctacgtcggggatgctatatgtaccatcgctgccgcgacttgctttccggaaccctttatcaacgagggcaagcgactgggatacatccaccggaatttcgccggaaatagattctcggatcacgtggccctcctgtctgtgtttcaggcatgggacgatgcccgcatgggcggggaggaagccgaaatcagattctgtgaacacaaacgcctgaacatggctactctacgcatgacatgggaggccaaggtgcagctaaaggagatactcatcaactctggttttccagaggactgtctgctgacccaagtgttcaccaacacggggccagataacaacctcgacgttgttatttcattgctggcctttggcgtgtacccaaatgtgtgttatcataaggagaagaggaaaattctgacaacggaaggtcgaaacgcactcatacataagtcatccgtgaactgccctttttcgagccaggatatgaagtacccatctcctttttttgtgtttggcgagaagattcgaacccgagctatctccgccaagggcatgacactggtgacccctcttcagcttctcctgttcgcctccaagaaggtgcagagtgacggccaaattgttcttgtggatgattggatcaaactgcagatcagtcacgaagcagcagcctgtataacagggttacgagcagctatggaggccctcgtggtggaagtgacaaagcaacctgcgatcatttcccagctcgatccagtgaacgagagaatgcttaatatgatccggcaaatttcccgcccaagtgcggccggtataaacctcatgatcgggagcaccaggtatggagacggcccccggccacccaagatggcaagatacgacaacgggtccggataccggcgtggcggtagctcctactctggcggggggtacggcgggggatacagtagtggcggttatggtagcggtgggtatggcggatccgctaacagcttcagggctgggtatggggctggcgtgggtggtggataccgcggcgtgagccgtggaggatttcgaggcaattcgggtggtgattaccgtgggcctagcgggggctatcgaggttcaggaggcttccaacgcgggggaggtcgaggcgcctatggcaccggctactttggccaggggagaggtggtggggggtactag

SEQ ID NO: 117202 - DNA, 1800 bp, Artificial Sequence
  derived and/or modified sequence
atgggcgacgtgaagaacttcctgtacgcctggtgcggcaagcggaagatgaccccttcctatgaaattagggccgtggggaataagaatagacagaagttcatgtgcgaagtccaggtggagggttacaattacacaggcatgggcaattctaccaacaagaaagacgcccagagcaacgcagcccgagatttcgtcaattatctggtccgcatcaatgaaataaagtcggaagaagtgcccgcctttggagtcgcctctcctcctccgctcactgacacaccagacacgaccgccaacgctgaaggggaccttcccactacaatggggggcccactgcccccacatttggcactaaaagccgaaaataactccgaagtcggggcatctggctacggggttccaggtcccacatgggaccgcggagcgaacctgaaggattactattccaggaaggaggaacaggaggtacaggccactctcgaaagtgaggaagtagacctcaacgcaggattgcacggaaattggactctcgaaaacgcgaaagctcgcctgaatcagtactttcagaaggagaaaatccaaggcgagtacaagtatactcaagtagggccagaccataatagaagctttattgccgaaatgacaatttacataaagcagctgggaaggcggatttttgccagggagcacggttcaaataagaaactggcagcccagtcgtgtgccttatcacttgtgcgccagctctaccacttgggggtagttgaagcgtacagtggcctcaccaagaaaaaggagggtgaaacggttgagccttacaaggtgaatcttagccaggatctggaacaccaactgcagaacattattcaggagctgaatctagagatcctccctcccccggaggacccctcggtaccagtggctctgaatatcggaaagctcgcacaattcgagccttctcagagacagaaccaggttggggttgttccctggtcccctccccagtctaactggaatccatggaccagctctaacattgacgagggaccacttgcatttgccacccccgagcagattagcatggatctgaagaatgaactaatgtaccagctcgaacaggatcatgacctccaggctatcctgcaggaacgagagctattgcccgtgaagaagttcgagagtgagatccttgaggctatcagtcagaactccgtcgtgatcataagaggtgctaccggatgcggcaagacgacacaagtgcctcagttcatcctggacgatttcattcagaatgatcgggctgccgaatgtaacattgtcgtcacgcaacctagacggatatccgccgtgtctgtggcggagcgcgttgctttcgaacgtggcgaggaacccggaaagtcatgcggttacagtgtacgcttcgaaagcatactcccgcgacctcacgcctctatcatgttctgtaccgtcggtgtgttgcttagaaagctcgaagctggtataaggggcattagccatgtcatcgtggacgaaattcatgaaagagatatcaatactgattttttgctggtggtcctgcgcgacgtggtgcaggcttatccagaggtgagaatagttctgatgtcagccacgatagatacatccatgttctgcgagtatttttttaattgtcccattatagaggtatacggtagaacctaccctgtccaggaatattttctggaagactgtattcagatgacccacttcgttccaccccccaaggataaaaagaaaaaagataaaaagaagaaatag

SEQ ID NO: 117203 - DNA, 3813 bp, Artificial Sequence
  derived and/or modified sequence
atgggtgatgtgaagaatttcctctatgcatggtgcggtaaaaggaaaatgaccccctcttacgagattcgggcagtcgggaacaaaaacaggcagaaattcatgtgcgaggtgcaggtcgaaggttacaactacacaggcatgggtaactcgactaacaagaaggacgcccagtctaacgccgcaagggatttcgtgaactacctcgtgcggatcaatgagattaagagtgaggaggtgcccgcattcggtgtggcgagccctcccccactgaccgatacaccagatacaactgccaacgccgagggagacttgccaactacgatgggcggtccccttccaccccatttagctttgaaggccgaaaataattccgaggtcggggcaagcggttatggggtgccaggccctacatgggaccgcggtgctaacctaaaagactactatagcaggaaagaggagcaggaagtccaggcaactttagagagcgaagaagttgatctcaatgccggactccatggcaactggacattggagaatgctaaggcgcgattaaatcagtattttcaaaaagaaaaaatccagggcgaatacaagtatacgcaagtgggaccagaccataatcgctcattcattgcagagatgacgatatacatcaagcagcttggtaggcgcatcttcgcacgcgaacacggtagcaacaaaaaattagctgcgcagagctgcgcccttagtctggtgcgccagctgtatcaccttggggtagtggaggcctacagtggactgacaaagaagaaagagggggaaaccgtggagccctacaaagtaaacctctctcaggacctggagcatcagctacagaacattattcaagagctgaacctagaaatcttacctccgcctgaagacccctccgtgccagtcgccttgaacatagggaaactggctcagttcgaaccctctcagcgtcagaaccaggtgggggtggtgccttggtctcccccacaatccaactggaacccctggaccagcagtaatatcgatgaaggccctttggcatttgctacgcctgagcagatatccatggatctgaaaaacgagctgatgtaccagctagagcaggatcacgatcttcaggcaatactgcaggaacgagaactcctgccggtcaaaaaatttgagagcgaaatcttggaagccatatcacaaaactccgtggttattattcgcggagccaccggttgcggaaaaactacccaggtaccacaatttatcctcgatgatttcatccagaatgaccgggctgcggagtgtaatattgtggtaacccaacctcgacgcatcagcgcagtcagcgtggccgaacgagtggcctttgaacgcggtgaggaacctggcaagtcttgcggctatagtgttcgctttgaatccattttaccgaggccacacgctagcattatgttttgtacagttggcgtccttctgcgaaagctagaggccggaattcgtggtattagtcacgtgattgttgatgaaatccatgagcgcgacattaacaccgattttctactcgtggtattaagggatgtagtgcaggcgtatccagaagtgcggattgtgcttatgtcggccactattgatacaagtatgttttgtgaatatttctttaactgccccatcattgaagtgtatggtagaacttaccctgtgcaggagtattttttggaagattgcatccagatgacgcatttcgtaccacctccaaaggataagaagaaaaaagacaaggacgatgacggaggtgaagacgatgatgccaactgtaatcttatttgtggtgacgagtacgggccagagacccggttgtccatgtcacaactcaacgaaaaggagaccccattcgagctgattgaagccctgctgaagtatatagagacccttaatgtacctggagccgtgctggtgtttttgcccggatggaacctcatttacacaatgcagaagcacctggaaatgaaccctcactttgggagccataggtatcaaatcctccctttgcattctcaaattccccgagaggagcagcgaaaagtgtttgaccctgtccccgtgggggtcactaaggttattctctccaccaacatcgctgaaacttcgatcactattaacgatgttgtgtacgtgatagactcttgcaaacagaaggttaaactgttcaccgcccataacaatatgacaaactacgctactgtgtgggctagcaaaacaaacctggagcagaggaagggacgcgctgggcgagtgcggcctgggttctgttttcacttatgctcaagggctagatttgaacgattggagacgcacatgacacctgaaatgttccgaacacccctgcacgagattgcactgtcgatcaaattgctccggctcggtggcataggccagttccttgctaaagcgatcgagcccccaccacttgacgccgtgattgaggctgagcacaccctgagagaactcgatgcattagatgcaaatgacgagctgacaccccttgggcgtatcctcgcaaaattaccgatcgagcctcgattcggaaaaatgatgatcatgggatgtatcttctatgttggggacgccatatgtacgattgctgctgctacttgttttcccgagcccttcatcaacgagggcaagagactgggttacattcatcggaacttcgcaggaaacagattttcagaccacgtggcgctcctctctgtgtttcaagcctgggatgatgcccgaatgggcggagaggaagctgaaatcaggttctgtgagcacaagcgcttaaatatggccacactccggatgacctgggaggccaaagtgcaactcaaagaaattctgattaattctggcttccctgaggattgcctgctgacacaagtatttaccaacacgggcccagataacaatctggacgtcgtaattagcctgctggccttcggagtctaccctaatgtctgctaccacaaggaaaagcgaaagattctgacgactgagggaaggaatgccctcatacacaagtcctccgtaaattgccctttttcttcccaggacatgaagtatccatcccccttttttgttttcggtgaaaagatccgaaccagggcaatcagcgccaaaggaatgaccctggtgaccccactgcaactcctcttattcgcatcaaagaaagtgcagagcgacgggcagatagtgctggttgacgactggatcaaattacaaatttctcacgaggccgctgcttgcatcaccgggctgcgcgctgcaatggaagctctagtcgtggaggtcactaagcagcctgctattatcagtcagttggacccagtaaatgagcgtatgttaaatatgatccgtcagatcagtcggccttcagctgcaggtattaacctaatgatcggcagcactagatacggagatggtccgaggcctcccaaaatggcccgatacgataacggctccgggtaccgtcgcggaggtagcagttatagtggaggtgggtatgggggagggtattcatccggcggatacgggtccggaggctacggcggatccgcaaattcgtttagggctggatacggagccggtgtggggggaggatacagaggagtgtctcgcggtggctttcgcggaaattcaggtggtgattatcgaggacccagcggcggatacagggggtcaggcggattccaacggggtggagggcgaggtgcttatggaaccggctacttcggacaagggagaggcggaggaggatattag

SEQ ID NO: 117204 - DNA, 1800 bp, Artificial Sequence
  derived and/or modified sequence
atgggagacgtcaagaacttcctctacgcgtggtgcggtaagaggaagatgacaccatcatacgagatccgagcggtgggaaataagaatcgacaaaaattcatgtgtgaagtccaagtggagggatataattacactggtatgggcaacagcacaaacaaaaaggatgcccagtccaatgccgctagagactttgtcaactacctggttagaattaacgaaattaagtcggaagaggtgccagcatttggggttgcctcacctcctccattgactgacaccccagacacaaccgccaatgccgaaggtgatctgcccactaccatggggggtccactccctccccatcttgccctcaaggcggagaataattccgaggtgggagcctcagggtatggggtcccaggaccgacttgggacaggggcgcaaacctgaaagactattactcacgaaaggaagagcaagaagttcaggcaacgctcgaaagcgaagaggtggacctgaacgcaggtctgcacgggaattggacactggaaaatgccaaggcaagacttaatcagtacttccagaaagagaaaattcagggcgagtataaatacacgcaggtgggccctgatcacaatcgcagtttcatcgccgaaatgacaatctacattaagcagctgggcagaagaatattcgcacgcgagcacggaagtaacaaaaaactggctgcccagagctgtgccctatcactggtccggcagctttatcacctaggggtcgtggaagcctatagcgggttgaccaagaaaaaagagggtgaaacagtcgagccctacaaggtcaatttatcccaagacctcgagcaccagctccagaacatcatacaggaactgaacctggaaattctgcctccaccagaagacccatccgtcccagttgccctgaacatcggcaaactggcacagtttgaaccatctcagcgacaaaaccaggtgggcgtggtgccctggtcgccacctcagtccaactggaatccttggaccagcagcaatattgatgagggcccactggcttttgccacacccgagcagatctctatggatttaaagaacgagttgatgtaccagctcgagcaggatcacgatctccaggctatactgcaggaacgcgagctgttgcctgtcaaaaagtttgagagtgaaattttagaggctatcagccaaaattccgttgtaattattaggggagccaccggatgcggcaagaccacacaggttcctcaatttattttggatgacttcattcagaatgatcgggctgctgagtgcaacatcgtggtgacacagccccgtaggatctcagccgtcagcgtggcagaacgggtggccttcgagcgcggtgaagagcctggcaaatcatgtgggtattcagtccgatttgagtcgatcctacctagaccccatgcgtctattatgttttgcaccgtgggtgtcctgctccgcaagcttgaagccggaatccgcggtatctcccatgttatcgtcgacgaaattcacgagcgtgatatcaacactgactttttgctcgtcgttctgagggatgtagttcaggcctaccctgaggtgaggattgtcctgatgtcggcgaccatagatacatcgatgttctgcgagtatttttttaactgcccgattatcgaagtctacggaaggacgtacccggtgcaagaatattttctggaggactgtattcagatgacccattttgttccccctccaaaggataagaaaaagaaagacaaaaagaagaaatag

SEQ ID NO: 117205 - DNA, 3813 bp, Artificial Sequence
  derived and/or modified sequence
atgggcgacgtgaagaacttcctgtacgcctggtgcggcaagagaaagatgacccccagctacgagatcagagccgtgggcaacaagaacagacagaagttcatgtgcgaggtgcaggtggagggctacaactacaccggcatgggcaacagcaccaacaagaaggacgcccagagcaacgccgccagagacttcgtgaactacctggtgagaatcaacgagatcaagagcgaggaggtgcccgccttcggcgtggccagccccccccccctgaccgacacccccgacaccaccgccaacgccgagggcgacctgcccaccaccatgggcggccccctgcccccccacctggccctgaaggccgagaacaacagcgaggtgggcgccagcggctacggcgtgcccggccccacctgggacagaggcgccaacctgaaggactactacagcagaaaggaggagcaggaggtgcaggccaccctggagagcgaggaggtggacctgaacgccggcctgcacggcaactggaccctggagaacgccaaggccagactgaaccagtacttccagaaggagaagatccagggcgagtacaagtacacccaggtgggccccgaccacaacagaagcttcatcgccgagatgaccatctacatcaagcagctgggcagaagaatcttcgccagagagcacggcagcaacaagaagctggccgcccagagctgcgccctgagcctggtgagacagctgtaccacctgggcgtggtggaggcctacagcggcctgaccaagaagaaggagggcgagaccgtggagccctacaaggtgaacctgagccaggacctggagcaccagctgcagaacatcatccaggagctgaacctggagatcctgcccccccccgaggaccccagcgtgcccgtggccctgaacatcggcaagctggcccagttcgagcccagccagagacagaaccaggtgggcgtggtgccctggagccccccccagagcaactggaacccctggaccagcagcaacatcgacgagggccccctggccttcgccacccccgagcagatcagcatggacctgaagaacgagctgatgtaccagctggagcaggaccacgacctgcaggccatcctgcaggagagagagctgctgcccgtgaagaagttcgagagcgagatcctggaggccatcagccagaacagcgtggtgatcatcagaggcgccaccggctgcggcaagaccacccaggtgccccagttcatcctggacgacttcatccagaacgacagagccgccgagtgcaacatcgtggtgacccagcccagaagaatcagcgccgtgagcgtggccgagagagtggccttcgagagaggcgaggagcccggcaagagctgcggctacagcgtgagattcgagagcatcctgcccagaccccacgccagcatcatgttctgcaccgtgggcgtgctgctgagaaagctggaggccggcatcagaggcatcagccacgtgatcgtggacgagatccacgagagagacatcaacaccgacttcctgctggtggtgctgagagacgtggtgcaggcctaccccgaggtgagaatcgtgctgatgagcgccaccatcgacaccagcatgttctgcgagtacttcttcaactgccccatcatcgaggtgtacggcagaacctaccccgtgcaggagtacttcctggaggactgcatccagatgacccacttcgtgcccccccccaaggacaagaagaagaaggacaaggacgacgacggcggcgaggacgacgacgccaactgcaacctgatctgcggcgacgagtacggccccgagaccagactgagcatgagccagctgaacgagaaggagacccccttcgagctgatcgaggccctgctgaagtacatcgagaccctgaacgtgcccggcgccgtgctggtgttcctgcccggctggaacctgatctacaccatgcagaagcacctggagatgaacccccacttcggcagccacagataccagatcctgcccctgcacagccagatccccagagaggagcagagaaaggtgttcgaccccgtgcccgtgggcgtgaccaaggtgatcctgagcaccaacatcgccgagaccagcatcaccatcaacgacgtggtgtacgtgatcgacagctgcaagcagaaggtgaagctgttcaccgcccacaacaacatgaccaactacgccaccgtgtgggccagcaagaccaacctggagcagagaaagggcagagccggcagagtgagacccggcttctgcttccacctgtgcagcagagccagattcgagagactggagacccacatgacccccgagatgttcagaacccccctgcacgagatcgccctgagcatcaagctgctgagactgggcggcatcggccagttcctggccaaggccatcgagcccccccccctggacgccgtgatcgaggccgagcacaccctgagagagctggacgccctggacgccaacgacgagctgacccccctgggcagaatcctggccaagctgcccatcgagcccagattcggcaagatgatgatcatgggctgcatcttctacgtgggcgacgccatctgcaccatcgccgccgccacctgcttccccgagcccttcatcaacgagggcaagagactgggctacatccacagaaacttcgccggcaacagattcagcgaccacgtggccctgctgagcgtgttccaggcctgggacgacgccagaatgggcggcgaggaggccgagatcagattctgcgagcacaagagactgaacatggccaccctgagaatgacctgggaggccaaggtgcagctgaaggagatcctgatcaacagcggcttccccgaggactgcctgctgacccaggtgttcaccaacaccggccccgacaacaacctggacgtggtgatcagcctgctggccttcggcgtgtaccccaacgtgtgctaccacaaggagaagagaaagatcctgaccaccgagggcagaaacgccctgatccacaagagcagcgtgaactgccccttcagcagccaggacatgaagtaccccagccccttcttcgtgttcggcgagaagatcagaaccagagccatcagcgccaagggcatgaccctggtgacccccctgcagctgctgctgttcgccagcaagaaggtgcagagcgacggccagatcgtgctggtggacgactggatcaagctgcagatcagccacgaggccgccgcctgcatcaccggcctgagagccgccatggaggccctggtggtggaggtgaccaagcagcccgccatcatcagccagctggaccccgtgaacgagagaatgctgaacatgatcagacagatcagcagacccagcgccgccggcatcaacctgatgatcggcagcaccagatacggcgacggccccagaccccccaagatggccagatacgacaacggcagcggctacagaagaggcggcagcagctacagcggcggcggctacggcggcggctacagcagcggcggctacggcagcggcggctacggcggcagcgccaacagcttcagagccggctacggcgccggcgtgggcggcggctacagaggcgtgagcagaggcggcttcagaggcaacagcggcggcgactacagaggccccagcggcggctacagaggcagcggcggcttccagagaggcggcggcagaggcgcctacggcaccggctacttcggccagggcagaggcggcggcggctactag

SEQ ID NO: 117206 - DNA, 1800 bp, Artificial Sequence
  derived and/or modified sequence
atgggcgacgtgaagaacttcctgtacgcctggtgcggcaagagaaagatgacccccagctacgagatcagagccgtgggcaacaagaacagacagaagttcatgtgcgaggtgcaggtggagggctacaactacaccggcatgggcaacagcaccaacaagaaggacgcccagagcaacgccgccagagacttcgtgaactacctggtgagaatcaacgagatcaagagcgaggaggtgcccgccttcggcgtggccagccccccccccctgaccgacacccccgacaccaccgccaacgccgagggcgacctgcccaccaccatgggcggccccctgcccccccacctggccctgaaggccgagaacaacagcgaggtgggcgccagcggctacggcgtgcccggccccacctgggacagaggcgccaacctgaaggactactacagcagaaaggaggagcaggaggtgcaggccaccctggagagcgaggaggtggacctgaacgccggcctgcacggcaactggaccctggagaacgccaaggccagactgaaccagtacttccagaaggagaagatccagggcgagtacaagtacacccaggtgggccccgaccacaacagaagcttcatcgccgagatgaccatctacatcaagcagctgggcagaagaatcttcgccagagagcacggcagcaacaagaagctggccgcccagagctgcgccctgagcctggtgagacagctgtaccacctgggcgtggtggaggcctacagcggcctgaccaagaagaaggagggcgagaccgtggagccctacaaggtgaacctgagccaggacctggagcaccagctgcagaacatcatccaggagctgaacctggagatcctgcccccccccgaggaccccagcgtgcccgtggccctgaacatcggcaagctggcccagttcgagcccagccagagacagaaccaggtgggcgtggtgccctggagccccccccagagcaactggaacccctggaccagcagcaacatcgacgagggccccctggccttcgccacccccgagcagatcagcatggacctgaagaacgagctgatgtaccagctggagcaggaccacgacctgcaggccatcctgcaggagagagagctgctgcccgtgaagaagttcgagagcgagatcctggaggccatcagccagaacagcgtggtgatcatcagaggcgccaccggctgcggcaagaccacccaggtgccccagttcatcctggacgacttcatccagaacgacagagccgccgagtgcaacatcgtggtgacccagcccagaagaatcagcgccgtgagcgtggccgagagagtggccttcgagagaggcgaggagcccggcaagagctgcggctacagcgtgagattcgagagcatcctgcccagaccccacgccagcatcatgttctgcaccgtgggcgtgctgctgagaaagctggaggccggcatcagaggcatcagccacgtgatcgtggacgagatccacgagagagacatcaacaccgacttcctgctggtggtgctgagagacgtggtgcaggcctaccccgaggtgagaatcgtgctgatgagcgccaccatcgacaccagcatgttctgcgagtacttcttcaactgccccatcatcgaggtgtacggcagaacctaccccgtgcaggagtacttcctggaggactgcatccagatgacccacttcgtgcccccccccaaggacaagaagaagaaggacaagaagaagaagtag

SEQ ID NO: 117207 - DNA, 4240 bp, Artificial Sequence
  derived and/or modified sequence
gcgagttgctgtgcgtttctctgttgtctcggtagaaggccagagtcacacacggtcctaagagctgggcaccaggaagcgaaggctgatctgaagaagacacttgaatcatgggtgacgttaaaaattttctgtatgcctggtgtggcaaaaggaagatgaccccatcctatgaaattagagcagtggggaacaaaaacaggcagaaattcatgtgtgaggttcaggtggaaggttataattacactggcatgggaaattccaccaataaaaaagatgcacaaagcaatgctgccagagactttgttaactatttggttcgaataaatgaaataaagagtgaagaagttccagcttttggggtagcatctccgcccccacttactgatactcctgacactacagcaaatgctgaaggagatttaccaacaaccatgggaggacctcttcctccacatctggctctcaaagcagaaaataattctgaggtaggggcctctggctatggtgttcctgggcccacctgggaccgaggagccaacttgaaggattactactcaagaaaggaagaacaagaagtgcaagcgactctagaatcagaagaagtggatttaaatgctgggcttcatggaaactggaccttggaaaatgctaaagctcgtctaaaccaatattttcagaaagaaaagatccaaggagaatataagtacacccaagtgggtcctgatcacaacaggagctttattgcagaaatgaccatttatatcaagcagctgggcagaaggatttttgcacgagaacatggatcaaataagaaattggcagcacagtcctgtgccctgtcacttgtcagacaactgtaccatcttggagtggttgaagcttactccggacttacaaagaagaaggaaggagagacagtggagccttacaaagtaaacctctctcaagatttagagcatcagctgcaaaacatcattcaagagctaaatcttgagattttgcccccgcctgaagatccttctgtgccagttgcactcaacattggcaaattggctcagttcgaaccatctcagcgacaaaaccaagtgggtgtggttccttggtcacctccacaatccaactggaatccttggactagtagcaacattgatgaggggcctctggcttttgctactccagagcaaataagcatggacctcaagaatgaattgatgtaccagttggaacaggatcatgatttgcaagcaatcttgcaggagagagagttactgcctgtgaagaaatttgaaagtgagattctggaagcaatcagccaaaattcagttgtcattattagaggggctactggatgtgggaaaaccacacaggttccccagttcattctagatgactttatccagaatgaccgagcagcagagtgtaacatcgtagtaactcagcccagaagaatcagtgcggtttctgtggcagagcgagttgcatttgaaagaggagaagagcctggaaaaagctgtggctacagcgttcgatttgagtctatacttcctcgtcctcatgccagtataatgttttgtactgtaggtgtgctcctgagaaaattagaagcaggcattcgaggaatcagtcatgtaattgtagatgaaatacatgaaagagatattaatactgacttccttttggtagtactgcgtgatgttgttcaggcttatcctgaagttcgcattgttcttatgtctgctactattgataccagcatgttttgtgaatatttcttcaattgccccatcattgaagtttatgggaggacttacccagttcaagaatattttctggaagactgcattcagatgacccactttgttcctccaccaaaagacaaaaagaagaaggataaggatgatgatggtggtgaggatgatgatgcaaattgcaacttgatctgtggtgatgaatatggtccagaaacaaggttgagcatgtctcaattgaacgaaaaggaaactccttttgaactcatcgaggctctacttaagtacattgaaacccttaatgttcctggagctgtgttggtttttttgcctggctggaatctgatttatactatgcagaagcatttggaaatgaatccacattttggaagccatcggtatcagattctacccctgcattctcagattcctcgagaggaacagcgcaaagtgtttgatccagtaccagttggagtaaccaaggttattttgtccacaaatattgctgaaacaagcattaccataaacgatgttgtttatgtcattgactcctgcaagcagaaagtgaaactcttcactgctcacaacaatatgaccaactatgctaccgtatgggcatcaaaaacaaaccttgagcaacggaaagggcgagctggccgagtacggcctggattctgctttcacctgtgcagccgagctcgttttgagagacttgaaacccacatgacaccagagatgttccgaacaccattgcatgaaattgctcttagcataaaacttctgcgtctaggaggaattggccaatttctggccaaagcaattgaacctccccctttggatgctgtgattgaagcagaacacactcttagagagcttgatgcattagatgccaatgatgagttgactcctttgggacgaatcctggctaaactccccattgagcctcgttttggcaaaatgatgataatggggtgtattttctacgtgggagatgctatctgtaccattgctgctgctacctgctttccagagcctttcatcaatgaaggaaagcggctgggctatatccatcgaaattttgctggaaacagattttctgatcacgtagcccttttatcagtattccaagcctgggatgatgctagaatgggtggagaagaagcagagatacgtttttgtgagcacaaaagacttaatatggctacactaagaatgacttgggaagccaaagttcagctcaaagagattttgattaattctgggtttccagaagattgtttgttgacacaagtgtttactaacactggaccagataataatttggatgttgttatctccctcctggcctttggtgtgtaccccaatgtatgctatcataaggaaaagaggaagattctcaccactgaagggcgtaatgcacttatccacaaatcatctgttaattgtccttttagtagccaagacatgaagtacccatctcccttctttgtatttggtgaaaagattcgaactcgagccatctctgctaaaggcatgactttagtcacccccctgcagttgcttctctttgcctccaagaaagtccaatctgatgggcagattgtgcttgtagatgactggattaaactgcaaatatctcatgaagctgctgcctgtatcactggtctccgggcagccatggaggctttggttgttgaagtaaccaaacaacctgctatcatcagccagttggaccccgtaaatgaacgtatgctgaacatgatccgtcagatctctagaccctcagctgctggtatcaaccttatgattggcagtacacggtatggagatggtccacgtcctcccaagatggcccgatacgacaatggaagcggatatagaaggggaggttctagttacagtggtggaggctatggcggtggctatagcagtggaggctatggtagcggaggctatggtggcagcgccaactcctttcgggcaggatatggtgcaggtgttggtggaggctatagaggagtttcccgaggtggctttagaggcaactctggaggagactacagagggcctagtggaggctacagaggatctgggggattccagcgaggaggtggtaggggggcctatggaactggctactttggacagggaagaggaggtggcggctattaaaacttggttatgtcagttcctgtgtgtagacagtaaggaaaaaaaggcatgctatgtgttacgtgttttttccagtatgtttatttgccaccaaaaagtaaatgcattttcacccattctgtggttcattgtagtttaaggaaaccaagcatatagatgcattagtgattttgtttatattatgtaaaatataacgatctcttaaaaataccacagtttgtattttttctttaaggagtaaagatttgcctttaaataacttggtattttcctggctttcgtttaatacaatagaaaataaagtattacaccgaata

SEQ ID NO: 117208 - DNA, 1972 bp, Artificial Sequence
  derived and/or modified sequence
atgcgtacgctcgctggccccgccccctagcgccgcggtcggagccatttcgccgattcctccatgcgagttgctgtgcgtttctctgttgtctcggtagaaggccagagtcacacacggtcctaagagctgggcaccaggaagcgaaggctgatctgaagaagacacttgaatcatgggtgacgttaaaaattttctgtatgcctggtgtggcaaaaggaagatgaccccatcctatgaaattagagcagtggggaacaaaaacaggcagaaattcatgtgtgaggttcaggtggaaggttataattacactggcatgggaaattccaccaataaaaaagatgcacaaagcaatgctgccagagactttgttaactatttggttcgaataaatgaaataaagagtgaagaagttccagcttttggggtagcatctccgcccccacttactgatactcctgacactacagcaaatgctgaaggagatttaccaacaaccatgggaggacctcttcctccacatctggctctcaaagcagaaaataattctgaggtaggggcctctggctatggtgttcctgggcccacctgggaccgaggagccaacttgaaggattactactcaagaaaggaagaacaagaagtgcaagcgactctagaatcagaagaagtggatttaaatgctgggcttcatggaaactggaccttggaaaatgctaaagctcgtctaaaccaatattttcagaaagaaaagatccaaggagaatataagtacacccaagtgggtcctgatcacaacaggagctttattgcagaaatgaccatttatatcaagcagctgggcagaaggatttttgcacgagaacatggatcaaataagaaattggcagcacagtcctgtgccctgtcacttgtcagacaactgtaccatcttggagtggttgaagcttactccggacttacaaagaagaaggaaggagagacagtggagccttacaaagtaaacctctctcaagatttagagcatcagctgcaaaacatcattcaagagctaaatcttgagattttgcccccgcctgaagatccttctgtgccagttgcactcaacattggcaaattggctcagttcgaaccatctcagcgacaaaaccaagtgggtgtggttccttggtcacctccacaatccaactggaatccttggactagtagcaacattgatgaggggcctctggcttttgctactccagagcaaataagcatggacctcaagaatgaattgatgtaccagttggaacaggatcatgatttgcaagcaatcttgcaggagagagagttactgcctgtgaagaaatttgaaagtgagattctggaagcaatcagccaaaattcagttgtcattattagaggggctactggatgtgggaaaaccacacaggttccccagttcattctagatgactttatccagaatgaccgagcagcagagtgtaacatcgtagtaactcagcccagaagaatcagtgcggtttctgtggcagagcgagttgcatttgaaagaggagaagagcctggaaaaagctgtggctacagcgttcgatttgagtctatacttcctcgtcctcatgccagtataatgttttgtactgtaggtgtgctcctgagaaaattagaagcaggcattcgaggaatcagtcatgtaattgtagatgaaatacatgaaagagatattaatactgacttccttttggtagtactgcgtgatgttgttcaggcttatcctgaagttcgcattgttcttatgtctgctactattgataccagcatgttttgtgaatatttcttcaattgccccatcattgaagtttatgggaggacttacccagttcaagaatattttctggaagactgcattcagatgacccactttgttcctccaccaaaagacaaaaagaagaaggataagaaaaagaag

SEQ ID NO: 117209 - protein, 795 aa, Artificial Sequence
  derived and/or modified sequence
MSKRHRLDLGEDYPSGKKRAGTDGKDRDRDRDREDRSKDRDRERDRGDREREREKEKEKELRASTNAMLISAGLPPLKASHSAHSTHSAHSTHSTHSAHSTHAGHAGHTSLPQCINPFTNLPHTPRYYDILKKRLQLPVWEYKDRFTDILVRHQSFVLVGETGSGKTTQIPQWCVEYMRSLPGPKRGVACTQPRRVAAMSVAQRVADEMDVMLGQEVGYSIRFEDCSSAKTILKYMTDGMLLREAMNDPLLERYGVIILDEAHERTLATDILMGVLKEVVRQRSDLKVIVMSATLDAGKFQIYFDNCPLLTIPGRTHPVEIFYTPEPERDYLEAAIRTVIQIHMCEEEEGDLLLFLTGQEEIDEACKRIKREVDDLGPEVGDIKIIPLYSTLPPQQQQRIFEPPPPKKQNGAIGRKVVVSTNIAETSLTIDGVVFVIDPGFAKQKVYNPRIRVESLLVTAISKASAQQRAGRAGRTRPGKCFRLYTEKAYKTEMQDNTYPEILRSNLGSVVLQLKKLGIDDLVHFDFMDPPAPETLMRALELLNYLAALNDDGDLTELGSMMAEFPLDPQLAKMVIASCDYNCSNEVLSITAMLSVPQCFVRPTEAKKAADEAKMRFAHIDGDHLTLLNVYHAFKQNHESVQWCYDNFINYRSLMSADNVRQQLSRIMDRFNLPRRSTDFTSRDYYINIRKALVTGYFMQVAHLERTGHYLTVKDNQVVQLHPSTVLDHKPEWVLYNEFVLTTKNYIRTCTDIKPEWLVKIAPQYYDMSNFPQCEAKRQLDRIIAKLQSKEYSQY

SEQ ID NO: 117210 - protein, 784 aa, Artificial Sequence
  derived and/or modified sequence
MSKRHRLDLGEDYPSGKKRAGTDGKDRDRDRERDRGDREREREKEKEKELRASTNAMLISAGLPPLKASHSAHSTHSAHSTHSTHSAHSTHAGHAGHTSLPQCINPFTNLPHTPRYYDILKKRLQLPVWEYKDRFTDILVRHQSFVLVGETGSGKTTQIPQWCVEYMRSLPGPKRGVACTQPRRVAAMSVAQRVADEMDVMLGQEVGYSIRFEDCSSAKTILKYMTDGMLLREAMNDPLLERYGVIILDEAHERTLATDILMGVLKEVVRQRSDLKVIVMSATLDAGKFQIYFDNCPLLTIPGRTHPVEIFYTPEPERDYLEAAIRTVIQIHMCEEEEGDLLLFLTGQEEIDEACKRIKREVDDLGPEVGDIKIIPLYSTLPPQQQQRIFEPPPPKKQNGAIGRKVVVSTNIAETSLTIDGVVFVIDPGFAKQKVYNPRIRVESLLVTAISKASAQQRAGRAGRTRPGKCFRLYTEKAYKTEMQDNTYPEILRSNLGSVVLQLKKLGIDDLVHFDFMDPPAPETLMRALELLNYLAALNDDGDLTELGSMMAEFPLDPQLAKMVIASCDYNCSNEVLSITAMLSVPQCFVRPTEAKKAADEAKMRFAHIDGDHLTLLNVYHAFKQNHESVQWCYDNFINYRSLMSADNVRQQLSRIMDRFNLPRRSTDFTSRDYYINIRKALVTGYFMQVAHLERTGHYLTVKDNQVVQLHPSTVLDHKPEWVLYNEFVLTTKNYIRTCTDIKPEWLVKIAPQYYDMSNFPQCEAKRQLDRIIAKLQSKEYSQY

SEQ ID NO: 117211 - DNA, 2388 bp, Artificial Sequence
  derived and/or modified sequence
atgtccaagagacaccggcttgaccttggagaggattacccgtcaggcaagaaaagggcgggaaccgacggcaaagaccgggacagggaccgcgatcgagaagaccgatcaaaggaccgtgatcgggagcgagaccggggggatagggagagagaacgggaaaaagaaaaagaaaaggaactgcgagccagcactaacgccatgctcatttccgcaggcctgccacctcttaaagccagtcacagtgcccacagcacccattccgcgcatagcacacattccacccatagcgcccactctactcacgcgggccatgcgggccacacctcgttacctcagtgcatcaatccgttcactaacctgccccatacacccaggtattacgatatactcaagaagaggctgcaactgcctgtttgggaatataaagaccggtttaccgatattttggtgcgccaccagtcgtttgttcttgtgggggaaacaggatccggtaaaactacccagatacctcagtggtgcgtggaatatatgagatcattgcccggccccaaaagaggcgtcgcctgcacccagcctcgcagggtagcagcaatgtctgtggcccagcgggtggcggacgagatggacgtcatgctcggccaggaggttgggtactctatacgctttgaggactgcagcagtgcgaaaacgatcctgaaatatatgactgatggaatgctgctgcgtgaagccatgaatgatcccttgctggaaaggtacggcgtgatcattctggatgaggcgcatgagaggaccctggccaccgacatactgatgggcgtgctcaaggaagtggtccgccagaggtcagacctgaaggtcatagtgatgtctgccaccttagatgcaggaaaattccaaatttattttgacaactgcccgctgctcactattccaggccgcacccaccctgtggaaattttttatacacctgaaccagaacgcgactaccttgaagccgctattcgcactgtgatacagatacatatgtgtgaagaagaagagggtgacctcctcttgttcctcacaggtcaagaagaaattgatgaggcatgcaaacggattaagagggaagtagacgatctcggccccgaggtcggggatatcaagatcatcccactctacagtaccctgcccccccagcagcaacagcgcatcttcgagccacctccccccaagaagcagaacggggccatcggcagaaaagtggtggtgtctaccaatatagcggaaaccagtttaacgatcgacggagtcgttttcgtcatcgaccccggctttgccaaacagaaggtgtataatccccggatccgagtggaatcactgcttgtgaccgcaatctctaaggcctctgcccagcagagggccggacgggccgggagaactagaccaggcaagtgttttagactctatacagagaaggcctataagactgagatgcaggataacacatacccagagatcctgagatctaacctgggtagtgttgtgctgcagctgaaaaaactgggaattgacgacctcgtgcactttgatttcatggaccccccggcaccggaaactctaatgcgtgcattggagttactcaactacctcgccgccctgaacgacgatggggacctgactgagctagggagcatgatggctgagtttcccctggatcctcagctagctaagatggtgattgcatcttgcgactacaactgctcaaacgaggtgctgtcaatcacagccatgctgagtgtgcctcagtgcttcgttagaccaacggaagccaaaaaggctgccgacgaagctaagatgagatttgctcatattgacggggatcacctgacacttctcaatgtgtaccatgcctttaagcagaaccacgagtccgtgcagtggtgctacgataattttattaattacagatcattgatgagcgccgataatgtccggcagcagctttcacgaatcatggaccgcttcaacctgcccaggcgctccacggacttcaccagtcgcgattactacatcaacattcgaaaggcgctggtcacgggctacttcatgcaggtagcccacctggaacgcacgggtcactatctgactgtaaaggataatcaggttgtacagcttcacccctccaccgtgctcgaccacaagccagagtgggtcctatacaacgaattcgtccttaccaccaaaaattatatcaggacctgtaccgatataaagcctgaatggttggtgaagattgctccccagtactacgacatgagcaacttcccgcaatgtgaagcaaagcgccaactggataggatcattgccaagttgcagtctaaggagtattcacagtattag

SEQ ID NO: 117212 - DNA, 2355 bp, Artificial Sequence
  derived and/or modified sequence
atgagcaaacgacaccggttggacctcggcgaagactatccctcaggtaagaagagagcaggaacagacgggaaagatagggaccgggatcgggaaagagataggggagatagggagcgggagagagagaaagaaaaggagaaagagctgcgggcctctaccaacgccatgctcataagtgcaggtctgcctcccctgaaggccagtcatagtgcccattccacgcacagtgcccactccactcacagcacacatagtgcccactcaacacatgccgggcacgccggacatacaagtctgccacagtgcataaatccatttactaacttgccgcatactcctcgctattacgacattctgaagaaaaggctgcagctcccagtgtgggagtacaaggacagatttacagatatactggtgcgccatcaatcattcgtgctggtgggcgaaaccggatcaggaaagacaactcagatcccccagtggtgcgtagagtatatgcgatccctccccggacctaagagaggtgtggcatgtactcagcccagaagggttgcggctatgtccgttgcccaacgcgtagctgatgagatggatgttatgctggggcaagaagtgggctatagcattcggttcgaggactgctctagcgctaaaaccatcctcaagtatatgacagacggaatgctgcttcgagaggccatgaacgatcctctgcttgagcgctacggcgttatcattttggatgaagcacacgagagaacattggcgacagacattttaatgggagtgctgaaggaggtcgttcggcagcgtagcgacctgaaggttattgtgatgtcggctactctcgacgctggaaaatttcagatttactttgacaattgccccttgctaacaatcccagggaggacacatcctgtggaaatcttctacaccccagagccagagcgggactatctcgaggcagcaatacggaccgtaattcagatacatatgtgtgaggaggaggagggcgacctgctcctcttccttacaggtcaagaggagattgatgaggcctgcaagcgcatcaaacgcgaagtcgacgatttgggtcctgaagttggagacatcaagattatccccctctacagtactcttccgcctcagcagcaacagcggatattcgagcctcccccccccaaaaaacaaaacggcgccattggccgaaaagttgtggtatcaaccaacattgctgagacgagcttaaccatcgacggcgtggtctttgtcatcgaccccggcttcgctaaacagaaggtctacaatccccggatcagggtcgagtcattactggtgaccgccatctctaaagcttcagctcaacagagggcaggccgggcaggccgcacgcgccctggaaaatgttttagactgtacaccgagaaggcctataagacggagatgcaggataacacatatccagagatcttaaggagtaatttggggtctgtggtgctgcagctcaaaaagctcggaattgacgatttagttcattttgatttcatggaccctcctgcacctgaaaccttgatgagagctcttgagctgctgaactacctggccgcattgaacgatgacggagatctcaccgaactggggtctatgatggccgagttcccccttgacccgcagctggctaagatggtgatcgcttcatgcgactacaactgttctaacgaggtactatccattactgccatgctctctgtcccacaatgcttcgtccgtccaaccgaggcaaaaaaagccgccgatgaggctaagatgaggttcgctcacatcgacggcgaccacttgacactgcttaacgtttaccacgctttcaaacagaatcatgaatcagtccagtggtgttacgacaatttcatcaattaccgatccttgatgagtgccgacaatgtgcgtcaacaactctctcggatcatggaccgtttcaacctgcctaggcgatccaccgacttcacctcacgcgattactacattaatattagaaaagccctcgtgaccggctactttatgcaggtggcacatctcgaacgcactggccattatctgactgtcaaggataaccaagtggtgcagttacacccaagcacagtgctggatcacaaaccagagtgggtcctttataatgaattcgtattgacgacgaagaattacattcgtacgtgtaccgacatcaaaccggagtggctcgtgaaaatagccccacagtactatgacatgagtaactttccccagtgcgaagccaagcgacagctggatcggataatcgctaagctgcagtccaaggaatatagtcagtattag

SEQ ID NO: 117213 - DNA, 2388 bp, Artificial Sequence
  derived and/or modified sequence
atgagcaagaggcaccggctggacctgggggaggactaccccagcggcaagaagagagctggaacagatggcaaggaccgggaccgggaccgggaccgggaggacaggagcaaggaccgggaccgggagcgggacagaggagaccgggagcgggagcgggagaaggagaaggagaaggagctgcgggccagcaccaatgccatgctgatctctgctggcctgccccccctgaaggccagccacagcgcccacagcacccacagcgcccacagcacccacagcacccacagcgcccacagcacccatgctggccacgccggccacaccagcctgccccagtgcatcaaccccttcaccaacctgccccacaccccccgctactatgacatcctgaagaagaggctgcagctgcctgtgtgggagtacaaggaccgcttcacagacatcctggtgcgccaccagagctttgtgctggtgggggagaccggcagcggcaagaccacccagatcccccagtggtgtgtggagtacatgaggagcctgcccggccccaagaggggcgtggcctgcacccagccccggcgggtggccgccatgtctgtggcccagagggtggctgatgagatggatgtgatgctgggccaggaggtgggctacagcatccgctttgaggactgcagcagcgccaagaccatcctgaagtacatgacagatggcatgctgctgcgggaggccatgaatgaccccctgctggagagatatggagtcatcatcctggatgaggcccacgagaggaccctggccacagacatcctgatgggcgtgctgaaggaggtggtgcggcagaggagtgacctgaaggtgattgtgatgtctgccaccctggatgctgggaagttccagatctactttgacaactgccccctgctgaccatccctggccgcacccaccctgtggagatcttctacaccccagagcctgagcgggactacctggaggccgccatccgcaccgtcatccagatccacatgtgtgaggaggaggagggggacctgctgctcttcctgaccggccaggaggagattgatgaggcctgcaagaggatcaagcgggaggtggatgacctgggccctgaggtgggggacatcaagatcatccccctgtacagcaccctgcccccccagcagcagcagaggatctttgagcccccaccacccaagaagcagaatggagccatcggcaggaaggtggtggtgtccaccaacattgctgagaccagcctgaccattgatggagtggtgtttgtgattgatcctggctttgccaagcagaaggtgtacaacccccgcatccgggtggagagcctgctggtgacagccatcagcaaggccagcgcccagcagagagctggccgggccggccgcaccaggcctgggaagtgcttccggctgtacacagagaaggcctacaagacagagatgcaggacaacacctacccagagatcctgcggagcaacctgggctctgtggtgctgcagctgaagaagctgggcattgatgacctggtgcactttgacttcatggaccccccagcccctgagaccctgatgagggccctggagctgctgaactacctggccgccctgaatgatgatggagacctgacagagctgggctccatgatggccgagttccccctggacccccagctggccaagatggtgattgccagctgtgactacaactgcagcaatgaggtgctgagcatcacagccatgctgtctgtgccccagtgctttgtgcggcccacagaggccaagaaggccgcagatgaggccaagatgagatttgcccacattgatggagaccacctgaccctgctgaatgtgtaccacgccttcaagcagaaccacgagagcgtgcagtggtgctatgacaacttcatcaactaccgcagcctgatgtctgctgacaacgtgcggcagcagctgagccgcatcatggaccgcttcaacctgcccaggaggagcacagacttcaccagccgggactactacatcaacatcaggaaggccctggtgacaggctacttcatgcaggtggcccacctggagaggacaggccactacctgactgtgaaggacaaccaggtggtgcagctgcaccccagcacagtgctggaccacaagccagagtgggtgctgtacaatgaatttgtgctgaccaccaagaactacatccgcacctgcacagacatcaagccagagtggctggtgaagatcgccccccagtactatgacatgagcaacttcccccagtgtgaggccaagaggcagctggaccgcatcatcgccaagctgcagagcaaggagtacagccagtactag

SEQ ID NO: 117214 - DNA, 2355 bp, Artificial Sequence
  derived and/or modified sequence
atgagcaagaggcaccggctggacctgggggaggactaccccagcggcaagaagagagctggaacagatggcaaggaccgggaccgggaccgggagcgggacagaggagaccgggagcgggagcgggagaaggagaaggagaaggagctgcgggccagcaccaatgccatgctgatctctgctggcctgccccccctgaaggccagccacagcgcccacagcacccacagcgcccacagcacccacagcacccacagcgcccacagcacccacgccggccatgctggccacaccagcctgccccagtgcatcaaccccttcaccaacctgccccacaccccccgctactatgacatcctgaagaagaggctgcagctgcctgtgtgggagtacaaggaccgcttcacagacatcctggtgcgccaccagagctttgtgctggtgggggagactggaagtggcaagaccacccagatcccccagtggtgtgtggagtacatgaggagcctgcccggccccaagaggggcgtggcctgcacccagcccaggagagtggccgccatgtctgtggcccagagggtggctgatgagatggatgtgatgctgggccaggaggtgggctacagcatccgctttgaggactgcagcagcgccaagaccatcctgaagtacatgacagatggcatgctgctgcgggaggccatgaatgaccccctgctggagagatatggagtcatcatcctggatgaggcccacgagaggaccctggccacagacatcctgatgggcgtgctgaaggaggtggtgcggcagaggagtgacctgaaggtgattgtgatgtctgccaccctggatgctgggaagttccagatctactttgacaactgccccctgctgaccatccctggccgcacccaccctgtggagatcttctacaccccagagcctgagcgggactacctggaggccgccatcagaactgtcatccagatccacatgtgtgaggaggaggagggggacctgctgctcttcctgaccggccaggaggagattgatgaggcctgcaagaggatcaagcgggaggtggatgacctgggccctgaggtgggggacatcaagatcatccccctgtacagcaccctgcccccccagcagcagcagaggatctttgagcccccaccacccaagaagcagaatggagccatcggcaggaaggtggtggtgtccaccaacattgctgagaccagcctgaccattgatggagtggtgtttgtgattgaccccggctttgccaagcagaaggtgtacaacccccgcatccgggtggagagcctgctggtgacagccatcagcaaggccagcgcccagcagagagctggccgggccggccgcaccaggcctgggaagtgcttccggctgtacacagagaaggcctacaagacagagatgcaggacaacacctacccagagatcctgcggagcaacctgggctctgtggtgctgcagctgaagaagctgggcattgatgacctggtgcactttgacttcatggaccccccagcccctgagaccctgatgagggccctggagctgctgaactacctggccgccctgaatgatgatggagacctgacagagctgggctccatgatggccgagttccccctggacccccagctggccaagatggtgattgccagctgtgactacaactgcagcaatgaggtgctgagcatcacagccatgctgtctgtgccccagtgctttgtgcggcccacagaggccaagaaggctgctgatgaggccaagatgagatttgcccacattgatggagaccacctgaccctgctgaatgtgtaccacgccttcaagcagaaccatgaatctgtgcagtggtgctatgacaacttcatcaactaccgcagcctgatgtctgctgacaacgtgcggcagcagctgagccgcatcatggaccgcttcaacctgccccggcgcagcacagacttcaccagccgggactactacatcaacatcaggaaggccctggtgacaggctacttcatgcaggtggcccacctggagaggacaggccactacctgactgtgaaggacaaccaggtggtgcagctgcaccccagcacagtgctggaccacaagccagagtgggtgctgtacaatgaatttgtgctgaccaccaagaactacatccgcacctgcacagacatcaagccagagtggctggtgaagatcgccccccagtactatgacatgagcaacttcccccagtgtgaggccaagaggcagctggaccgcatcatcgccaagctgcagagcaaggagtacagccagtactag

SEQ ID NO: 117215 - DNA, 2388 bp, Artificial Sequence
  derived and/or modified sequence
atgagcaagcggcaccggctggacctgggcgaggactaccccagcggcaaaaaacgcgccgggacggacggaaaggatcgagatagggatcgggaccgcgaggatcggagcaaagaccgtgatcgggagagagataggggtgatagggaaagggagcgggagaaagagaaggaaaaggagctgcgtgcgagcactaatgccatgctcattagcgccggccttccccctctgaaagcttcccatagcgcccactctactcactccgcccatagtacacacagtacccactctgcccactctacacatgcgggtcacgccgggcacacatccctgccccagtgtataaatcccttcactaacttgcctcatacgccacgctactatgacatcctgaagaagcgtctgcagctgcccgtgtgggaatacaaagacagatttactgacattctggttcggcatcagtcattcgtccttgtcggagagaccggctcgggaaaaacaacccagatcccacagtggtgcgtggaatatatgagatccctgcccgggccaaaacgtggggtcgcctgcacgcaaccacggagggttgcagctatgtccgtagcacagagagtcgccgacgaaatggacgtgatgctgggacaggaggtggggtacagtatccgcttcgaggactgcagctctgcaaaaaccatcttgaagtatatgacagatgggatgcttctccgcgaagcaatgaacgacccactcttagagcggtacggggtgattatactggacgaggcccatgagagaacgcttgccacggatattttaatgggcgtacttaaagaagtggtacgacagcggagcgacttgaaggtcatcgttatgtccgccacgctcgatgcaggcaagttccaaatctacttcgataattgtcctctgttaacgattcctggcaggacacacccggtcgaaatcttttatactcctgaacctgagagagactatctggaggccgccatacgtacggtgatccagattcacatgtgtgaagaggaagagggcgaccttctgttgttcctgaccggacaggaagagatcgatgaagcatgtaaaagaataaaacgagaagtggatgacttagggcccgaggttggcgatattaagattattcccctatactccaccctgcccccccagcagcagcaacggatctttgaacccccacctccaaaaaaacaaaacggggcaatcggtagaaaggttgttgtctcaacaaatattgctgagacttcactgactatcgatggcgttgtttttgtgatagaccctggttttgcaaaacagaaggtgtacaatcctagaatccgcgtggaatccttactggtaaccgctatcagcaaggctagcgctcaacagcgggcaggccgcgcaggaagaacgcgccctggaaagtgcttcaggctttatacagagaaagcctacaagaccgaaatgcaagacaatacctatccggaaatcctccgctctaatctggggtccgtggtattacagctcaagaagctggggatcgatgatctggtgcattttgacttcatggatcctcccgcccctgagactttgatgcgtgccctagagttgctgaattacctcgccgcccttaatgacgacggggatttaacagaattaggatcaatgatggcggagtttcctctagatccgcaactagccaaaatggttattgcctcctgcgactacaattgctctaacgaggtcctttctattactgcaatgctatccgtgcctcagtgtttcgtaagaccgactgaggcaaagaaggctgccgatgaggctaaaatgaggtttgctcatatcgatggagatcatctgacactccttaacgtgtatcacgcattcaagcaaaatcacgaatcagttcagtggtgctatgataattttatcaattataggagtcttatgtccgcggacaacgtcagacagcagcttagccgaatcatggatcgcttcaatctgccgaggcgtagcactgatttcactagccgcgattactacataaacatcaggaaagcgttagtgacaggatatttcatgcaagtggcgcacctggagcgtaccggtcattacctgaccgtgaaagataatcaggtcgtgcagctgcacccatcaactgtactcgaccataagccagagtgggttctgtacaatgaatttgtcctgaccaccaaaaactacattcgaacatgtacggacattaaacccgaatggctcgtgaaaatcgccccccagtattacgacatgtctaactttccacagtgtgaagctaaaaggcagctggaccggataatagccaaactgcagtctaaggaatactcccagtactag

SEQ ID NO: 117216 - DNA, 2355 bp, Artificial Sequence
  derived and/or modified sequence
atgagcaagcggcaccggctggacctgggcgaggactaccccagcggaaagaaaagagccggaaccgatgggaaagaccgagaccgagacagggaacgggaccgcggcgaccgcgaacgagaacgggagaaggaaaaggaaaaagagctccgcgcctccactaacgcaatgctgatcagtgccggcctcccaccattgaaggccagccacagtgcccatagtacccactcagcgcattccacacacagcactcattccgctcattccacccacgccgggcacgctgggcacacatctctcccgcagtgcattaacccatttactaatctgccacatacccctaggtactatgacatacttaagaaaaggttacaactgccagtttgggaatacaaggaccgttttacagatatcctcgtgagacaccagtcctttgtcttagtgggcgaaaccggatccgggaagacaacccagattccgcagtggtgcgtggaatatatgcggtcactgcccggacctaagagaggcgtggcatgcacccaaccccggagggttgccgcaatgtccgtggcccaacgcgtcgccgacgagatggatgtgatgctggggcaggaggtgggatactcaatcaggttcgaagattgcagcagtgctaagactatactcaagtatatgactgatgggatgttgctgcgtgaggccatgaatgatcctctgctggaaagatatggcgttatcatactggacgaggctcacgagcgcacactggcaaccgatatccttatgggggtgcttaaggaagtggtgcggcaacggagcgatctgaaggtaatcgttatgagcgccacgctcgatgctgggaagttccaaatatattttgataattgcccactcttaactattcctggtaggacccatcctgtggagatcttctatacgcctgaaccggagagagactatctcgaggcagccatcaggacagtcattcagattcacatgtgcgaggaggaggagggagatctgcttctgtttctcaccggccaggaggagattgacgaggcttgcaaaagaattaaacgcgaggtggatgacttggggccggaagtcggagatatcaaaatcatacccttgtatagtactttaccaccccagcaacagcaaagaatcttcgaaccgcctcctcccaagaagcagaatggagccatcggacgaaaggttgtggtgagtacaaacatcgccgaaacatctctcaccatagatggggtggtcttcgtgatcgacccaggctttgcgaagcagaaggtctacaacccacgtatcagagtcgaatcattgttagtgaccgctatctcaaaggcatcagcccagcagcgtgccgggagggcaggaagaacacggccaggcaagtgtttcaggctatacaccgaaaaggcctacaagacagagatgcaagataacacctaccccgagatcttgaggagtaaccttgggtccgtggtacttcaactgaaaaagctcggtattgacgacctggtgcatttcgactttatggatcccccagcccccgagactctcatgcgagcgcttgagctgctgaactacctggcagctctgaacgatgacggcgatctaacggagcttggttccatgatggcagaattccccctcgacccccagctggccaagatggtcatcgcgtcctgcgactacaattgtagcaacgaagtcttgagtatcactgcaatgctaagcgtgccccagtgtttcgtgcgcccaactgaagccaagaaggctgctgacgaggccaaaatgaggtttgcccacatcgacggggatcaccttacactgctcaatgtataccatgcttttaaacaaaatcatgagtcagtgcaatggtgctacgataatttcattaattacagatcactcatgagcgctgataatgtgcggcagcagctctcaagaatcatggatcgcttcaatttaccccgacgttctaccgacttcacatctagggattattacatcaacataagaaaagccctcgttacgggctacttcatgcaagtggcacacctcgagcgcacagggcactacttaacggtgaaagataaccaggtggtgcagctgcatccatccacggtgctggatcacaagccggagtgggttctgtacaatgagttcgtgctaacgacaaaaaactacattcgtacctgtacggatataaagcccgagtggctagtgaaaattgctccccaatactacgatatgagcaacttcccccagtgtgaagcaaagagacagctggaccggattatcgccaagctccagtcaaaggagtacagtcagtattag

SEQ ID NO: 117217 - DNA, 2388 bp, Artificial Sequence
  derived and/or modified sequence
atgtccaaaagacatcgactggatctgggggaggactatcctagtgggaaaaaacgagccggtactgatggtaaggaccgcgaccgcgaccgggaccgcgaggaccgttccaaggacagggatagggagcgcgatcggggagacagagaacgcgaaagagaaaaggaaaaggaaaaggagcttagggccagcaccaatgctatgctgatctctgcagggctgcctccacttaaggccagccactctgctcattctacccactcggctcacagtacccattcaacacattctgctcacagcacccacgccggtcacgctggccacacttccttgccacaatgcatcaatccttttacaaacttgccgcacacccctaggtactacgacatcctgaagaagcggctgcagctgccagtgtgggagtataaggacaggttcacagacatcctcgttcggcaccagtcattcgtgctggtgggggagactgggagcggaaaaaccacacagattcctcaatggtgtgttgagtacatgaggagcctgccagggccaaagaggggggtggcctgcacccaacctagacgcgtggcggctatgtcagtggctcagcgggtcgctgacgaaatggatgtcatgctgggacaggaagtgggctatagtatcaggttcgaggattgctccagcgccaaaaccatcctcaaatacatgacagacggtatgctactccgcgaggcaatgaacgatccccttctggagcggtacggagtaattatcctcgacgaagcacacgagaggactctggctactgatatcctcatgggcgtacttaaggaggtagtccggcagagatcagacttgaaagtaattgtgatgagcgccacgcttgatgccggaaagtttcaaatctacttcgacaactgcccactcctgactataccagggaggacccatcccgttgagattttctatacacctgagcctgagcgggattacttggaggctgctatcagaaccgtcatccagattcatatgtgcgaggaggaggagggcgaccttctcctcttcctgactggacaagaagaaatcgacgaggcctgcaagcgaatcaaaagagaggtcgacgacctcgggcctgaggttggcgacatcaagattatccctttatactctactctgccaccccagcaacaacagcggatctttgaaccccctccacctaaaaagcagaacggagcaattggtagaaaagtggttgtaagtactaacattgccgaaacaagcctcacaattgacggcgttgtgttcgtaatcgaccccggtttcgcaaaacagaaggtgtacaatcctcgcattcgagtcgagagtctcctcgttacagctatctcaaaagcatccgctcagcaacgcgctgggcgagcaggccgaaccagaccaggaaaatgcttccgcctatacactgagaaagcctacaagactgagatgcaggataatacttatccagagattctcaggtccaaccttggcagcgtcgttctgcagctcaaaaagctgggcatcgatgacctggttcattttgactttatggatcctccggctccagagacactgatgcgggcactcgaactcctgaattacctggccgctctgaacgacgatggagacctgacagaactgggcagtatgatggcagagttccctctcgacccccagcttgccaagatggttatcgcaagctgcgactacaactgttctaacgaggtcctgtcaatcaccgctatgttatctgtaccccaatgctttgtgagacccacagaggctaaaaaggccgcagacgaagccaagatgcgtttcgcccacatagatggtgaccacctgacgcttttgaacgtgtaccatgctttcaagcagaaccacgagtcggtgcagtggtgctacgacaattttataaattacaggtcgttaatgtcagccgataatgtacgtcagcagttgtcacggatcatggaccgatttaacctgccacggagaagcacagatttcaccagtcgggattactacataaacattcgcaaggcccttgtgacaggatatttcatgcaggttgcacaccttgaacggacaggacactatctgacggtgaaagacaatcaggttgtgcagctccatcccagcaccgtactagaccataagccagaatgggtgctttataatgaattcgtgttgacaactaaaaattatattcgtacctgtaccgacatcaaacccgaatggttggtgaagattgctccacagtattacgacatgtccaacttcccacagtgcgaggccaaacgtcagctagacaggataatagcaaaacttcaatctaaggagtattcacagtattag

SEQ ID NO: 117218 - DNA, 2355 bp, Artificial Sequence
  derived and/or modified sequence
atgagtaaacgacatagactagatctgggcgaggactaccccagcggcaagaaacgggctggaaccgacgggaaggatcgggacagggacagagagcgcgaccggggtgacagggaaagagagagagagaaggagaaggagaaggaactccgcgcttctacgaatgctatgctaatttctgccggtctaccacccctaaaagcatcccactccgcacacagcacccattcagctcactctacccactcaacacatagcgcccactctactcatgccggacatgcaggtcacacaagcttgccgcaatgtattaatccattcacaaacctcccccacacacccagatactatgacattctcaagaaaaggctgcagctccctgtttgggaatataaagaccgatttactgacattctggtccgccatcaatcatttgtgctggtcggtgagacaggaagcggaaagactactcagatccctcaatggtgtgtggaatacatgcgctcgctccctggcccaaaacgtggcgtcgcttgcacacagcccaggagggtggccgcaatgtccgttgcacaaagggtggccgatgaaatggacgtaatgttaggccaggaagtaggttattcaatcagattcgaagattgcagtagtgcgaagaccattctgaaatatatgactgatgggatgctgcttcgcgaggccatgaatgatcccctcttggagcgctatggagtaatcatcctcgatgaggcccatgaaagaactctcgccactgacattctgatgggggtgctgaaagaagtggtcagacagcgtagcgacctgaaggtgatagtcatgagtgcaaccctcgacgccggaaagtttcagatttatttcgataactgcccgctgcttaccatcccaggtcgcacccacccagtagagattttctacacacccgaaccagaaagagactacctggaagccgcaattcggacggtgatccagatacacatgtgcgaggaagaagagggggacttgctcctctttcttaccgggcaggaggaaatcgacgaagcttgcaagagaattaagcgcgaagtggacgacctcggccctgaagtgggcgacatcaagatcatcccgctttatagcacactccctcctcaacaacagcaaaggatttttgaaccccctccgccaaagaaacagaatggagcaattggcagaaaggtggtcgtcagcactaacatagcagagacatccctgacgatcgatggcgtggtatttgtcatcgaccctgggtttgcaaaacagaaagtgtataaccccaggatccgagtcgagagtctgctggtaaccgctataagcaaggctagtgcccagcagcgcgctggtagagcaggcaggactaggccgggtaagtgctttagactatataccgagaaggcttacaaaacagagatgcaagacaacacatatccagagattctcagatccaacctgggtagcgtcgttctgcaattgaaaaaactcggaatcgatgatctcgtccacttcgatttcatggatccaccagcccctgagactctgatgcgggctttagaactacttaactatctagccgctctcaacgatgacggcgatttaacagagctgggatcaatgatggccgagttccctctggacccacaactggccaagatggtgattgcaagttgcgattacaactgttccaacgaggtattatccatcacagccatgctctccgtccctcagtgctttgtaaggcctactgaggccaaaaaggccgctgatgaagcaaagatgcgcttcgctcatatcgacggtgaccatctgaccctgctgaacgtgtatcacgcttttaagcagaaccacgagagcgtacaatggtgctacgataatttcataaactacaggtcactaatgtctgcagacaacgtgaggcaacagctgtcaaggatcatggaccggttcaacctgccaagacggtctactgacttcacatcaagggattattatataaacattcggaaggctctcgtgacaggctacttcatgcaggtggcccacctggaacgaaccggacactacctaacagttaaagacaatcaggtggtccagctacatccatctaccgtgctggaccacaaacctgagtgggtgttgtataatgagtttgtgcttactaccaaaaattatataagaacctgcacggatatcaaacccgaatggttggtgaaaattgcaccacagtattacgacatgtcaaattttccccagtgtgaggctaagcgacagttggaccgaataatcgcaaagctgcagtcgaaggaatactctcaatactag

SEQ ID NO: 117219 - DNA, 2388 bp, Artificial Sequence
  derived and/or modified sequence
atgagcaagagacacagactggacctgggcgaggactaccccagcggcaagaagagagccggcaccgacggcaaggacagagacagagacagagacagagaggacagaagcaaggacagagacagagagagagacagaggcgacagagagagagagagagagaaggagaaggagaaggagctgagagccagcaccaacgccatgctgatcagcgccggcctgccccccctgaaggccagccacagcgcccacagcacccacagcgcccacagcacccacagcacccacagcgcccacagcacccacgccggccacgccggccacaccagcctgccccagtgcatcaaccccttcaccaacctgccccacacccccagatactacgacatcctgaagaagagactgcagctgcccgtgtgggagtacaaggacagattcaccgacatcctggtgagacaccagagcttcgtgctggtgggcgagaccggcagcggcaagaccacccagatcccccagtggtgcgtggagtacatgagaagcctgcccggccccaagagaggcgtggcctgcacccagcccagaagagtggccgccatgagcgtggcccagagagtggccgacgagatggacgtgatgctgggccaggaggtgggctacagcatcagattcgaggactgcagcagcgccaagaccatcctgaagtacatgaccgacggcatgctgctgagagaggccatgaacgaccccctgctggagagatacggcgtgatcatcctggacgaggcccacgagagaaccctggccaccgacatcctgatgggcgtgctgaaggaggtggtgagacagagaagcgacctgaaggtgatcgtgatgagcgccaccctggacgccggcaagttccagatctacttcgacaactgccccctgctgaccatccccggcagaacccaccccgtggagatcttctacacccccgagcccgagagagactacctggaggccgccatcagaaccgtgatccagatccacatgtgcgaggaggaggagggcgacctgctgctgttcctgaccggccaggaggagatcgacgaggcctgcaagagaatcaagagagaggtggacgacctgggccccgaggtgggcgacatcaagatcatccccctgtacagcaccctgcccccccagcagcagcagagaatcttcgagccccccccccccaagaagcagaacggcgccatcggcagaaaggtggtggtgagcaccaacatcgccgagaccagcctgaccatcgacggcgtggtgttcgtgatcgaccccggcttcgccaagcagaaggtgtacaaccccagaatcagagtggagagcctgctggtgaccgccatcagcaaggccagcgcccagcagagagccggcagagccggcagaaccagacccggcaagtgcttcagactgtacaccgagaaggcctacaagaccgagatgcaggacaacacctaccccgagatcctgagaagcaacctgggcagcgtggtgctgcagctgaagaagctgggcatcgacgacctggtgcacttcgacttcatggacccccccgcccccgagaccctgatgagagccctggagctgctgaactacctggccgccctgaacgacgacggcgacctgaccgagctgggcagcatgatggccgagttccccctggacccccagctggccaagatggtgatcgccagctgcgactacaactgcagcaacgaggtgctgagcatcaccgccatgctgagcgtgccccagtgcttcgtgagacccaccgaggccaagaaggccgccgacgaggccaagatgagattcgcccacatcgacggcgaccacctgaccctgctgaacgtgtaccacgccttcaagcagaaccacgagagcgtgcagtggtgctacgacaacttcatcaactacagaagcctgatgagcgccgacaacgtgagacagcagctgagcagaatcatggacagattcaacctgcccagaagaagcaccgacttcaccagcagagactactacatcaacatcagaaaggccctggtgaccggctacttcatgcaggtggcccacctggagagaaccggccactacctgaccgtgaaggacaaccaggtggtgcagctgcaccccagcaccgtgctggaccacaagcccgagtgggtgctgtacaacgagttcgtgctgaccaccaagaactacatcagaacctgcaccgacatcaagcccgagtggctggtgaagatcgccccccagtactacgacatgagcaacttcccccagtgcgaggccaagagacagctggacagaatcatcgccaagctgcagagcaaggagtacagccagtactag

SEQ ID NO: 117220 - DNA, 2355 bp, Artificial Sequence
  derived and/or modified sequence
atgagcaagagacacagactggacctgggcgaggactaccccagcggcaagaagagagccggcaccgacggcaaggacagagacagagacagagagagagacagaggcgacagagagagagagagagagaaggagaaggagaaggagctgagagccagcaccaacgccatgctgatcagcgccggcctgccccccctgaaggccagccacagcgcccacagcacccacagcgcccacagcacccacagcacccacagcgcccacagcacccacgccggccacgccggccacaccagcctgccccagtgcatcaaccccttcaccaacctgccccacacccccagatactacgacatcctgaagaagagactgcagctgcccgtgtgggagtacaaggacagattcaccgacatcctggtgagacaccagagcttcgtgctggtgggcgagaccggcagcggcaagaccacccagatcccccagtggtgcgtggagtacatgagaagcctgcccggccccaagagaggcgtggcctgcacccagcccagaagagtggccgccatgagcgtggcccagagagtggccgacgagatggacgtgatgctgggccaggaggtgggctacagcatcagattcgaggactgcagcagcgccaagaccatcctgaagtacatgaccgacggcatgctgctgagagaggccatgaacgaccccctgctggagagatacggcgtgatcatcctggacgaggcccacgagagaaccctggccaccgacatcctgatgggcgtgctgaaggaggtggtgagacagagaagcgacctgaaggtgatcgtgatgagcgccaccctggacgccggcaagttccagatctacttcgacaactgccccctgctgaccatccccggcagaacccaccccgtggagatcttctacacccccgagcccgagagagactacctggaggccgccatcagaaccgtgatccagatccacatgtgcgaggaggaggagggcgacctgctgctgttcctgaccggccaggaggagatcgacgaggcctgcaagagaatcaagagagaggtggacgacctgggccccgaggtgggcgacatcaagatcatccccctgtacagcaccctgcccccccagcagcagcagagaatcttcgagccccccccccccaagaagcagaacggcgccatcggcagaaaggtggtggtgagcaccaacatcgccgagaccagcctgaccatcgacggcgtggtgttcgtgatcgaccccggcttcgccaagcagaaggtgtacaaccccagaatcagagtggagagcctgctggtgaccgccatcagcaaggccagcgcccagcagagagccggcagagccggcagaaccagacccggcaagtgcttcagactgtacaccgagaaggcctacaagaccgagatgcaggacaacacctaccccgagatcctgagaagcaacctgggcagcgtggtgctgcagctgaagaagctgggcatcgacgacctggtgcacttcgacttcatggacccccccgcccccgagaccctgatgagagccctggagctgctgaactacctggccgccctgaacgacgacggcgacctgaccgagctgggcagcatgatggccgagttccccctggacccccagctggccaagatggtgatcgccagctgcgactacaactgcagcaacgaggtgctgagcatcaccgccatgctgagcgtgccccagtgcttcgtgagacccaccgaggccaagaaggccgccgacgaggccaagatgagattcgcccacatcgacggcgaccacctgaccctgctgaacgtgtaccacgccttcaagcagaaccacgagagcgtgcagtggtgctacgacaacttcatcaactacagaagcctgatgagcgccgacaacgtgagacagcagctgagcagaatcatggacagattcaacctgcccagaagaagcaccgacttcaccagcagagactactacatcaacatcagaaaggccctggtgaccggctacttcatgcaggtggcccacctggagagaaccggccactacctgaccgtgaaggacaaccaggtggtgcagctgcaccccagcaccgtgctggaccacaagcccgagtgggtgctgtacaacgagttcgtgctgaccaccaagaactacatcagaacctgcaccgacatcaagcccgagtggctggtgaagatcgccccccagtactacgacatgagcaacttcccccagtgcgaggccaagagacagctggacagaatcatcgccaagctgcagagcaaggagtacagccagtactag

SEQ ID NO: 117221 - DNA, 2994 bp, Artificial Sequence
  derived and/or modified sequence
tcgccgccgccattttagctgttggttccggccgcaccgtgtgggctgtagtagcgggaggggtgggggtcctccagagttaagtggctgtcctcgactgtgcccatacagcagccagctttcttccttaataactgcccgttcgaagagtgcgaggatgtccaagcggcaccggttggacctaggggaggattacccctctggcaagaagcgtgcggggaccgatgggaaggatcgagatcgagaccgggatcgtgaagatcggtctaaagatcgagaccgagaacgtgatagaggagatagagagcgagagagggagaaagaaaaggagaaggagttgcgagcttcaacaaatgctatgcttatcagtgctggattaccacctttgaaagcttcccattcagctcactcaacccactcagcacattcaacgcattcaacacattctgctcattcaacgcatgccggacatgcaggtcacacgtcacttccacagtgcattaatccgttcaccaacttaccccatactcctcgatactatgatattctaaagaaacgtcttcagctccctgtttgggaatacaaggataggtttacagatattctggttagacatcagtcctttgtactggttggtgagactgggtctggtaaaacaacacagattccacagtggtgtgtggagtacatgcgatcattaccaggacccaagagaggagttgcctgtacccaacccaggagagtggctgcaatgagtgtggctcagagagttgctgatgagatggatgtgatgttgggccaggaagttggttactccattcgatttgaagactgcagtagtgcaaaaaccattcttaagtatatgactgatgggatgttacttcgtgaagctatgaatgatcccctcctggagcgttatggtgtaataattcttgatgaggctcatgagaggacactggctacagatattctaatgggtgttctgaaggaagttgtaagacagagatcagatttaaaggttatagttatgagcgctactctagatgcaggaaaattccagatttactttgataactgtcctctcctaactattcctgggcgtacacatcctgttgagatcttctatactccagaaccagagagagattatcttgaagcagcaattcgaacagttatccagattcatatgtgtgaagaggaagagggagatcttcttcttttcttaactggtcaagaggaaattgatgaagcctgtaagagaataaagcgtgaagttgatgatttgggccctgaagttggtgacattaaaatcattccattgtattctacacttccacctcagcagcagcaacgcatttttgagcctccacctcccaaaaaacagaatggagcaattggaagaaaggtagttgtgtcaactaacatagcagagacgtctttgacaatagatggtgtggtgtttgtgattgatcctggatttgcgaaacagaaggtctacaatcctcgaatcagagttgagtcccttttggtgacagctattagtaaagcttcagctcagcaaagggctggtcgagctggacgtaccagacctggaaaatgcttcagactttacacagagaaagcttataaaacagaaatgcaggataacacctatcctgagattttgcgttctaatttaggatcagttgtgttacaattgaagaaacttggtattgatgacttggtacattttgattttatggatccaccagctcctgaaactctgatgagagccctggaacttttgaattacctggctgctttaaatgatgatggagatctgactgaattgggatccatgatggcagagtttcctctagatccacagctcgcaaaaatggttattgcaagttgtgactacaactgttctaatgaggtcctatctattactgctatgttgtcagtcccacagtgttttgttcgccccacggaggccaagaaagccgcagatgaggccaagatgagatttgcccacatagatggagatcatctgacactgctgaacgtctaccatgcttttaaacaaaatcatgaatcggttcagtggtgttatgacaacttcattaactacaggtccctgatgtccgcagacaatgtacgccagcagctatctcgaattatggacagatttaatttgcctcgtcgaagtactgactttacaagcagggactattatattaatataagaaaagctttggttactgggtattttatgcaggtggcacatttagaacgaacagggcattacttaactgtgaaagataaccaggtggttcagttgcatccctctactgttcttgaccacaaacctgaatgggtgctttataatgagtttgttctaacaacaaagaattacatccggacatgtacagatatcaagccagaatggttggtgaaaattgcccctcaatattatgacatgagcaatttcccacagtgtgaagcaaagagacagttggaccgcatcattgccaaacttcaatccaaggaatattcacagtactgaattcagtgcttagaactgaagttattgagaggacagctttaaaagatgaatgaactcaaaagttcgagttgtgctcttcacgttggttcgataatggcctttatttgaaagctttttaatttttctttacagtaaatattccattctgatttcataaattaaacatttatgcctcccttttgtgttgacactgtagctcatactggaaaagtcgatcaatgttttgcagtttattgaaagtagttctatatataacaatgttataagcatttctttagaaatggttgaaaatgcttctaaaatgtgattatcgaccatggtatgcatgatcgttgtaattgttgacattccttttagaagttgtgaaatgttacaacttgtgcttatgtagacacaatcttctgtctcagtacagaggcactgacttcaataaagtctatttatactaa

SEQ ID NO: 117222 - DNA, 2556 bp, Artificial Sequence
  derived and/or modified sequence
agctgttggttccggccgcaccgtgtgggctgtagtagcgggaggggtgggggtcctccagagttaagtggctgtcctcgactgtgcccatacagcagccagctttcttccttaataactgcccgttcgaagagtgcgaggatgtccaagcggcaccggttggacctaggggaggattacccctctggcaagaagcgtgcggggaccgatgggaaggatcgagatcgagaccgagaacgtgatagaggagatagagagcgagagagggagaaagaaaaggagaaggagttgcgagcttcaacaaatgctatgcttatcagtgctggattaccacctttgaaagcttcccattcagctcactcaacccactcagcacattcaacgcattcaacacattctgctcattcaacgcatgccggacatgcaggtcacacgtcacttccacagtgcattaatccgttcaccaacttaccccatactcctcgatactatgatattctaaagaaacgtcttcagctccctgtttgggaatacaaggataggtttacagatattctggttagacatcagtcctttgtactggttggtgagactgggtctggtaaaacaacacagattccacagtggtgtgtggagtacatgcgatcattaccaggacccaagagaggagttgcctgtacccaacccaggagagtggctgcaatgagtgtggctcagagagttgctgatgagatggatgtgatgttgggccaggaagttggttactccattcgatttgaagactgcagtagtgcaaaaaccattcttaagtatatgactgatgggatgttacttcgtgaagctatgaatgatcccctcctggagcgttatggtgtaataattcttgatgaggctcatgagaggacactggctacagatattctaatgggtgttctgaaggaagttgtaagacagagatcagatttaaaggttatagttatgagcgctactctagatgcaggaaaattccagatttactttgataactgtcctctcctaactattcctgggcgtacacatcctgttgagatcttctatactccagaaccagagagagattatcttgaagcagcaattcgaacagttatccagattcatatgtgtgaagaggaagagggagatcttcttcttttcttaactggtcaagaggaaattgatgaagcctgtaagagaataaagcgtgaagttgatgatttgggccctgaagttggtgacattaaaatcattccattgtattctacacttccacctcagcagcagcaacgcatttttgagcctccacctcccaaaaaacagaatggagcaattggaagaaaggtagttgtgtcaactaacatagcagagacgtctttgacaatagatggtgtggtgtttgtgattgatcctggatttgcgaaacagaaggtctacaatcctcgaatcagagttgagtcccttttggtgacagctattagtaaagcttcagctcagcaaagggctggtcgagctggacgtaccagacctggaaaatgcttcagactttacacagagaaagcttataaaacagaaatgcaggataacacctatcctgagattttgcgttctaatttaggatcagttgtgttacaattgaagaaacttggtattgatgacttggtacattttgattttatggatccaccagctcctgaaactctgatgagagccctggaacttttgaattacctggctgctttaaatgatgatggagatctgactgaattgggatccatgatggcagagtttcctctagatccacagctcgcaaaaatggttattgcaagttgtgactacaactgttctaatgaggtcctatctattactgctatgttgtcagtcccacagtgttttgttcgccccacggaggccaagaaagccgcagatgaggccaagatgagatttgcccacatagatggagatcatctgacactgctgaacgtctaccatgcttttaaacaaaatcatgaatcggttcagtggtgttatgacaacttcattaactacaggtccctgatgtccgcagacaatgtacgccagcagctatctcgaattatggacagatttaatttgcctcgtcgaagtactgactttacaagcagggactattatattaatataagaaaagctttggttactgggtattttatgcaggtggcacatttagaacgaacagggcattacttaactgtgaaagataaccaggtggttcagttgcatccctctactgttcttgaccacaaacctgaatgggtgctttataatgagtttgttctaacaacaaagaattacatccggacatgtacagatatcaagccagaatggttggtgaaaattgcccctcaatattatgacatgagcaatttcccacagtgtgaagcaaagagacagttggaccgcatcattgccaaacttcaatccaaggaatattcacagtactgaattcagtgcttagaactgaagttattgagaggacagctttaaaagatgaatgaactcaaa

SEQ ID NO: 117223 - protein, 335 aa, Artificial Sequence
  derived and/or modified sequence
MKLPARVFFTLGSRLPCGLAPRRFFSYGTKILYQNTEALQSKFFSPLQKAMLPPNSFQGKVAFITGGGTGLGKGMTTLLSSLGAQCVIASRKMDVLKATAEQISSQTGNKVHAIQCDVRDPDMVQNTVSELIKVAGHPNIVINNAAGNFISPTERLSPNAWKTITDIVLNGTAFVTLEIGKQLIKAQKGAAFLSITTIYAETGSGFVVPSASAKAGVEAMSKSLAAEWGKYGMRFNVIQPGPIKTKGAFSRLDPTGTFEKEMIGRIPCGRLGTVEELANLAAFLCSDYASWINGAVIKFDGGEEVLISGEFNDLRKVTKEQWDTIEELIRKTKGS

SEQ ID NO: 117224 - DNA, 1008 bp, Artificial Sequence
  derived and/or modified sequence
atgaagctgcccgccagagtgttcttcaccctgggcagcagactgccctgcggcctggcccccagaagattcttcagctacggcaccaagatcctgtaccagaacaccgaggccctgcagagcaagttcttcagccccctgcagaaggccatgctgccccccaacagcttccagggcaaggtggccttcatcaccggcggcggcaccggcctgggcaagggcatgaccaccctgctgagcagcctgggcgcccagtgcgtgatcgccagcagaaagatggacgtgctgaaggccaccgccgagcagatcagcagccagaccggcaacaaggtgcacgccatccagtgcgacgtgagagaccccgacatggtgcagaacaccgtgagcgagctgatcaaggtggccggccaccccaacatcgtgatcaacaacgccgccggcaacttcatcagccccaccgagagactgagccccaacgcctggaagaccatcaccgacatcgtgctgaacggcaccgccttcgtgaccctggagatcggcaagcagctgatcaaggcccagaagggcgccgccttcctgagcatcaccaccatctacgccgagaccggcagcggcttcgtggtgcccagcgccagcgccaaggccggcgtggaggccatgagcaagagcctggccgccgagtggggcaagtacggcatgagattcaacgtgatccagcccggccccatcaagaccaagggcgccttcagcagactggaccccaccggcaccttcgagaaggagatgatcggcagaatcccctgcggcagactgggcaccgtggaggagctggccaacctggccgccttcctgtgcagcgactacgccagctggatcaacggcgccgtgatcaagttcgacggcggcgaggaggtgctgatcagcggcgagttcaacgacctgagaaaggtgaccaaggagcagtgggacaccatcgaggagctgatcagaaagaccaagggcagctag

SEQ ID NO: 117225 - DNA, 1008 bp, Artificial Sequence
  derived and/or modified sequence
atgaagttaccagcccgggtgtttttcactttaggtagcagactcccgtgcggccttgctccacgaaggttcttctcatatggaacgaagatcctatatcagaataccgaggccctgcaatccaagtttttttccccccttcagaaggcaatgcttccaccgaactcatttcaaggaaaggtggcgttcataactggcggcggtacagggctgggaaagggcatgaccactctgctatcgagcctgggcgctcagtgcgtcatagccagtcgtaagatggatgtcctaaaggccaccgctgagcaaatctcgtcgcagaccggcaacaaggtacatgccattcagtgcgatgttagggatcctgacatggttcagaacacagtttccgagcttatcaaggttgctggacacccgaacatcgttattaacaatgcagccgggaatttcattagcccaaccgagcggctctctccaaacgcttggaaaacaatcacggacatagtgctgaacggaaccgccttcgtgactttagaaatcggaaagcagcttattaaggctcaaaagggcgcggccttcctttcaataacaaccatatacgcggagacaggatccggcttcgtggtgccttccgcttcagccaaggctggagtggaggccatgtcaaaaagtctcgccgccgaatgggggaaatatggcatgcgctttaacgtaatacagcccggtcctattaagacaaaaggcgcattttcccgcctggaccccacaggcacctttgaaaaggagatgatcgggagaatcccctgtggtagactgggcaccgtggaagagctagcaaatttggccgctttcctctgctccgactatgcttcctggattaacggagctgtgatcaaatttgatgggggtgaggaggtcctgatcagtggcgaattcaatgaccttagaaaagttaccaaagaacagtgggacactattgaggagctgatacgaaagacaaaagggtcctag

SEQ ID NO: 117226 - DNA, 1008 bp, Artificial Sequence
  derived and/or modified sequence
atgaagctgcctgcccgggtcttcttcaccctgggcagccggctgccctgtggcctggccccccggcgcttcttctcctatggcaccaagatcctgtaccagaacacagaggccctgcagagcaagttcttcagccccctgcagaaggccatgctgccccccaacagcttccagggcaaggtggccttcatcactggaggcggcaccggcctgggcaagggcatgaccaccctgctgagcagcctgggcgcccagtgtgtgattgccagcaggaagatggatgtgctgaaggccacagctgagcagatcagcagccagacaggcaacaaggtgcacgccatccagtgtgatgtgcgggaccctgacatggtgcagaacacagtgtctgagctgatcaaggtggccggccaccccaacatcgtcatcaacaatgctgctggcaacttcatcagccccacagagcggctgagccccaatgcctggaagaccatcacagacatcgtgctgaatggaacagcctttgtgaccctggagatcggcaagcagctgatcaaggcccagaagggggccgccttcctgagcatcaccaccatctatgcagagaccggcagcggctttgtggtgcccagcgccagcgccaaggccggcgtggaggccatgagcaagagcctggccgctgagtggggcaagtatggcatgaggttcaacgtcatccagcccggccccatcaagaccaagggggccttcagccggctggaccccaccggcacctttgagaaggagatgattggccgcatcccctgtggccgcctgggcaccgtggaggagctggccaacctggccgccttcctgtgcagcgactatgcctcctggatcaatggagctgtgatcaagtttgatggaggagaggaggtgctgatcagcggggagttcaatgacctgaggaaggtgaccaaggagcagtgggacaccatcgaggagctgatcaggaagaccaagggcagctag

SEQ ID NO: 117227 - DNA, 1008 bp, Artificial Sequence
  derived and/or modified sequence
atgaagctgcccgcccgggtgttcttcaccctgggcagccggctgccgtgcgggctggcacctagaaggtttttttcttacgggacgaaaatcctgtaccaaaacaccgaagccctgcaatctaagttcttctcccctctccagaaggccatgctgccaccgaactcttttcagggcaaagtggcattcatcactggaggcgggactggccttggcaagggcatgaccactctgctctcttctctgggggctcagtgtgtgatcgcctcacgcaaaatggatgttctaaaggccaccgctgaacaaatttcatcccaaacaggaaacaaggtgcatgctatccagtgcgatgtgcgcgaccccgatatggtgcagaacaccgtgagcgagctgatcaaagtggctggacatccaaacattgtcatcaacaacgctgccggtaatttcatcagtcctaccgagcgtctgtctcctaatgcttggaaaaccattacggatattgtgttgaatggcaccgcctttgtaactcttgagattggcaagcagctcattaaggctcagaaaggtgctgctttcctgtcgatcacgactatctacgccgagaccgggagtggctttgttgtgccttctgcatccgctaaggcaggggtcgaggccatgtccaagagtctggccgccgagtggggcaaatacggcatgcgattcaatgtcattcagccgggaccgattaaaaccaagggggcgttctcccgcttggatcctacgggaacattcgaaaaggagatgattggcaggattccctgtgggcgcctcgggacagtggaagagttagctaacctggctgccttcctctgctccgactatgcatcttggataaacggagcggtgatcaaattcgatggaggggaggaagttctgatctctggggaatttaatgacttgagaaaagtgactaaagaacaatgggacacgattgaggaattgatccgtaagaccaaaggcagttag

SEQ ID NO: 117228 - DNA, 1008 bp, Artificial Sequence
  derived and/or modified sequence
atgaagctgccagcacgagtcttcttcacactcggcagcaggctaccttgtggtttggctcccagacgatttttcagctacgggactaagattctgtaccaaaataccgaggctctgcagagcaaattttttagccctttgcagaaggcgatgttacctcccaattcgtttcaagggaaggttgcgtttatcactggaggagggactggacttggaaaaggcatgaccactttattatcttcattaggcgcacagtgcgtgatcgcgagcaggaaaatggatgttttaaaggccactgctgaacaaatttccagtcagaccgggaataaggtgcacgctattcagtgcgacgttagggacccagacatggtgcagaatacggtgagcgaactgataaaagttgcaggccaccccaacatcgtcatcaataatgcagccggaaattttatttctcctacagagcggctgagcccaaatgcgtggaagacaatcactgacatcgtgctgaacggcactgccttcgtgacccttgagatagggaaacagctcatcaaagcccagaagggcgctgctttcttgtcaattaccacaatttatgccgagactggttccggcttcgtagtaccatccgcctctgcaaaagcgggagtcgaggcaatgtctaagtccctagcggcagaatggggcaagtacggaatgagatttaatgtaatccagcctgggccaatcaaaactaaaggcgcttttagccggttggatcctactggcacgtttgaaaaagagatgattggtaggatcccctgcgggagactaggtactgttgaggagctggccaacctcgccgcttttctgtgctctgactacgcttcttggatcaatggcgctgtgatcaagtttgacgggggagaagaagttttgatctcaggagagttcaatgatctgcggaaagttacaaaggagcagtgggatactattgaggagttgatcaggaagactaaaggcagctag

SEQ ID NO: 117229 - DNA, 1207 bp, Artificial Sequence
  derived and/or modified sequence
tccagccccgagaactttgttctttttgtcccgccccctgcgcccaaccgcctgcgccgccttccggcccgagttctggagactcaacatgaagctaccggccagggttttctttactctggggtcccggctgccctgtggcctcgctcctcggaggtttttcagttatgggacaaaaatattatatcaaaacactgaagctttgcaatctaaattcttttcacctcttcaaaaagcgatgctaccacctaatagttttcaaggaaaagtggcattcattactgggggaggtactggccttggtaaaggaatgacaactcttctgtccagcctaggtgctcagtgcgtgatagccagccggaagatggatgttttgaaagctaccgcagaacaaatttcttctcaaactggaaataaggttcatgcaattcagtgtgatgtgagggatcctgatatggttcaaaacactgtgtcagaactgatcaaagttgcaggacatcctaatattgtgataaacaatgcagcagggaattttatttctcctactgaaagactttctcctaatgcttggaaaaccataactgacatagttctaaatggcacagccttcgtgacactagaaattggaaaacaactaattaaagcacagaaaggagcagcatttctttctattactactatctatgctgagactggttcaggttttgtagtaccaagtgcttctgccaaagcaggtgtggaagccatgagcaagtctcttgcagctgaatggggtaaatatggaatgcgattcaatgtgattcaaccagggcctataaaaaccaaaggtgcctttagccgtctggacccaactggaacatttgagaaagaaatgattggcagaattccctgtggtcgcctggggactgtagaagaactcgcaaatcttgctgctttcctttgtagtgattatgcttcttggattaatggagcagtcattaaatttgacggtggagaggaagtacttatttcaggggaattcaacgacctgagaaaggtcaccaaggagcagtgggacaccatagaagaactcatcaggaagacaaaaggttcctaagaccactttggccttcatcttggttacagaaaagggaatagaaatgaaacaaattatctctcatcttttgactatttcaagtctaataaattcttaattaacaaacattca

SEQ ID NO: 117230 - protein, 395 aa, Artificial Sequence
  derived and/or modified sequence
MAWRHLKKRAQDAVIILGGGGLLFASYLMATGDERFYAEHLMPTLQGLLDPESAHRLAVRFTSLGLLPRARFQDSDMLEVRVLGHKFRNPVGIAAGFDKHGEAVDGLYKMGFGFVEIGSVTPKPQEGNPRPRVFRLPEDQAVINRYGFNSHGLSVVEHRLRARQQKQAKLTEDGLPLGVNLGKNKTSVDAAEDYAEGVRVLGPLADYLVVNVSSPNTAGLRSLQGKAELRRLLTKVLQERDGLRRVHRPAVLVKIAPDLTSQDKEDIASVVKELGIDGLIVTNTTVSRPAGLQGALRSETGGLSGKPLRDLSTQTIREMYALTQGRVPIIGVGGVSSGQDALEKIRAGASLVQLYTALTFWGPPVVGKVKRELEALLKEQGFGGVTDAIGADHRR

SEQ ID NO: 117231 - DNA, 1188 bp, Artificial Sequence
  derived and/or modified sequence
atggcctggagacaccttaagaaacgggcccaggatgctgttatcatactgggaggaggcggactgctgttcgcaagctacctgatggccaccggtgatgagcgcttctacgccgaacatcttatgcccacactgcaaggccttttagacccggagagtgcccacaggctcgcagtccgtttcactagcctcggactgcttcccagggcccgcttccaagacagcgacatgctggaagttcgggttctgggccataaattcaggaatcctgtaggcatagctgctggctttgacaaacacggcgaggcagtggatggtctgtataaaatgggattcggattcgtcgagatcggttctgtcacccccaagccccaggagggcaatccccgcccaagagtctttcggctccctgaggatcaagcagtcatcaatagatatggcttcaattcacatggcctgagcgtggtggaacatcggctgcgcgctcgccagcagaaacaggccaagttgacagaggatggcctgcctctcggcgtgaatttgggaaagaataagacctcagtggacgcggcagaagattacgccgagggcgtacgggtattggggccactggctgactatctcgtcgtgaacgtgtcttcacccaacacagccgggctcaggtccctgcaaggaaaggctgagctccggcgactgctgaccaaggtgctgcaggaaagagacggcctccgaagggtgcacaggccagccgtactcgtaaaaattgctcccgacctgacctcccaagataaggaagatattgcttctgtcgtaaaggaacttggaattgacggcttgattgttacgaatactacagtctcccggccagcaggacttcagggtgctctgcgcagtgagacgggaggcttatccggcaagcctttaagggacctgtccacccagaccatcagagagatgtacgccctgacacagggtagagtgcctattattggcgtggggggggtttcctccggccaggatgctctcgagaaaatcagggccggcgcctccctcgtgcagctctacactgccttaactttctgggggccccccgtggttggaaaggttaaacgcgaactggaggccctactcaaggagcaggggttcggcggcgtgaccgacgctatcggggctgaccacaggaggtag

SEQ ID NO: 117232 - DNA, 1188 bp, Artificial Sequence
  derived and/or modified sequence
atggcctggaggcacctgaagaagagggcccaggatgctgtgatcatcctgggcggcggcggcctgctgtttgccagctacctgatggccactggagatgagcgcttctacgccgagcacctgatgcccaccctgcagggcctgctggaccctgagagcgcccaccggctggccgtgcgcttcaccagcctgggcctgctgccccgggcccgcttccaggacagcgacatgctggaggtgcgggtgctgggccacaagttcaggaaccctgtgggcattgctgctggctttgacaagcacggggaggccgtggatggcctgtacaagatgggcttcggctttgtggagatcggctctgtgacccccaagccccaggagggcaacccccggcccagggtcttccggctgcctgaggaccaggccgtcatcaacagatatggcttcaacagccacggcctgtctgtggtggagcaccggctgcgggcccggcagcagaagcaggccaagctgacagaagatggcctgcccctgggcgtgaacctgggcaagaacaagacctctgtggatgctgctgaggactatgcagagggcgtgcgggtgctgggccccctggccgactacctggtggtgaatgtgagcagccccaacacagctggcctgcggagcctgcagggcaaggccgagctgcggcggctgctgaccaaggtgctgcaggagagagatggcctgcggcgggtgcacaggcctgctgtgctggtgaagatcgccccagacctgaccagccaggacaaggaggacatcgcctctgtggtgaaggagctgggcattgatggcctcatcgtgaccaacaccaccgtgtccaggcctgctggcctgcagggcgccctgcggtctgagaccggcggcctgagcggcaagcccctgcgggacctgagcacccagaccatccgggagatgtatgccctgacccagggccgggtgcccatcatcggcgtgggcggcgtgagcagcggccaggatgccctggagaagatccgggccggggccagcctggtgcagctgtacacagccctgaccttctggggcccccctgtggtgggcaaggtgaagcgggagctggaggccctgctgaaggagcagggctttggaggagtgacagatgccatcggggctgaccacagaagatag

SEQ ID NO: 117233 - DNA, 1188 bp, Artificial Sequence
  derived and/or modified sequence
atggcctggcggcacctgaagaagcgggcccaggacgccgtgatcatccttgggggtggtggactgctattcgcatcatacctgatggcaactggcgatgagcgcttctacgctgagcacttgatgccgacgctacagggtctcttggatcctgaatccgcacaccggctcgcagtacgttttacgagtcttggactactgccccgggccaggttccaagactcggatatgctggaggtgagagtgctaggccacaagtttaggaatccagtgggtatcgctgctgggttcgacaaacatggagaggcagtggacggactgtataagatgggctttggatttgtggaaatcgggtctgtgacgccgaagccacaagaaggcaacccgcgacctagagtgtttcggcttcctgaggaccaggctgtcataaatagatatgggtttaatagccacggactgagtgtggtggaacatagacttcgagcccggcagcagaaacaggctaaattgacagaggatggactgcctctgggagtcaacttgggtaaaaacaagaccagcgtggatgcagccgaggattacgcagaaggggtgcgtgtcctgggccctcttgctgactatctggtggtcaatgtatctagtcctaacactgccggtctgcggtcactgcaggggaaggcggagcttcgccgtctcctgactaaagtacttcaggaaagggatggccttaggcgcgtgcataggcctgccgttctggtgaagattgcaccagacctgacaagtcaggacaaagaggacatcgcttccgtggtgaaggagctgggcatcgacggactaatcgtgacgaacactactgtctcacgccctgcgggtttgcagggggctctgagaagcgaaactggcggattaagcggaaagccattgagagatctttcaacccagacaatccgggagatgtatgctctaacccaggggagagtcccaattatcggcgtgggcggtgtatcatcagggcaagatgctctggagaagatccgcgccggcgctagcctcgtgcagctgtataccgcactaacattttggggtccccctgtggtcggcaaggtcaagagagaacttgaggccttactgaaggaacagggctttggaggtgtgacagacgccatcggcgcggatcaccgcaggtag

SEQ ID NO: 117234 - DNA, 1188 bp, Artificial Sequence
  derived and/or modified sequence
atggcctggcgccatctgaagaaaagagcccaggatgccgttattattcttggaggcggaggcctccttttcgcttcttatctgatggcgaccggtgatgaaagattttatgctgagcaccttatgccgacattgcaggggctgcttgatcccgaatctgctcacagactggccgttcgcttcacctcgctaggcctgctgccccgtgcacggttccaggacagtgatatgctggaggtgcgagtgctcggccacaaatttcgcaacccggtggggattgctgctggcttcgacaaacacggcgaagcagtggacggcctttacaagatggggttcggctttgtggagatcgggagcgtcacccccaagccacaggagggaaatcccagaccccgtgtgtttcggttaccagaagaccaggctgtcatcaataggtatggctttaacagccacggactgtccgtggttgaacaccgcctgagagctcggcagcaaaagcaggccaaactcactgaagacgggttgcctttaggcgtaaatctcggaaaaaataagacaagtgtagacgccgcagaggattacgccgagggagtcagagttctggggccactcgccgattacctggttgtaaacgtgtcatcaccaaacacggcaggcctacggtccctgcagggtaaagcagagctgcggagactgctgaccaaggttcttcaggagcgcgacggactgcgccgagtgcacagacccgctgtgctggtcaagattgcacctgacctgacctcgcaggacaaagaagacatcgcgagcgtcgttaaggagcttggcatagatggactgattgttacgaatactacagtttctcggccagcagggctccaaggggcactacgtagcgaaaccggcggtttgagtgggaagcccctgcgcgatttaagcacccagacgattcgcgaaatgtatgcactgacgcaagggcgtgtgcccatcatcggtgtaggcggtgtcagcagtgggcaagacgctttggagaagatccgggctggcgcaagcctcgttcagctgtatactgccctgacgttttggggtccccctgtcgtaggcaaggtgaaaagggagttagaagcactcctgaaggagcagggcttcggcggagtgacggacgcaatcggcgcagaccatcggaggtag

SEQ ID NO: 117235 - DNA, 1188 bp, Artificial Sequence
  derived and/or modified sequence
atggcctggagacacctgaagaagagagcccaggacgccgtgatcatcctgggcggcggcggcctgctgttcgccagctacctgatggccaccggcgacgagagattctacgccgagcacctgatgcccaccctgcagggcctgctggaccccgagagcgcccacagactggccgtgagattcaccagcctgggcctgctgcccagagccagattccaggacagcgacatgctggaggtgagagtgctgggccacaagttcagaaaccccgtgggcatcgccgccggcttcgacaagcacggcgaggccgtggacggcctgtacaagatgggcttcggcttcgtggagatcggcagcgtgacccccaagccccaggagggcaaccccagacccagagtgttcagactgcccgaggaccaggccgtgatcaacagatacggcttcaacagccacggcctgagcgtggtggagcacagactgagagccagacagcagaagcaggccaagctgaccgaggacggcctgcccctgggcgtgaacctgggcaagaacaagaccagcgtggacgccgccgaggactacgccgagggcgtgagagtgctgggccccctggccgactacctggtggtgaacgtgagcagccccaacaccgccggcctgagaagcctgcagggcaaggccgagctgagaagactgctgaccaaggtgctgcaggagagagacggcctgagaagagtgcacagacccgccgtgctggtgaagatcgcccccgacctgaccagccaggacaaggaggacatcgccagcgtggtgaaggagctgggcatcgacggcctgatcgtgaccaacaccaccgtgagcagacccgccggcctgcagggcgccctgagaagcgagaccggcggcctgagcggcaagcccctgagagacctgagcacccagaccatcagagagatgtacgccctgacccagggcagagtgcccatcatcggcgtgggcggcgtgagcagcggccaggacgccctggagaagatcagagccggcgccagcctggtgcagctgtacaccgccctgaccttctggggcccccccgtggtgggcaaggtgaagagagagctggaggccctgctgaaggagcagggcttcggcggcgtgaccgacgccatcggcgccgaccacagaagatag

SEQ ID NO: 117236 - DNA, 2065 bp, Artificial Sequence
  derived and/or modified sequence
gggcttaatgacggaaggagcatggcgtggagacacctgaaaaagcgggcccaggatgctgtgatcatcctggggggaggaggacttctcttcgcctcctacctgatggccacgggagatgagcgtttctatgctgaacacctgatgccgactctgcaggggctgctggacccggagtcagcccacagactggctgttcgcttcacctccctggggctccttccacgggccagatttcaagactctgacatgctggaagtgagagttctgggccataaattccgaaatccagtaggaattgctgcaggatttgacaagcatggggaagccgtggacggactttataagatgggctttggttttgttgagataggaagtgtgactccaaaacctcaggaaggaaaccctagacccagagtcttccgcctccctgaggaccaagctgtcattaacaggtatggatttaacagtcacgggctttcagtggtggaacacaggttacgggccagacagcagaagcaggccaagctcacagaagatggactgcctctgggggtcaacttggggaagaacaagacctcagtggacgccgcggaggactacgcagaaggggtgcgcgtactgggccccctggccgactacctggtggtgaatgtgtccagccccaacactgccgggctgcggagccttcagggaaaggccgagctgcgccgcctgctgaccaaggtgctgcaggagagggatggcttgcggagagtgcacaggccggcagtcctggtgaagatcgctcctgacctcaccagccaggataaggaggacattgccagtgtggtcaaagagttgggcatcgatgggctgattgttacgaacaccaccgtgagtcgccctgcgggcctccagggtgccctgcgctctgaaacaggagggctgagtgggaagcccctccgggatttatcaactcaaaccattcgggagatgtatgcactcacccaaggccgagttcccataattggggttggtggtgtgagcagcgggcaggacgcgctggagaagatccgggcaggggcctccctggtgcagctgtacacggccctcaccttctgggggccacccgttgtgggcaaagtcaagcgggaactggaggcccttctgaaagagcagggctttggcggagtcacagatgccattggagcagatcatcggaggtgaggacagcgtctgacgggaagcctgatctggaaccttcccaaggactcaggcaagcctttgtggctggatcatgagaggagggactccatcttgagccatgtcccccagccatggcatggctgcactgtaaacgccaatcggggggtcaccaggatcaaccgcaggctttcttcagtcccttggtcagaccataaactgcatttttgattctttgtggattcaaaccctaggatccatcagtcttgcaaggacattgaatattaggaggaaaaagtcatggaaaaaataaagccatttagaacctgggtttcaacgctagccctttctggtttgccataggccctgccaagatactgcaggtccatccaggcctctgctatctgcatctgcagtgggcttcccaggaacttgactgtctttcatttgatctttatttttgtttatttaatattttaaactttattttaaaaatatttcaaacataagggcggggtgtggtggctcatgcctgtaatcccagcactttgggaggccgaggcgggcggatcacctgaggccaggagttggagaccagccaggccaccatggtgaaaccctgtctctaccaaaaatacaaaaaattagccagatattgtggcaggcacttttaatcccagctactcgggaggctgaggcaggagaattgcttgaacctgggaggcggaggttgcagtgagccaagattgcaccagtgcactccagcttgggcgacagatcaagactctgtcacacacaaaacaaacaaacaaattttcccgtttctctctgtccctttctctataacatggataaaatattcacgtcttatgtatttatt

SEQ ID NO: 117237 - protein, 278 aa, Artificial Sequence
  derived and/or modified sequence
MLRSLLLHSLRLCAQTASCLVLFPRFLGTAFMLWLLDFLCIRKHFLGRRRRGQPEPEVELNSEGEEVPPDDPPICVSDDNRLCTLASLKAVWHGQKLDFFKQAHEGGPAPNSEVVLPDGFQSQHILDYAQGNRPLVLNFGSCTCPPFMARMSAFQRLVTKYQRDVDFLIIYIEEAHPSDGWVTTDSPYIIPQHRSLEDRVSAARVLQQGAPGCALVLDTMANSSSSAYGAYFERLYVIQSGTIMYQGGRGPDGYQVSELRTWLERYDEQLHGARPRRV

SEQ ID NO: 117238 - protein, 304 aa, Artificial Sequence
  derived and/or modified sequence
MPRQATSRLVVGEGEGSQGASGPAATMLRSLLLHSLRLCAQTASCLVLFPRFLGTAFMLWLLDFLCIRKHFLGRRRRGQPEPEVELNSEGEEVPPDDPPICVSDDNRLCTLASLKAVWHGQKLDFFKQAHEGGPAPNSEVVLPDGFQSQHILDYAQGNRPLVLNFGSCTCPPFMARMSAFQRLVTKYQRDVDFLIIYIEEAHPSDGWVTTDSPYIIPQHRSLEDRVSAARVLQQGAPGCALVLDTMANSSSSAYGAYFERLYVIQSGTIMYQGGRGPDGYQVSELRTWLERYDEQLHGARPRRV

SEQ ID NO: 117239 - DNA, 837 bp, Artificial Sequence
  derived and/or modified sequence
atgctgagaagcctgctgctgcacagcctgagactgtgcgcccagaccgccagctgcctggtgctgttccccagattcctgggcaccgccttcatgctgtggctgctggacttcctgtgcatcagaaagcacttcctgggcagaagaagaagaggccagcccgagcccgaggtggagctgaacagcgagggcgaggaggtgccccccgacgacccccccatctgcgtgagcgacgacaacagactgtgcaccctggccagcctgaaggccgtgtggcacggccagaagctggacttcttcaagcaggcccacgagggcggccccgcccccaacagcgaggtggtgctgcccgacggcttccagagccagcacatcctggactacgcccagggcaacagacccctggtgctgaacttcggcagctgcacctgaccccccttcatggccagaatgagcgccttccagagactggtgaccaagtaccagagagacgtggacttcctgatcatctacatcgaggaggcccaccccagcgacggctgggtgaccaccgacagcccctacatcatcccccagcacagaagcctggaggacagagtgagcgccgccagagtgctgcagcagggcgcccccggctgcgccctggtgctggacaccatggccaacagcagcagcagcgcctacggcgcctacttcgagagactgtacgtgatccagagcggcaccatcatgtaccagggcggcagaggccccgacggctaccaggtgagcgagctgagaacctggctggagagatacgacgagcagctgcacggcgccagacccagaagagtgtag

SEQ ID NO: 117240 - DNA, 837 bp, Artificial Sequence
  derived and/or modified sequence
atgctcaggtctttattgttgcactcccttcgcctgtgcgcacagaccgcatcttgtctggtgctgttcccacggtttttgggaacggcgttcatgctctggctcctagattttctctgtatcagaaagcattttttggggagacggcgcagagggcagccagaaccagaggtggagctgaactctgagggcgaagaagttcctcccgatgacccgcccatttgtgtctctgacgacaacagactgtgtactttggcgtcactgaaggcagtatggcacggccagaaattggattttttcaagcaggcgcacgagggtgggcccgcgccaaattctgaggtcgtcctgccggacgggtttcagtcccagcacatcctggactacgcacagggaaatcgaccgctcgtcctgaacttcggtagctgtacatgaccacctttcatggcccgcatgtctgcattccagcgcctggtgactaaataccaacgggatgttgattttctcattatctacatcgaagaggcccacccttccgatggatgggtaactacagactctccatatataatccctcagcacagatcactagaagatagggtttcggcagcccgggtcctgcagcagggagctccagggtgtgccctcgtattggatacaatggccaactcaagtagcagcgcatatggagcctacttcgagaggctgtacgtcatacagtcaggaaccattatgtaccagggcgggaggggaccagacgggtaccaagtttccgaactgcgcacgtggttagaacgctacgacgaacagctgcacggcgctcggccgaggagggtatag

SEQ ID NO: 117241 - DNA, 831 bp, Artificial Sequence
  derived and/or modified sequence
atgctgcggagcctgctgctgcacagcctgcggctgtgtgcccagacagccagctgcctggtgctcttcccccgcttcctgggcacagccttcatgctgtggctgctggacttcctgtgcatcaggaagcacttcctgggcagaagaagaagaggccagcctgagcctgaggtggagctgaacagcgagggggaggaggtgcccccagatgacccccccatctgtgtgtctgatgacaaccggctgtgcaccctggccagcctgaaggctgtgtggcacggccagaagctggacttcttcaagcaggcccacgagggcggccctgcccccaacagcgaggtggtgctgcctgatggcttccagagccagcacatcctggactatgcccagggcaaccggcccctggtgctgaactttggcagctgcccccccttcatggccaggatgtctgccttccagaggctggtgaccaagtaccagagagatgtggacttcctgatcatctacatcgaggaggcccaccccagtgatggctgggtgaccacagacagcccctacatcatcccccagcacaggagcctggaggacagagtgtctgctgcccgggtgctgcagcagggcgcccctggctgtgccctggtgctggacaccatggccaacagcagcagcagcgcctacggggcctactttgagcggctgtatgtgatccagagcggcaccatcatgtaccagggcggccggggcccagatggctaccaggtgtctgagctgcggacctggctggagagatatgatgagcagctgcatggagcccggccccggcgggtgtag

SEQ ID NO: 117242 - DNA, 837 bp, Artificial Sequence
  derived and/or modified sequence
atgctgcggagcctgctgctgcacagcctgcggctgtgcgcccagaccgcctcctgtctggttcttttcccaagattcttaggaaccgccttcatgttgtggctgctggactttctttgcattagaaaacacttcctcggcagaaggcggaggggccagcctgagcctgaggtcgaactcaattctgaaggagaggaggtgcccccagatgatccgccaatttgcgtgagcgacgataaccgattgtgtactctcgccagcttgaaggccgtgtggcacggacagaaacttgactttttcaaacaagcccatgagggcggacctgccccaaactcagaagtagtcctcccagatggtttccagtctcagcacatcctggattatgctcagggcaacagaccgctggtactcaacttcggcagttgtacctgaccccccttcatggcccggatgtctgccttccagaggctcgtgacaaaataccagcgtgacgtggatttccttatcatctacattgaggaggcgcatccttctgatggatgggtgacgaccgattctccttatatcattccacagcacaggagtctcgaggatcgggtgtctgctgctcgggtcctgcagcagggcgcccccgggtgtgccctcgtgctcgatactatggcaaactcctctagctccgcatatggagcctactttgagcgtctgtatgtgattcagtccgggacaatcatgtatcaggggggacgagggccagacggttatcaggtctccgagttgcgcacctggctggagaggtacgacgagcagctgcacggcgctagacccaggcgcgtttag

SEQ ID NO: 117243 - DNA, 837 bp, Artificial Sequence
  derived and/or modified sequence
atgctgcggtcccttctgctgcatagcttgaggctttgtgcacagactgcatcgtgtcttgttctgtttcccagatttctggggactgcctttatgttatggctactggacttcctgtgcattaggaagcattttctaggcaggaggcgccgagggcaaccagagcctgaagtggagctcaactccgaaggagaggaagtgccccctgacgatcctcccatttgcgtgagcgacgacaaccggctgtgtacactcgcaagtctaaaggcagtttggcacggacaaaaactggactttttcaagcaagcacacgaaggaggtcccgcacccaactcagaggtagtgcttccggacggatttcagtctcagcatatcctggattacgcacagggcaatcgcccactagttctgaattttgggtcctgtacctgacctcccttcatggctcgcatgtcggcctttcagaggctggtcacaaagtaccagagggacgtggactttcttataatctacattgaggaggctcatccgtccgacggatgggtgactacagactctccttacataatcccacagcatagatccctggaggaccgggtttcagccgcaagagtgctccagcagggggctcccggatgtgctctggtcctcgatacgatggccaacagctcctcctctgcctatggagcctacttcgagcgtctgtatgtgatacagagtgggacaatcatgtaccagggaggccgtggcccagatggctatcaggtctccgaattacggacgtggctggagcggtacgatgagcagctgcacggggctcgacctcggagagtctag

SEQ ID NO: 117244 - DNA, 2102 bp, Artificial Sequence
  derived and/or modified sequence
agcccaagatttctagggcattggccgcgctgctgggtgatccctccgggctcaagttgcaagggggcgggccgggccggaggtggagtctcccgccaattgaagcctccgctataaattgaactccctgcactgctgaagcccagatgcctcgccaggccacgtcgcggttggtggtcggagagggcgaggggtcccagggggcttcggggcctgcagccaccatgctccgctccctgctgcttcactccttgaggctctgcgcccagaccgcctcgtgcctcgtgctcttcccgcgcttcctcggcacggccttcatgctctggcttctcgatttcttgtgtatccgcaagcatttcctgggccgccgccgccgggggcagcccgagcccgaagtggagctcaacagtgaaggcgaggaggtgcctcccgatgacccgcccatctgcgtgtccgacgacaaccgcctgtgcaccctggcgtcgctcaaggcggtgtggcatggccagaagttggatttcttcaagcaggcgcacgagggcggtccggcgcccaactccgaggtggttctgcccgacggcttccagagccagcacatcctcgactacgcgcaagggaaccgcccgctggttctcaatttcggcagctgcacctgaccaccgttcatggcgcgcatgagcgccttccagcgcctggtcactaagtaccagcgcgacgtcgacttcctcatcatctacatcgaggaagcgcacccctccgacggctgggtcaccacggactctccctacatcatcccacagcaccggagcctggaggaccgggtcagcgcagcgagggtactgcagcaaggtgcacccggctgcgctctggtcctcgacaccatggccaactccagcagctcggcctatggcgcctacttcgagcgtctctatgtcatccagagtggcactattatgtaccagggcggccgtggccccgacggctaccaggtctctgagctgcgcacttggttggaacgctatgatgagcaactgcacggcgctcggccccggagggtgtaaacatccaacggacaattgactgaacttggtgggctgggccttcgagccttcgaagcccacgtgcaagcgcctcaaaccaagtcacgcttggcgaggccccagtgacactgatgtgctgagccaccatttcagactgagtctgcaccctcagccacatgaacaatctcccctacctccctgggactctgcttctgtaactgtctcattcacacctgcctggctcactggaaatcctcttttgagcgcgggatatggcttgcccttgtccgtgtgcccccaggactttgcctctacagcattttcttacaccccctccccagcgtgccctcagccaagtgctttggcccggtgcttcccgcagctgcacagagaccttggccacgcccgcgcgccctgagcgcagctgggttccaggagactctcagctcagctgagctagttgcctggcacccacctgtcgcgcgcggagagggggttccctgttgcttttgtgtctgtttcctgtccctggtaggggaagtgatgtcgtggatggggaggggtgggcagggtagtttcccccgcttgttttgggtgcacaggagccccactgctgatgacgaactatctctaactggtcttgaccacgagctagttctgaattgcaggggcctcaaagcagcacctaaaccttgagggggagggtgctctgggtttccgtgaggtaaccaccttaaatgggagggaagttggggtgtctgctttgggaccagaggaagatagcttgagaggcattggcgaggttcgcagcgccccagggagagagaaaaagctgagactcctggggaatgacgttggggtgatggagtccggggaaagagaggtggggggagagcctgaggtccccaagtgaggggagtcctaggcagagctgctgattgtggggctgggaggtggagggcccctgattcgaaggccatttggtgagtgttttgctggaaatatttcctgtatataaacttctttcaatctacaataataaaggcttgaggtaaactgctt

SEQ ID NO: 117245 - DNA, 915 bp, Artificial Sequence
  derived and/or modified sequence
atgcctcgccaggcgacctctcggctggtcgtgggcgagggcgaaggtagccagggagcctctggaccggccgctactatgctgcgctccctgcttcttcattcactccggttgtgtgcccagactgcgtcctgtctcgttttgttcccccggtttcttggaaccgcgtttatgctctggctcctggattttttgtgcattcgaaagcactttcttggccggcgccggcggggacagcctgagccagaggtggaactgaatagcgagggcgaagaggtcccacccgatgacccccccatttgtgttagtgatgacaatcgcctgtgtactctggctagcctcaaggctgtgtggcatgggcagaagcttgacttctttaaacaagcccacgaagggggacctgcccccaacagtgaggtggtcttgcctgacggtttccaaagccagcatatccttgactacgcccaaggcaatcgccccctggttttgaatttcggctcttgcacttgacccccgttcatggccaggatgtcagcattccagcgcctcgtaacaaagtatcaaagggatgtggacttcttgatcatttatatcgaagaggcccatccaagcgatggatgggtgacaactgattcaccatacatcatcccacagcatagatcattagaggacagagtttccgctgccagggtgctgcaacagggtgctccggggtgtgccctcgtattagacaccatggccaattcctcgtcctccgcatacggcgcttatttcgagcgactctacgtcatacagagcgggactattatgtatcagggcgggagggggccagatggatatcaggtgtctgagctcagaacctggctggaacgttatgatgagcagttgcacggggcccggcctcgaagggtttag

SEQ ID NO: 117246 - DNA, 909 bp, Artificial Sequence
  derived and/or modified sequence
atgccccggcaggccaccagccggctggtggtgggggagggggagggcagccagggcgccagcggccctgctgccaccatgctgcggagcctgctgctgcacagcctgcggctgtgtgcccagacagccagctgcctggtgctcttcccccgcttcctgggcacagccttcatgctgtggctgctggacttcctgtgcatcaggaagcacttcctgggcagaagaagaagaggccagcctgagcctgaggtggagctgaacagcgagggggaggaggtgcccccagatgacccccccatctgtgtgtctgatgacaaccggctgtgcaccctggccagcctgaaggctgtgtggcacggccagaagctggacttcttcaagcaggcccacgagggcggccctgcccccaacagcgaggtggtgctgcctgatggcttccagagccagcacatcctggactatgcccagggcaaccggcccctggtgctgaactttggcagctgcccccccttcatggccaggatgtctgccttccagaggctggtgaccaagtaccagagagatgtggacttcctgatcatctacatcgaggaggcccaccccagtgatggctgggtgaccacagacagcccctacatcatcccccagcacaggagcctggaggacagagtgtctgctgcccgggtgctgcagcagggcgcccctggctgtgccctggtgctggacaccatggccaacagcagcagcagcgcctacggggcctactttgagcggctgtatgtgatccagagcggcaccatcatgtaccagggcggccggggcccagatggctaccaggtgtctgagctgcggacctggctggagagatatgatgagcagctgcatggagcccggccccggcgggtgtag

SEQ ID NO: 117247 - DNA, 915 bp, Artificial Sequence
  derived and/or modified sequence
atgccccggcaggccaccagccggctggtggtgggcgagggcgagggcagtcagggggccagtggcccagccgccaccatgctccgcagcctattgttgcattcattacggctttgcgcgcaaacagcttcctgcctcgtactcttcccaagattcttaggaaccgcattcatgctgtggctgctcgacttcctctgcattcggaagcatttcttgggccggcggcgacggggacagcctgagcctgaagtggaactgaactcagagggcgaggaggttcctcctgacgatccccccatctgcgtgagcgatgacaacaggctctgtactctggcaagtcttaaagccgtgtggcatggccagaaattagattttttcaagcaggcacatgaaggcggaccggcaccaaacagcgaggtggttctccctgacgggtttcaatcccaacacattctggattatgctcagggtaatcgccctctggtgctgaactttggctcctgcacctgaccgccattcatggcgaggatgagtgctttccagcgcttggtgactaagtaccagcgggacgtcgacttcttgattatctacattgaggaggcgcacccgtctgacggttgggtaacaactgacagtccatacattattccccaacatcggtccctggaggacagagtgagcgctgcccgggtgctccagcagggcgctcctggatgtgctctggtgttagatacaatggcaaatagtagtagttccgcctacggcgcatatttcgagagattgtatgtcatccaaagcggaactattatgtaccagggcgggaggggcccagacggataccaggttagcgagctgaggacctggttagagagatacgatgagcagttgcacggggctaggccccggcgggtatag

SEQ ID NO: 117248 - DNA, 915 bp, Artificial Sequence
  derived and/or modified sequence
atgcctagacaggccactagtaggctcgtcgtgggtgagggcgagggctctcagggagcaagcggaccagcagcaaccatgctgcgttctctgctgcttcactcgctgcggctttgtgctcaaacagcatcgtgcctggttctatttcctcggttcctggggactgcattcatgctgtggctgctggacttcctctgtatcaggaaacactttcttgggaggagaaggaggggccagcccgagccagaagtcgagctgaactctgagggcgaggaggtcccgcctgacgatccgccaatctgcgtctccgatgataacagattatgtactcttgcctcgctgaaagcggtatggcatggacagaagctcgacttttttaaacaggcccacgaaggcggacccgctcccaatagtgaggtggtgctgcccgatggtttccaaagccagcatatcctggattatgcccagggcaaccgcccactggtcttaaatttcgggagttgtacatgaccacctttcatggcaaggatgtccgcctttcagcgcctcgtgaccaaataccagcgggatgtggatttcctcattatctacattgaggaagcacacccttctgacggatgggtcacaactgactcaccgtacattattccccagcacagatcactggaggaccgggtttccgccgctcgggtcctgcagcagggcgcacctggctgcgcgctggtcttagacaccatggctaactcctcttcttccgcctatggcgcatattttgaaagactatacgttattcagagcggcaccattatgtatcagggcggaagaggcccagacggttaccaggtgagtgaattgaggacctggctagagcgttacgacgagcagctacatggtgcacgacccaggcgcgtttag

SEQ ID NO: 117249 - DNA, 915 bp, Artificial Sequence
  derived and/or modified sequence
atgcccagacaggccaccagcagactggtggtgggcgagggcgagggcagccagggcgccagcggccccgccgccaccatgctgagaagcctgctgctgcacagcctgagactgtgcgcccagaccgccagctgcctggtgctgttccccagattcctgggcaccgccttcatgctgtggctgctggacttcctgtgcatcagaaagcacttcctgggcagaagaagaagaggccagcccgagcccgaggtggagctgaacagcgagggcgaggaggtgccccccgacgacccccccatctgcgtgagcgacgacaacagactgtgcaccctggccagcctgaaggccgtgtggcacggccagaagctggacttcttcaagcaggcccacgagggcggccccgcccccaacagcgaggtggtgctgcccgacggcttccagagccagcacatcctggactacgcccagggcaacagacccctggtgctgaacttcggcagctgcacctgaccccccttcatggccagaatgagcgccttccagagactggtgaccaagtaccagagagacgtggacttcctgatcatctacatcgaggaggcccaccccagcgacggctgggtgaccaccgacagcccctacatcatcccccagcacagaagcctggaggacagagtgagcgccgccagagtgctgcagcagggcgcccccggctgcgccctggtgctggacaccatggccaacagcagcagcagcgcctacggcgcctacttcgagagactgtacgtgatccagagcggcaccatcatgtaccagggcggcagaggccccgacggctaccaggtgagcgagctgagaacctggctggagagatacgacgagcagctgcacggcgccagacccagaagagtgtag

SEQ ID NO: 117250 - DNA, 915 bp, Artificial Sequence
  derived and/or modified sequence
atgcctcgccaggccacgtcgcggttggtggtcggagagggcgaggggtcccagggggcttcggggcctgcagccaccatgctccgctccctgctgcttcactccttgaggctctgcgcccagaccgcctcgtgcctcgtgctcttcccgcgcttcctcggcacggccttcatgctctggcttctcgatttcttgtgtatccgcaagcatttcctgggccgccgccgccgggggcagcccgagcccgaagtggagctcaacagtgaaggcgaggaggtgcctcccgatgacccgcccatctgcgtgtccgacgacaaccgcctgtgcaccctggcgtcgctcaaggcggtgtggcatggccagaagttggatttcttcaagcaggcgcacgagggcggtccggcgcccaactccgaggtggttctgcccgacggcttccagagccagcacatcctcgactacgcgcaagggaaccgcccgctggttctcaatttcggcagctgcacctgaccaccgttcatggcgcgcatgagcgccttccagcgcctggtcactaagtaccagcgcgacgtcgacttcctcatcatctacatcgaggaagcgcacccctccgacggctgggtcaccacggactctccctacatcatcccacagcaccggagcctggaggaccgggtcagcgcagcgagggtactgcagcaaggtgcacccggctgcgctctggtcctcgacaccatggccaactccagcagctcggcctatggcgcctacttcgagcgtctctatgtcatccagagtggcactattatgtaccagggcggccgtggccccgacggctaccaggtctctgagctgcgcacttggttggaacgctatgatgagcaactgcacggcgctcggccccggagggtgtaa

SEQ ID NO: 117251 - protein, 514 aa, Artificial Sequence
  derived and/or modified sequence
MADAEVIILPKKHKKKKERKSLPEEDVAEIQHAEEFLIKPESKVAKLDTSQWPLLLKNFDKLNVRTTHYTPLACGSNPLKREIGDYIRTGFINLDKPSNPSSHEVVAWIRRILRVEKTGHSGTLDPKVTGCLIVCIERATRLVKSQQSAGKEYVGIVRLHNAIEGGTQLSRALETLTGALFQRPPLIAAVKRQLRVRTIYESKMIEYDPERRLGIFWVSCEAGTYIRTLCVHLGLLLGVGGQMQELRRVRSGVMSEKDHMVTMHDVLDAQWLYDNHKDESYLRRVVYPLEKLLTSHKRLVMKDSAVNAICYGAKIMLPGVLRYEDGIEVNQEIVVITTKGEAICMAIALMTTAVISTCDHGIVAKIKRVIMERDTYPRKWGLGPKASQKKLMIKQGLLDKHGKPTDSTPATWKQEYVDYSESAKKEVVAEVVKAPQVVAEAAKTAKRKRESESESDETPPAAPQLIKKEKKKSKKDKKAKAGLESGAEPGDGDSDTTKKKKKKKKAKEVELVSE

SEQ ID NO: 117252 - DNA, 1545 bp, Artificial Sequence
  derived and/or modified sequence
atggccgacgccgaggtgatcatcctgcccaagaagcacaagaagaagaaggagagaaagagcctgcccgaggaggacgtggccgagatccagcacgccgaggagttcctgatcaagcccgagagcaaggtggccaagctggacaccagccagtggcccctgctgctgaagaacttcgacaagctgaacgtgagaaccacccactacacccccctggcctgcggcagcaaccccctgaagagagagatcggcgactacatcagaaccggcttcatcaacctggacaagcccagcaaccccagcagccacgaggtggtggcctggatcagaagaatcctgagagtggagaagaccggccacagcggcaccctggaccccaaggtgaccggctgcctgatcgtgtgcatcgagagagccaccagactggtgaagagccagcagagcgccggcaaggagtacgtgggcatcgtgagactgcacaacgccatcgagggcggcacccagctgagcagagccctggagaccctgaccggcgccctgttccagagaccccccctgatcgccgccgtgaagagacagctgagagtgagaaccatctacgagagcaagatgatcgagtacgaccccgagagaagactgggcatcttctgggtgagctgcgaggccggcacctacatcagaaccctgtgcgtgcacctgggcctgctgctgggcgtgggcggccagatgcaggagctgagaagagtgagaagcggcgtgatgagcgagaaggaccacatggtgaccatgcacgacgtgctggacgcccagtggctgtacgacaaccacaaggacgagagctacctgagaagagtggtgtaccccctggagaagctgctgaccagccacaagagactggtgatgaaggacagcgccgtgaacgccatctgctacggcgccaagatcatgctgcccggcgtgctgagatacgaggacggcatcgaggtgaaccaggagatcgtggtgatcaccaccaagggcgaggccatctgcatggccatcgccctgatgaccaccgccgtgatcagcacctgcgaccacggcatcgtggccaagatcaagagagtgatcatggagagagacacctaccccagaaagtggggcctgggccccaaggccagccagaagaagctgatgatcaagcagggcctgctggacaagcacggcaagcccaccgacagcacccccgccacctggaagcaggagtacgtggactacagcgagagcgccaagaaggaggtggtggccgaggtggtgaaggccccccaggtggtggccgaggccgccaagaccgccaagagaaagagagagagcgagagcgagagcgacgagaccccccccgccgccccccagctgatcaagaaggagaagaagaagagcaagaaggacaagaaggccaaggccggcctggagagcggcgccgagcccggcgacggcgacagcgacaccaccaagaagaagaagaagaagaagaaggccaaggaggtggagctggtgagcgagtag

SEQ ID NO: 117253 - DNA, 2577 bp, Artificial Sequence
  derived and/or modified sequence
agcaaatcgcattgcgcagacgaccagcgggcgcctcggattccgcccccgggatggccccgcctcctcccgccccgcggcaaggcacgcacagggcagtgcgcgggtgggtgggtcctagcagcgcggcctgacgggaccaaggcggcgggagtctgcggtcgttccctcggctgtggaccgggcggcacgcacgcggtgcagggtaacatggcggatgcggaagtaattattttgccaaagaaacataagaagaaaaaggagcggaagtcattgccagaagaagatgtagccgaaatacaacacgctgaagaatttcttatcaaacctgaatccaaagttgctaagttggacacgtctcagtggccccttttgctaaagaattttgataagctgaatgtaaggacaacacactatacacctcttgcatgtggttcaaatcctctgaagagagagattggggactatatcaggacaggtttcattaatcttgacaagccctctaacccctcttcccatgaggtggtagcctggattcgacggatacttcgggtggagaagacagggcacagtggtacgctggatcccaaggtgactggttgtttaatcgtgtgcatagaacgagccactcgcttggtgaagtcacaacagagtgcaggcaaagagtatgtggggattgtccggctgcacaatgctattgaaggggggacccagctttctagggccctagaaactctgacaggtgccttattccagcgacccccacttattgctgcagtaaagaggcagctccgagtgaggaccatctacgagagcaaaatgattgaatacgatcctgaaagaagattaggaatcttttgggtgagttgtgaggctggcacctacattcggacattatgtgtgcaccttggtttgttattgggagttggtggtcagatgcaggagcttcggagggttcgttctggagtcatgagtgaaaaggaccacatggtgacaatgcatgatgtgcttgatgctcagtggctgtatgataaccacaaggatgagagttacctgcggcgagttgtttaccctttggaaaagctgttgacatctcataaacggctggttatgaaagacagtgcagtaaatgccatctgctatggggccaagattatgcttccaggtgttcttcgatatgaggacggcattgaggtcaatcaggagattgtggttatcaccaccaaaggagaagcaatctgcatggctattgcattaatgaccacagcggtcatctctacctgcgaccatggtatagtagccaagatcaagagagtgatcatggagagagacacttaccctcggaagtggggtttaggtccaaaggcaagtcagaagaagctgatgatcaagcagggccttctggacaagcatgggaagcccacagacagcacacctgccacctggaagcaggagtatgttgactacagtgagtctgccaaaaaagaggtggttgctgaagtggtaaaagccccgcaggtagttgccgaagcagcaaaaactgcgaagcggaagcgagagagtgagagtgaaagtgacgagactcctccagcagctcctcagttgatcaagaaggaaaagaagaagagtaagaaggacaagaaggccaaagctggtctggagagcggggccgagcctggagatggggacagtgataccaccaagaagaagaagaagaagaagaaagcaaaagaggtagaattggtttctgagtagtgaaggccacttgaagctggaggagaaactaaagccttattgagaaaacatgttatagatccttttgttgctgagagagtggaacataggtcctagacagggtgaagagttctggcacattttagctgctactttgagacctcggtgatgttacctggtgtggtcatcccatcttgtcctgttttaaggatatgggtggtgaaagatgaaagaggcagagtttatcccaatgacttctctgtttgagttgggaagcctcaccttcagacccagtaactgtccgcagctgtctgctagtggttgtcttaacatcgtagtcctagtttgcattttttaaatcccctctgtttaaaaggtttgtaaaacaaaaacaaaaaactaagtctgctcagtgaaatgctgtagaaccctaaataagtggtagaagagtgtcactgaattttgtctctgaattcagtataactgagttttgtccatgctggtgtctgggttataggcctgatgggcctggtagttttccatcttgttctggcctagaggtcagtcctttgcacttcctcaaagcttgtgtacagtgctcacctaaatccatctgactacttgttcctgtgccctcttgttttaggcctcgtttacttttaaaaaatgaaattgttcattgctgggagaagaatgttgtaatttttacttattaaagtcaacttgttaagttttttatgtattcctgttgggttttcttgttgatctcatgctagcagagcaaaaattgtaaaatattttgattaaaaatctagggacctttatgtcctatttgaaatgtga

SEQ ID NO: 117254 - DNA, 1545 bp, Artificial Sequence
  derived and/or modified sequence
atggccgacgccgaggtaatcatccttccgaaaaagcacaaaaagaaaaaggagcgcaaatccctgcccgaagaggacgtggccgaaatccagcatgccgaggagtttttgatcaagccggaatccaaagtggctaagctggatacgagccaatggcccctgctcctgaagaattttgataaactgaatgtcaggacgacccactatacaccactcgcctgcggcagcaatcctctgaagcgtgagatcggcgattatattagaacaggcttcattaacctcgataagccttcaaatccatctagtcacgaggtcgtggcctggataaggcgtatattgagggttgaaaaaacaggccattccggtactctcgaccccaaagttacgggatgcctaattgtgtgtatcgagcgggccacacgacttgttaagtctcagcaaagtgccgggaaggaatatgtggggatcgtgaggctccacaatgcgatcgagggggggactcagttgtcacgcgcccttgaaacactgaccggagctttatttcaacggcctccactcatagccgctgtcaagcgacagctgcgcgttcggaccatctacgagtccaagatgatcgagtacgacccagagcgtagactaggcattttttgggtttcttgcgaggccggcacgtacatccgaaccctttgcgttcacctgggcttactgctgggcgttgggggccaaatgcaggaactgagaagggtgcgctccggagtcatgtccgaaaaggatcacatggtcacaatgcacgacgtgttggacgcccaatggctgtatgacaaccataaggacgagtcttatctcaggcgcgttgtctaccccctcgagaaactgttgacatcacataagcggcttgttatgaaggatagtgcagtcaatgccatttgctatggtgccaagataatgcttcccggggtgctgcgttatgaggatgggatcgaagtgaatcaagagattgtggtcattaccaccaagggggaggcaatctgtatggccatcgccctgatgacaacagctgtgatatctacctgcgaccacggaatagtggccaaaattaaacgagtaatcatggaaagggacacatatcccaggaagtgggggctgggcccaaaggcaagtcaaaaaaagctcatgattaagcaggggctgctcgataagcatggcaaacccacagatagcacccctgccacctggaagcaggaatacgtggattactcagaaagcgccaagaaggaagtggtcgcggaggtcgtgaaagctccgcaggtggtggccgaggccgctaagactgctaagcggaagcgggagtctgaaagcgagagcgatgagacaccacccgcagctccccagcttatcaagaaggagaagaagaaatccaaaaaggacaaaaaggccaaggctgggctggagagcggcgcggagcccggggacggggatagtgataccaccaagaaaaaaaagaagaaaaaaaaggctaaagaagtggagctggtttcagagtag

SEQ ID NO: 117255 - DNA, 1545 bp, Artificial Sequence
  derived and/or modified sequence
atggctgatgctgaggtgatcatcctgcccaagaagcacaagaagaagaaggagaggaagagcctgcctgaagaagatgtggccgagatccagcacgccgaggagttcctgatcaagccagagagcaaggtggccaagctggacaccagccagtggcccctgctgctgaagaactttgacaagctgaatgtgaggaccacccactacacccccctggcctgtggcagcaaccccctgaagcgggagattggagactacatcagaacaggcttcatcaacctggacaagcccagcaaccccagcagccatgaggtggtggcctggatccgccgcatcctgcgggtggagaagacaggccacagcggcaccctggaccccaaggtgacaggctgcctgattgtgtgcatcgagcgggccacccggctggtgaagagccagcagagcgctgggaaggagtatgtgggcatcgtgcggctgcacaatgccattgaaggaggcacccagctgagccgggccctggagaccctgactggagccctcttccagaggcctcccctgattgctgctgtgaagaggcagctgcgggtgaggaccatctatgagagcaagatgattgaatatgaccctgagcggcggctgggcatcttctgggtgtcctgtgaggccggcacctacatccgcaccctgtgtgtgcacctgggcctgctgctgggcgtgggcggccagatgcaggagctgcggcgggtgcgctctggagtgatgtctgagaaggaccacatggtgaccatgcatgatgtgctggatgcccagtggctgtatgacaaccacaaggatgagagctacctgcggcgggtggtgtaccccctggagaagctgctgaccagccacaagaggctggtgatgaaggacagcgctgtgaatgccatctgctatggagccaagatcatgctgcccggggtgctgcgctatgaagatggcatcgaggtgaaccaggagatcgtggtgatcaccaccaagggggaggccatctgcatggccatcgccctgatgaccacagctgtgatcagcacctgtgaccacggcatcgtggccaagatcaagagggtcatcatggagcgggacacctaccccaggaagtggggcctgggccccaaggccagccagaagaagctgatgatcaagcagggcctgctggacaagcacggcaagcccacagacagcaccccagccacctggaagcaggagtatgtggactacagcgagagcgccaagaaggaggtggtggccgaggtggtgaaggccccccaggtggtggccgaggccgccaagacagccaagaggaagcgggagagcgagagcgagagtgatgagaccccacctgctgccccccagctgatcaagaaggagaagaagaagagcaagaaggacaagaaggccaaggccggcctggagagcggggctgagcctggagatggagacagcgacaccaccaagaagaagaagaagaagaagaaggccaaggaggtggagctggtgtctgagtag

SEQ ID NO: 117256 - DNA, 1545 bp, Artificial Sequence
  derived and/or modified sequence
atggccgacgccgaggtgatcatcctgcccaagaagcacaagaagaagaaggagaggaagtctctaccagaggaggacgtggctgagattcagcacgctgaagagttcctgatcaaacccgagtcaaaggtcgccaaactggatactagccagtggccactcctactcaaaaacttcgataagctgaatgtaagaactacccactatacccccctggcctgtggaagcaatccactcaaacgggaaataggagactacattcgaaccggctttatcaatttagacaagccatcaaacccaagcagccacgaagtcgtggcttggatacgaaggattctcagagtagaaaaaactggacacagtggtaccctggacccgaaggttactggttgcctgattgtgtgcattgagagagcgacacggctcgtgaagtcgcagcagtccgcaggaaaggagtacgtcggcatagtcaggctgcacaacgctattgagggagggacccagttaagcagggccttggaaactctgactggagcactgtttcaacgcccccctctcatcgccgccgtgaagcgccaactaagggtgcgaactatctatgagagcaaaatgatagagtatgatcccgaacgccggttgggtatattctgggtatcttgcgaggcaggtacctacatacgcacgctgtgtgttcatttagggctccttctgggggttggggggcaaatgcaggagcttaggcgggtgaggagtggggtgatgtcagaaaaggatcatatggtgaccatgcatgatgtgcttgatgcccagtggctgtacgacaatcataaagacgaaagctatcttagaagagtcgtgtaccccctggagaagcttttgacctctcataagaggcttgtgatgaaggactctgccgtgaacgccatctgttatggtgccaagatcatgctgccgggtgtgctcaggtacgaagacggtatcgaagtcaaccaggagatcgtggtaatcaccacaaagggtgaagcaatatgtatggctattgctctgatgacgaccgcagtgatctccacctgcgaccatggcatcgtcgccaaaattaagcgtgtaatcatggagcgggacacttacccccgaaagtggggcctgggcccaaaggcatcccagaagaaactgatgataaaacagggcctgctggataaacatgggaaacctactgattctacccctgccacctggaagcaggagtacgtagattattccgaatcagccaaaaaggaagtggttgccgaggttgttaaagcgccccaagtcgtggccgaggccgccaaaacagccaagcgcaagcgtgagagcgagtctgaaagcgatgaaacaccacctgccgcaccgcagctgattaagaaggagaaaaagaagtctaagaaggataaaaaggcaaaggctggtctggagagcggtgcagagcctggagacggggatagtgataccacaaaaaaaaagaagaaaaagaaaaaggcgaaggaggttgagttagtgagtgaatag

SEQ ID NO: 117257 - DNA, 1545 bp, Artificial Sequence
  derived and/or modified sequence
atggcagatgcagaggtcattatcctgccaaaaaagcataaaaagaaaaaggagcgtaaatccctcccagaagaggacgtggctgagatccaacatgctgaggaattcttaatcaaaccagagagcaaggtggccaagctggacacctcccagtggccactcctgctaaaaaatttcgacaaactgaatgtacggaccacgcactacacccctttggcctgcgggtcgaaccccctgaagagggagataggagactatataaggaccggctttatcaatctggataagccatcaaacccatcctctcatgaggttgtggcctggatcaggcgcatcttgcgcgtggagaagactggccatagcggcacattggaccctaaggtgaccggctgtctgatagtgtgcattgagagagctacccgactagtcaagagccagcagtcggccggaaaagagtacgttggtatcgttcgtctccataatgccatagaggggggaacacagcttagcagggccctggagaccctgaccggagccctgttccagcgcccaccccttatagctgccgtgaagcgacagctgagagtgcgcaccatctacgagagcaaaatgattgagtatgatcctgagcgaagacttggcatcttctgggtatcatgcgaggcgggaacatatatccggacactatgcgttcacttgggtctgcttctcggtgtggggggacagatgcaggagctgcgccgagtgcgctctggggtcatgtccgagaaagatcacatggtcacaatgcacgacgtgctggatgctcagtggctttacgataaccataaagatgagtcctatctgcgaagggtggtgtatcctctcgagaagctcctgacgtcacataagaggcttgtgatgaaggactccgcggtgaacgctatctgttacggggctaagatcatgctccctggagtgcttcgatacgaggacggcattgaggtcaaccaagaaatcgtcgtgattaccacaaaaggtgaagccatctgcatggcaattgcgctcatgaccaccgctgtcataagcacgtgcgatcacgggattgtggccaagatcaagagggtcattatggaaagggacacctaccctaggaagtggggcctgggtcctaaggcctctcagaagaagcttatgataaaacagggactgctggacaagcacggtaagcctacggacagcacgcctgccacctggaaacaggaatacgtggactactctgaatctgcaaaaaaagaggtggtggcagaagtggtaaaggccccacaggttgtggcagaggctgctaagactgccaaacgaaagcgcgaaagcgagtcggaaagcgacgaaacgcccccagcagcgccacagttgatcaagaaagaaaaaaaaaagagcaagaaggataaaaaagcaaaggcgggtcttgaaagcggggcagagccgggagacggggatagtgatacgacaaagaaaaaaaagaagaaaaaaaaggcaaaggaggtggagttggtgagcgagtag

SEQ ID NO: 117258 - DNA, 1545 bp, Artificial Sequence
  derived and/or modified sequence
atggccgatgcagaagtgatcatactgcccaagaaacacaagaaaaagaaagagagaaagtcactgcccgaggaggacgtcgctgagattcagcatgcagaggaatttctcattaagcccgaatctaaagtcgccaaactcgacacctctcagtggcctctgctgctaaaaaacttcgataaactgaacgtaaggacgactcattacacacccctggcgtgcggaagcaatcctctgaagcgagaaatcggcgactacatcagaacgggtttcattaacctagataagccttccaaccccagttcgcatgaggtggtggcttggatccggcggattctgagggtggagaagacaggccattcagggacgctggatccaaaggtcactgggtgcctaatcgtatgtatcgagcgggccacccggttagtcaagtctcagcagtctgcaggcaaggaatacgtgggcatcgtgcgcctgcataatgctatcgaaggggggacccagctgagtagagctcttgagactctgaccggcgccttattccaacggcctcccctaattgctgcagtaaaacggcagctgagggtccgtactatttatgaatcaaagatgattgagtacgaccctgaacggaggttaggaatcttttgggtatcctgcgaggctgggacgtacattcggaccctgtgtgtgcatctcggactcctcctcggcgtcggaggccaaatgcaagagctgagacgcgttcgatcaggggttatgtccgagaaggaccatatggtcactatgcatgacgtacttgacgctcaatggctgtacgacaatcacaaggatgaaagttacttacggcgcgtggtctacccgctcgaaaagcttttaactagtcacaagcgcctggttatgaaggactccgccgtgaatgctatatgttatggggccaagataatgctgccaggcgtcttaagatatgaagacggcatcgaagtaaatcaggagatagtggtgattaccactaaaggcgaggccatttgcatggccatcgcattaatgaccaccgccgtgattagtacatgtgatcatggaattgtggccaagatcaagagagtaatcatggaaagggatacctatccccggaagtggggactcggcccgaaagctagtcaaaagaaactcatgatcaagcagggcttgctagataaacacggtaaacccacagatagcacccctgcgacatggaagcaagagtacgtggactattccgagtcagcaaagaaagaagtggtggccgaggttgtgaaagctccacaggtcgttgctgaagccgccaagactgcgaaacggaagagagagtcagaatcagaaagtgacgaaactcctccggccgcaccacagctgattaagaaagagaagaaaaaaagtaagaaggataagaaggctaaggctgggctcgagtctggcgccgaacctggggacggggactcggacacaacaaagaaaaagaagaaaaaaaagaaggcaaaggaggtggaactcgtgtcagagtag

SEQ ID NO: 117259 - DNA, 1545 bp, Artificial Sequence
  derived and/or modified sequence
atggccgacgccgaggtgatcatcctgcccaagaagcacaagaagaagaaggagagaaagtctttgcccgaggaggacgtggccgaaattcagcacgccgaggaattccttattaagccagagagtaaagtggcaaagctggacacatcacagtggccactactcctcaaaaacttcgataaacttaacgtgagaaccacccattacacacctctggcctgtggttccaaccctctaaaacgagagataggcgactatatccgaactggttttataaatcttgacaagccttctaacccaagctcccacgaagtagtcgcctggatccgacggattctcagggtggaaaaaaccggacactccggcaccctggaccccaaggttacgggctgtctgatagtttgcattgagagggccacaaggctggttaaatcgcaacagagcgcgggcaaggagtacgtgggtatagtaaggctccataatgccattgaagggggtacacagctgagtcgcgccctggagacattgacaggtgccctattccagcgtccccctctcatagctgccgtcaagcggcagctccgggtgagaaccatctatgaaagcaagatgatcgagtacgatcctgagcggcgcctgggaattttctgggtcagttgtgaagcgggcacctacattcgaactttatgtgtccatctaggcctgttgctgggggtgggcggccagatgcaggagttacggcgagttaggagcggcgttatgtccgaaaaagatcacatggtcaccatgcacgacgtactggacgctcagtggctctatgataatcacaaggatgaaagttacctgaggagagtggtctatccgcttgagaagctcctaacgtcccataagcggttagtaatgaaagactctgcagtgaatgccatctgttacggagccaaaatcatgctgcccggtgtactgagatatgaagacgggatagaagtcaatcaagagatcgtcgtcatcaccaccaaaggcgaagctatctgcatggcaatcgcgctgatgacgacagctgtaatttccacatgcgaccacggtattgtggcgaagattaaacgtgtcattatggagagggacacgtatcccagaaagtggggactggggcccaaggccagccagaagaagctcatgatcaagcagggccttcttgacaaacacggcaagcccacggacagtaccccagccacctggaaacaggagtatgtcgactactccgaaagcgcgaagaaggaagtggtcgcagaggtcgttaaagcaccccaagtcgtggctgaggcggccaaaaccgccaagaggaagcgcgaatcggagtccgagagcgacgaaacaccgcccgctgcaccacagttgattaagaaagaaaagaagaagtctaagaaagacaaaaaagccaaagcaggacttgaatccggagccgaacctggagatggcgactccgacactactaaaaaaaaaaaaaagaagaaaaaagccaaagaggtggaactcgtgtctgaatag

SEQ ID NO: 117260 - DNA, 1545 bp, Artificial Sequence
  derived and/or modified sequence
atggctgatgcagaagttataattttgcctaaaaagcacaagaagaaaaaggaaaggaagtccctccctgaggaagacgtcgctgagatccagcacgccgaggaatttttgatcaagcctgagtctaaggtcgccaaactcgacacatcacagtggccgctactgctgaaaaactttgataagctcaatgtgcgaactacccattatactccattggcatgcggatcaaaccctttaaaaagagagatcggcgactacatacgtaccgggtttatcaaccttgataaaccctcaaatccatcttctcacgaagttgtggcctggattcgtcgaatcttacgcgttgaaaaaactggccattccggaaccctagaccccaaagtgaccgggtgcctcattgtttgcatagagagggcaactagactggtgaaatcccagcagagcgctggaaaagagtacgtgggaatagtgagattgcataatgcgattgaaggaggaacccaactgtcacgagctctggagacacttactggtgccctcttccagagaccgcctctaattgccgcagtgaagcgacagttacgcgtgcgcactatttatgagagcaagatgatcgaatacgacccagagcggcgactcggtatcttttgggtgtcttgtgaagccggaacttatataaggaccctgtgtgtgcatctgggactcctgcttggggtcggcggtcagatgcaggaattgagacgtgtacgctcaggtgttatgtcagaaaaggaccacatggtaacaatgcacgacgtcttggatgctcagtggctgtatgacaaccataaagatgagagctatttgcggagggtggtttacccccttgagaagcttctgacaagccacaaaagactggtcatgaaggacagcgccgttaatgcgatatgttatggggcaaagatcatgctgcctggagtgttgcggtacgaggatgggatcgaggtgaatcaggaaatcgtggtcatcaccacaaaaggtgaggccatttgtatggccattgcgcttatgaccaccgcagttatctcaacctgtgatcatggaatcgtggccaagatcaagagagtgatcatggagcgggatacctatcctaggaaatgggggttaggtcctaaggctagccaaaaaaagctgatgatcaagcaaggcctccttgataaacacggcaagcccaccgattctacgcctgccacctggaaacaggaatacgtagactactccgaatctgccaaaaaagaagtcgtggcagaagttgtgaaagcacctcaggttgtggcagaagccgcaaagaccgcaaagagaaaacgagagagtgagtctgagagcgacgagactcccccagccgcacctcagttgattaaaaaagagaagaagaaaagtaaaaaggacaaaaaggccaaagctggtttggaaagtggcgcagagcccggagacggggacagcgatactaccaaaaagaagaagaaaaagaaaaaggccaaggaagtcgagttggtgtcggaatag

SEQ ID NO: 117261 - protein, 870 aa, Artificial Sequence
  derived and/or modified sequence
MFFACYCALRTNVKKYRYQDEDAPHDHSLPRLTHEVRGPELVHVSEKNLSQIENVHGYVLQSHISPLKASPAPIIVNTDTLDTIPYVNGTEIEYEFEEITLERGNSGLGFSIAGGTDNPHIGDDPGIFITKIIPGGAAAEDGRLRVNDCILRVNEVDVSEVSHSKAVEALKEAGSIVRLYVRRRRPILETVVEIKLFKGPKGLGFSIAGGVGNQHIPGDNSIYVTKIIDGGAAQKDGRLQVGDRLLMVNNYSLEEVTHEEAVAILKNTSEVVYLKVGKPTTIYMTDPYGPPDITHSYSPPMENHLLSGNNGTLEYKTSLPPISPGRYSPIPKHMLVDDDYTRPPEPVYSTVNKLCDKPASPRHYSPVECDKSFLLSAPYSHYHLGLLPDSEMTSHSQHSTATRQPSMTLQRAVSLEGEPRKVVLHKGSTGLGFNIVGGEDGEGIFVSFILAGGPADLSGELQRGDQILSVNGIDLRGASHEQAAAALKGAGQTVTIIAQYQPEDYARFEAKIHDLREQMMNHSMSSGSGSLRTNQKRSLYVRAMFDYDKSKDSGLPSQGLSFKYGDILHVINASDDEWWQARRVMLEGDSEEMGVIPSKRRVERKERARLKTVKFNAKPGVIDSKGSFNDKRKKSFIFSRKFPFYKNKEQSEQETSDPERGQEDLILSYEPVTRQEINYTRPVIILGPMKDRINDDLISEFPDKFGSCVPHTTRPKRDYEVDGRDYHFVISREQMEKDIQEHKFIEAGQYNDNLYGTSVQSVRFVAERGKHCILDVSGNAIKRLQVAQLYPIAIFIKPRSLEPLMEMNKRLTEEQAKKTYDRAIKLEQEFGEYFTAIVQGDTLEDIYNQCKLVIEEQSGPFIWIPSKEKL

SEQ ID NO: 117262 - DNA, 2613 bp, Artificial Sequence
  derived and/or modified sequence
atgttcttcgcttgttattgtgcgcttcgcactaacgtgaaaaaataccgataccaagacgaggacgcaccacatgatcattccttgcctcgtctgacccatgaggtcagagggcctgaactcgtacacgtaagcgagaaaaacctgtcccagattgagaatgtgcacggatacgttttgcagtctcacatatctcccctgaaagccagtcccgcacccatcatcgtgaatactgacaccctggacacgattccatacgtcaacggaaccgagatagagtacgagtttgaagaaataactctagagagagggaattctggactgggattctcaatagcaggcggaacagacaacccccatatcggagatgacccgggcatattcataaccaagattatccccggaggtgctgccgccgaagacggacgcctgagggtaaatgactgcattctgcgggtgaatgaagtcgacgtctcagaagtttctcactccaaagcagtggaggccttaaaagaagccggctcaattgtgagactgtatgtaagacgacggagaccgatcctggagacagtcgtagaaatcaaactttttaagggccccaaagggctgggcttctccatagccggcggggtgggtaatcagcatatcccaggcgacaattccatttatgtaaccaaaattattgatggcggagcagcacagaaggatggaagacttcaggtgggtgaccggctgctcatggtgaataactattcactagaggaggtgacccacgaagaggctgtagcgatcctcaagaatacatctgaggtcgtgtatctaaaagttggaaagcctaccacaatctatatgacagatccctacggccccccagacatcacacactcctattccccccccatggagaatcatcttctctcaggaaataatggaacactcgagtacaaaacaagcctgcctccaatatcccctggtcggtactcaccaattcctaaacacatgctggttgatgatgattacacacggccacccgagccagtctatagcactgtaaataagctctgtgataagccagcatctccccggcactactctcctgtggagtgtgataaatcttttcttctgagcgccccatacagccactaccacctcggcctgcttcccgactctgagatgacctctcactcacaacacagcaccgccactagacaaccttcgatgactttgcagagagcggtttccttagaaggcgagccccgaaaggtggttcttcataagggttctaccgggctcggattcaacatcgtaggtggagaggacggcgagggcattttcgtgtccttcatcctggcaggaggacccgctgacctttccggagagttgcaacgtggcgaccaaatcttgtctgtaaacggaatcgatctcaggggcgcatctcatgagcaagctgcagcagcactgaagggagcggggcagactgtgaccattatcgctcaataccagcctgaagactacgcccgtttcgaagcgaaaatccatgatttaagagaacagatgatgaaccacagcatgtcatctggaagtggctcgctgcgaactaaccagaaaagatcactgtatgtgagggccatgttcgattacgacaagtccaaagacagtggacttccatcccaaggcctgtcgtttaagtatggcgatatcctgcacgtgatcaacgcatccgacgatgaatggtggcaagcacgtcgcgtcatgcttgagggtgatagcgaggaaatgggggtgatcccaagcaaaagacgggtggagcgtaaggaacgcgctagattgaaaacggtgaagtttaacgccaagcctggggtcattgatagtaagggtagttttaatgataaacgcaaaaaatcattcatcttcagtcggaagtttcctttttacaagaacaaggaacagagcgagcaggagacatctgaccctgagcggggccaggaagacctgattctatcctacgagcccgtgaccaggcaggagatcaattatacaaggcccgtgattatcctcgggcccatgaaagaccgcataaacgacgatttaatttccgagttccctgataagttcggctcgtgtgtcccccatacgacacggccaaaacgggattacgaggtggacgggagggactaccacttcgttataagcagagagcagatggagaaggatatccaagagcacaaattcatcgaagctggacagtacaatgataacctgtacgggacctccgtccaatccgtgcggtttgtggcagagagagggaagcattgcatcctcgatgtgagcggcaacgccattaaacggctacaggtggcgcaattgtacccaatcgcaattttcataaaacctagatcgctggaaccgttgatggaaatgaataaacggctaaccgaggaacaggctaaaaagacgtacgatcgggctatcaaacttgagcaggagtttggcgaatattttactgccattgtacaaggagacactctggaggacatttacaaccaatgcaagctggtcatcgaagaacagagtgggccttttatctggatcccgtcgaaggaaaagttatag

SEQ ID NO: 117263 - DNA, 2613 bp, Artificial Sequence
  derived and/or modified sequence
atgttctttgcctgctactgtgccctgcggaccaacgtgaagaagtaccgctaccaggatgaagatgcccctcatgaccacagcctgccccggctgacccatgaggtgcggggccctgagctggtgcacgtgtctgagaagaacctgagccagattgaaaatgtgcacggctacgtgctgcagagccacatcagccccctgaaggccagccctgcccccatcatcgtgaacacagacaccctggacaccatcccctacgtgaatggaacagaaattgaatatgaatttgaggagatcaccctggagcggggcaacagcggcctgggcttcagcattgctgggggcacagacaacccccacatcggagatgatcctggcatcttcatcaccaagatcatccctgggggcgctgctgctgaagatggccgcctgcgggtgaatgactgcatcctgcgggtgaatgaggtggatgtgtctgaggtgagccacagcaaggctgtggaggccctgaaggaggccggcagcatcgtgcggctgtatgtgagaagaagaagacccatcctggagaccgtggtggagatcaagctgttcaagggccccaagggcctgggcttcagcattgctgggggcgtgggcaaccagcacatccctggggacaacagcatctacgtgaccaagatcattgatggaggagctgcccagaaggatggccgcctgcaggtgggggaccggctgctgatggtgaacaactacagcctggaggaggtgacccatgaggaggccgtggccatcctgaagaacaccagcgaggtggtgtacctgaaggtgggcaagcccaccaccatctacatgacagacccctacggccccccagacatcacccacagctacagcccccccatggagaaccacctgctgagcggcaacaacggcaccctggagtacaagaccagcctgccccccatcagccctggccgctacagccccatccccaagcacatgctggtggatgatgactacaccaggcctcctgagcctgtgtacagcacagtgaacaagctgtgtgacaagccagccagccccaggcactacagccctgtggagtgtgacaagagcttcctgctgagcgccccctacagccactaccacctgggcctgctgcctgacagcgagatgaccagccacagccagcacagcacagccacccggcagcccagcatgaccctgcagagagctgtgtccctggagggggagcccaggaaggtggtgctgcacaagggcagcacaggcctgggcttcaacatcgtgggcggagaagatggagagggcatctttgtgtccttcatcctggccggcggccctgctgacctgagcggggagctgcagagaggagaccagatcctgtctgtgaatggaattgacctgcggggggccagccatgagcaggccgctgctgccctgaagggggccggccagacagtgaccatcatcgcccagtaccagccagaagattatgccaggtttgaggccaagatccatgacctgcgggagcagatgatgaaccacagcatgagcagcggcagcggcagcctgcggaccaaccagaagaggagcctgtatgtgcgggccatgtttgattatgacaagagcaaggacagcggcctgcccagccagggcctgtccttcaagtacggggacatcctgcacgtgatcaatgccagtgatgatgagtggtggcaggcccggcgggtgatgctggagggggacagcgaggagatgggcgtcatccccagcaagagaagagtggagaggaaggagcgggcccggctgaagacagtgaagttcaatgccaagccaggagtcatcgacagcaagggcagcttcaatgacaagaggaagaagagcttcatcttcagcaggaagttccccttctacaagaacaaggagcagagcgagcaggagaccagtgaccctgagcggggccaggaggacctgatcctgtcctatgagcctgtgacccggcaggagatcaactacaccaggcctgtgatcatcctgggccccatgaaggaccgcatcaatgatgacctgatcagcgagttcccagacaagtttggcagctgtgtgccccacaccacccggcccaagagggactatgaggtggatggccgggactaccacttcgtcatcagccgggagcagatggagaaggacatccaggagcacaagttcattgaagctggccagtacaatgacaacctgtatggcacctctgtgcagagcgtgcgctttgtggccgagcggggcaagcactgcatcctggatgtgtctggaaatgccatcaagaggctgcaggtggcccagctgtaccccatcgccatcttcatcaagcccaggagcctggagcccctgatggagatgaacaagaggctgacagaggagcaggccaagaagacctatgaccgggccatcaagctggagcaggagtttggagagtacttcaccgccatcgtgcagggcgacaccctggaggacatctacaaccagtgcaagctggtgattgaggagcagagcggccccttcatctggatccccagcaaggagaagctgtag

SEQ ID NO: 117264 - DNA, 2613 bp, Artificial Sequence
  derived and/or modified sequence
atgttcttcgcctgctactgcgccctgcggaccaacgtgaagaagtatagataccaggatgaagatgcaccccacgaccactcactgccgcgcctgactcatgaggtgagaggccctgaactggtgcacgttagcgagaagaatctgagtcagattgaaaatgttcacggatacgtgctgcagtcccacattagccctcttaaagcctctcctgcacctatcatcgttaataccgataccctggacaccataccctatgttaacggaacagaaattgaatacgaatttgaggaaatcactctggagcggggcaactccggcctaggctttagcattgccggcggtacagacaaccctcacatcggtgacgaccccggtattttcatcacaaagatcatccctggcggcgccgcggccgaggacgggaggctaagggtgaatgattgcattctgcgggtgaatgaagtagacgtttcagaagtttctcatagtaaagcagtcgaagctctgaaagaggctgggagcattgtcaggctgtatgtgcgccgtaggcgcccaatactcgagacagtcgtggaaatcaaactattcaagggtcctaagggacttggcttttccattgccggaggtgtgggaaatcagcatatacccggagacaattccatatacgtgaccaagattatagatggcggcgccgcccagaaagacggccgccttcaggtgggtgaccgcctgctcatggtgaataattattctcttgaggaggtaacccatgaggaggccgttgctatcctgaagaatacaagcgaggttgtatatttaaaagtgggaaagccaacaacaatatacatgacagacccatacggcccacctgacataacacattcatacagtcctccgatggagaatcatctgctaagcgggaataatgggactctagagtataaaacttcacttccaccaatttccccggggaggtattctccaatcccaaaacacatgcttgtggacgacgactataccaggccccccgagcctgtctattcaacagtgaataaactgtgtgacaaacctgccagcccccggcactactctcctgtcgagtgtgacaagtcatttcttctgtctgccccctatagtcactatcatttgggactgctgcccgattccgaaatgaccagtcactcacagcattccaccgctactagacagccatccatgaccctgcaaagagcggtgtccctggagggcgaacctaggaaagtggtactccataaaggatccaccggtctgggatttaacatcgtcgggggagaagacggtgagggtatcttcgttagctttatactggctggaggccctgctgacctcagcggggaacttcagagaggagaccagatcctgtctgtgaatggcatagatctcagaggggcctctcacgagcaagcagccgcggcactcaagggggccggccaaacagttaccataatcgctcagtatcaacccgaggactacgctcggttcgaagcaaaaatacacgacttgcgcgagcaaatgatgaatcactcaatgtccagcggttcaggctccctgaggacaaatcagaagcggtctctgtatgttcgcgccatgtttgattatgacaagtccaaagactcaggattgccgagtcagggtctttcctttaagtatggagatattctgcacgtgattaacgcatcagatgatgaatggtggcaagccagacgagtgatgttggagggcgactccgaagaaatgggggtgatcccatctaagcgtcgggtggagcgcaaggaacgggcaaggctcaaaactgtgaaatttaatgctaaacccggagtgatcgactcgaaaggctcatttaacgacaagagaaagaagtccttcatttttagtcggaaattcccgttctataagaataaagagcagagcgagcaggaaacatccgatccagagcgaggccaggaagatctcatcttgtcgtacgagcccgtgactagacaggaaataaactatacacggccagtcatcatcttaggcccaatgaaagaccggatcaacgacgacttaatctctgagtttccggataagttcgggagctgcgttccacacacgacccggcccaagagagactacgaggttgatggtcgggattatcacttcgtgatttctcgggagcagatggaaaaagacatccaagagcataagttcattgaggccggccaatacaacgataacctgtatgggacctcagtgcagagtgtgcggttcgtcgccgaacgtggcaaacattgcatcttggatgtctctgggaatgcaatcaaaaggctccaagttgcacagttgtacccaatagcaattttcattaagcctcgctccctagaaccgttgatggaaatgaacaagagactgacagaagaacaagctaaaaaaacctatgatcgggcaattaagctcgagcaagagttcggcgaatactttaccgctatcgtgcaaggtgacaccttggaagatatatataatcagtgtaagctcgtaatcgaggagcaatcgggcccctttatttggattcccagtaaggagaagctttag

SEQ ID NO: 117265 - DNA, 2613 bp, Artificial Sequence
  derived and/or modified sequence
atgtttttcgcatgctattgcgccctccgcaccaacgtcaaaaagtacagataccaggatgaagatgcaccccatgaccatagcctccctagactcacccatgaggtcagaggacccgagctggtgcacgtatctgagaaaaacctcagccagattgaaaatgtacacggatacgtcctgcagtcacacattagcccattgaaggcatctccagcccctataatcgtgaacaccgacaccctagacacaatcccctacgtgaatggcacagagatcgagtacgagttcgaagaaataacgctcgaacgaggaaatagcgggttgggcttctctatcgccggtggaaccgacaacccgcacataggtgatgaccctgggatttttataaccaagatcattcctgggggtgcagcagctgaagacggcagactgagggtcaacgactgtatcctccgggtcaatgaagttgatgtaagcgaagttagccacagcaaggctgtggaggcgctgaaggaggctggcagcattgttcggctgtacgtgaggaggagacgaccaatcctggagacagtcgttgaaatcaagctgttcaagggaccgaagggcctcggcttcagcattgctggcggagtggggaatcagcacatccctggcgacaatagcatctatgtgactaagataattgatgggggtgccgctcagaaggacggacggcttcaagtcggcgatagactgctgatggttaataattatagtttagaagaggtcactcacgaggaggctgtagctattctcaaaaatacgtcagaggtagtatacctgaaggtggggaaacctactactatctacatgaccgacccttacggccctccagatattacccacagttatagcccacccatggagaaccacctgctaagcggtaataatggaactctggagtacaagaccagtctgccaccgatctctcccggtcgctactcgccgatccccaaacacatgttagtggacgacgactacactcggccacccgaacccgtgtatagcaccgtaaacaaattgtgtgataagcctgcctctcctaggcattattcaccagtggagtgcgacaagagttttcttctctccgcaccatattctcactaccaccttggccttttgccagattcagagatgactagccacagccagcactccactgcaacacgccagccttctatgactctgcagagagcagtcagtctggagggggaaccccgtaaagtggtattacataagggctcaactgggcttggattcaacatagtgggtggggaggacggtgaaggtatctttgtcagttttatcttggctgggggaccagcggaccttagtggcgagttgcagagaggcgatcagatcctgtccgtgaacggtatagaccttcgaggtgctagtcatgaacaggcagccgcagccctaaagggcgcagggcagaccgtcaccatcatagcacagtatcagcccgaagactacgcgcgatttgaagctaagatccacgatctgagagagcagatgatgaatcactcgatgagctccggctccggcagcctgcgcaccaatcagaaaaggtccctatacgttcgggctatgttcgactatgacaaatcaaaagatagcggcctgccatcccaaggcctctcattcaaatacggggatatcctgcatgttatcaacgccagcgatgacgagtggtggcaggctcggcgagtgatgttggaaggagattctgaggaaatgggcgtgatcccctccaagcgccgtgtggaaagaaaggaaagagcaaggctgaagacggtaaagtttaatgcgaaacctggcgtcatcgacagtaaggggtcctttaatgacaagcgaaaaaagtccttcattttttctcgcaaattccccttttataaaaacaaagagcagtccgaacaggagacctctgatcccgaaaggggacaggaggatttgatactaagctatgagcccgtgactagacaggaaatcaactacacaagacctgttatcatactgggcccaatgaaagaccggattaatgacgatctgatttcagagttccctgataagtttggatcctgtgttcctcacaccacgcgaccaaagagagactatgaggtggacgggagggactaccactttgtgatcagtcgggagcagatggaaaaggacatccaagagcacaaattcatcgaggctggccagtacaatgacaacttgtacggcaccagcgtgcaatccgttcgattcgttgcagagcggggtaaacattgcattctggacgtgagtggtaacgctatcaaaaggcttcaggtagctcaactgtaccctatcgcgatctttattaagccgagatcgttggagccgctcatggagatgaataaaaggctcactgaggaacaggccaaaaagacctatgatcgcgctattaaacttgaacaggagtttggggaatacttcaccgctatcgtgcagggcgataccctcgaagacatttataaccaatgtaagctggtgatagaggaacaatcaggccctttcatttggatcccctctaaggagaagctgtag

SEQ ID NO: 117266 - DNA, 2613 bp, Artificial Sequence
  derived and/or modified sequence
atgttcttcgcctgctactgcgccctgagaaccaacgtgaagaagtacagataccaggacgaggacgccccccacgaccacagcctgcccagactgacccacgaggtgagaggccccgagctggtgcacgtgagcgagaagaacctgagccagatcgagaacgtgcacggctacgtgctgcagagccacatcagccccctgaaggccagccccgcccccatcatcgtgaacaccgacaccctggacaccatcccctacgtgaacggcaccgagatcgagtacgagttcgaggagatcaccctggagagaggcaacagcggcctgggcttcagcatcgccggcggcaccgacaacccccacatcggcgacgaccccggcatcttcatcaccaagatcatccccggcggcgccgccgccgaggacggcagactgagagtgaacgactgcatcctgagagtgaacgaggtggacgtgagcgaggtgagccacagcaaggccgtggaggccctgaaggaggccggcagcatcgtgagactgtacgtgagaagaagaagacccatcctggagaccgtggtggagatcaagctgttcaagggccccaagggcctgggcttcagcatcgccggcggcgtgggcaaccagcacatccccggcgacaacagcatctacgtgaccaagatcatcgacggcggcgccgcccagaaggacggcagactgcaggtgggcgacagactgctgatggtgaacaactacagcctggaggaggtgacccacgaggaggccgtggccatcctgaagaacaccagcgaggtggtgtacctgaaggtgggcaagcccaccaccatctacatgaccgacccctacggcccccccgacatcacccacagctacagcccccccatggagaaccacctgctgagcggcaacaacggcaccctggagtacaagaccagcctgccccccatcagccccggcagatacagccccatccccaagcacatgctggtggacgacgactacaccagaccccccgagcccgtgtacagcaccgtgaacaagctgtgcgacaagcccgccagccccagacactacagccccgtggagtgcgacaagagcttcctgctgagcgccccctacagccactaccacctgggcctgctgcccgacagcgagatgaccagccacagccagcacagcaccgccaccagacagcccagcatgaccctgcagagagccgtgagcctggagggcgagcccagaaaggtggtgctgcacaagggcagcaccggcctgggcttcaacatcgtgggcggcgaggacggcgagggcatcttcgtgagcttcatcctggccggcggccccgccgacctgagcggcgagctgcagagaggcgaccagatcctgagcgtgaacggcatcgacctgagaggcgccagccacgagcaggccgccgccgccctgaagggcgccggccagaccgtgaccatcatcgcccagtaccagcccgaggactacgccagattcgaggccaagatccacgacctgagagagcagatgatgaaccacagcatgagcagcggcagcggcagcctgagaaccaaccagaagagaagcctgtacgtgagagccatgttcgactacgacaagagcaaggacagcggcctgcccagccagggcctgagcttcaagtacggcgacatcctgcacgtgatcaacgccagcgacgacgagtggtggcaggccagaagagtgatgctggagggcgacagcgaggagatgggcgtgatccccagcaagagaagagtggagagaaaggagagagccagactgaagaccgtgaagttcaacgccaagcccggcgtgatcgacagcaagggcagcttcaacgacaagagaaagaagagcttcatcttcagcagaaagttccccttctacaagaacaaggagcagagcgagcaggagaccagcgaccccgagagaggccaggaggacctgatcctgagctacgagcccgtgaccagacaggagatcaactacaccagacccgtgatcatcctgggccccatgaaggacagaatcaacgacgacctgatcagcgagttccccgacaagttcggcagctgcgtgccccacaccaccagacccaagagagactacgaggtggacggcagagactaccacttcgtgatcagcagagagcagatggagaaggacatccaggagcacaagttcatcgaggccggccagtacaacgacaacctgtacggcaccagcgtgcagagcgtgagattcgtggccgagagaggcaagcactgcatcctggacgtgagcggcaacgccatcaagagactgcaggtggcccagctgtaccccatcgccatcttcatcaagcccagaagcctggagcccctgatggagatgaacaagagactgaccgaggagcaggccaagaagacctacgacagagccatcaagctggagcaggagttcggcgagtacttcaccgccatcgtgcagggcgacaccctggaggacatctacaaccagtgcaagctggtgatcgaggagcagagcggccccttcatctggatccccagcaaggagaagctgtag

SEQ ID NO: 117267 - DNA, 7890 bp, Artificial Sequence
  derived and/or modified sequence
atttacagtctgcgatgcgatcccattgtaaagtatttaataggataacaccggggctctccagaaatataagtaactcattggttaaatttcaattcttcacctttccccccctccttcctgagtgagctcattcccccctccttcttcttcttcttttttttttttaatccagtgatttaaaatgctagaaggaaaagcaactgaggtcttaactttcagacgctgaattctcatctaattgaaattactgggcataatgctatatatagccaatgaagagattttgagctctcactcagtgccttcaagacatgtcgttttgtagtcagagaaaacagagatcaatgcattttcaaactgacagagggaacggatgctctttagtagcacatgcccaggatcgtgtgtgtggggcttgcgctgtgctgagaagctgaataccggtccatatgctccttatttactgcaatgttctttgcatgttactgtgcactccggactaacgtgaagaagtatcgatatcaagatgaggacgctccacatgatcattccttacctcgactaacccacgaagtaagaggcccagaactcgtgcatgtatcagaaaagaacctctctcaaatagaaaatgtccatggatatgtcttgcagtctcatatttctcctctgaaggccagtcctgctcctataattgtcaacacagatactttggacacaattccttatgtcaatgggacagaaattgaatatgaatttgaagaaattacactggagagggggaattctggcctgggattcagtattgctggggggacagataatccccacattggagatgaccctggcatatttattacgaagattataccaggaggtgctgcagcagaggatggcagactcagggtcaatgattgtatcttgcgggtgaatgaggttgatgtgtcagaggtttcccacagtaaagcggtggaagccctgaaggaagcagggtctatcgttcggctgtatgtgcgtagaagacgacctattttggagaccgttgtggaaatcaaactgttcaaaggccctaaaggtttaggcttcagtattgcaggaggtgtggggaaccaacacattcctggagacaacagcatttatgtaactaaaattatagatggaggagctgcacaaaaagatggaaggttgcaagtaggagatagactactaatggtaaacaactacagtttagaagaagtaacacacgaagaggcagtagcaatattaaagaacacatcagaggtagtttatttaaaagttggcaaacccactaccatttatatgactgatccttatggtccacctgatattactcactcttattctccaccaatggaaaaccatctactctctggcaacaatggcactttagaatataaaacctccctgccacccatctctccaggaaggtactcaccaattccaaagcacatgcttgttgacgacgactacaccaggcctccggaacctgtttacagcactgtgaacaaactatgtgataagcctgcttctcccaggcactattcccctgttgagtgtgacaaaagcttcctcctctcagctccctattcccactaccacctaggcctgctacctgactctgagatgaccagtcattcccaacatagcaccgcaactcgtcagccttcaatgactctccaacgggccgtctccctggaaggagagcctcgcaaggtagtcctgcacaaaggctccactggcctgggcttcaacattgtcggtggggaagatggagaaggtatttttgtgtccttcattctggctggtggaccagcagacctaagtggggagctccagagaggagaccagatcctatcggtgaatggcattgacctccgtggtgcatcccacgagcaggcagctgctgcactaaagggggctggacagacagtgacgattatagcacaatatcaacctgaagattacgctcgatttgaggccaaaatccatgacctacgagagcagatgatgaaccacagcatgagctccgggtccggatccctgcgaaccaatcagaaacgctccctctacgtcagagccatgttcgactacgacaagagcaaggacagtgggctgccaagtcaaggacttagttttaaatatggagatattctccacgttatcaatgcctctgatgatgagtggtggcaagccaggagagtcatgctggagggagacagtgaggagatgggggtcatccccagcaaaaggagggtggaaagaaaggaacgtgcccgattgaagacagtgaagtttaatgccaaacctggagtgattgattcgaaagggtcattcaatgacaagcgtaaaaagagcttcatcttttcacgaaaattcccattctacaagaacaaggagcagagtgagcaggaaaccagtgatcctgaacgaggacaagaagacctcattctttcctatgagcctgttacaaggcaggaaataaactacacccggccggtgattatcctggggcccatgaaggatcggatcaatgacgacttgatatctgaattccctgataaatttggctcctgtgtgcctcatactacgaggccaaagcgagactacgaggtggatggcagagactatcactttgtcatttccagagaacaaatggagaaagatatccaagagcacaagtttatagaagccggccagtacaatgacaatttatatggaaccagtgtgcagtctgtgagatttgtagcagaaagaggcaaacactgtatacttgatgtatcaggaaatgctatcaagcggttacaagttgcccagctctatcccattgccatcttcataaaacccaggtctctggaacctcttatggagatgaataagcgtctaacagaggaacaagccaagaaaacctatgatcgagcaattaagctagaacaagaatttggagaatattttacagctattgtccaaggagatactttagaagatatatataaccaatgcaagcttgttattgaagagcaatctgggcctttcatctggattccctcaaaggaaaagttataaattagctactgcgcctctgacaacgacagaagagcatttagaagaacaaaatatatataacatactacttggaggcttttatgtttttgttgcatttatgtttttgcagtcaatgtgaattcttacgaatgtacaacacaaactgtatgaagccatgaaggaaacagaggggccaaagggtgggacagaaaagacattgcagtatgaaggaaggctttggtttgctcaaagtgccaggtgtagggatgaacctctgacgggctttctgcccaagagatgagatgagagcctcctcaccccagcagatgtccagagctgatttagctgcagagctctctgtgtcttttgctttaaagaaaaattgccagcactcgaacctcatcagccttcccattacccacatctgtaattggtacactttgaattttataactatgcacatcttttgatttcttaacaagcaaatgaaagaaagaaggaaaaaagaaaggaatccctttggagatgacatactatcagggaaggataagtgtgtagttttttgactggcatctgcaaagacaagaatttcataaaatttgcaagtgtatggaggactaacctcactgacaggaggggattccacctgggattagctttatgattgttgattgcctattttgccatttataaactgaaagaaggcactaaagatgagaataatttatacaataaaaatatattaaatgtatagaaacaaatttctataggttaaaaaagttttgtgaaatattttgtaaagactaatattgaaagactaaatgtatgcaacatcagcagatgatcaaattcaagacctgaaagttgcactctcccttttgttgccaatgatctgttaagagcatctgagttccttttaagtctgacaaagacttcttcctcacttacctcccttccacattagtgatacactctcatgcagcacatcccttaatgagttgccctcatggatatttttggaagacatttggttaatgcatttttttatgctgatggcttttcagagacaaacttatgcaaatgatctaaagggaagtttttgctttcctctagttaaataacctgagcctgccatgcaaatagttgaataactttgttcctagttactgacatacaattcttaaaggaccatttagcattttggccaacaatgagtaattaggattagtacctttttgttttacagagtaactgagagttttgtaacatccagagatggtactagagccaatgagagatctgttcctagatgcactatttctttgaggaagagagagaagagaagtgtctggttgggggtgagggggtgcagacttttttgtttctatgtacagagcaaagagatagagtcacaaggaaagacaattaatgactttgagctcaaccaactgaactgcctttcttggagctgcacctggaccaagtttattttttaacaattataataacgatgatttaaaaaaagaaacctcccaaagcctataaactgaactagaagagttggtttcccactttagagtggatggcgacatcagcattgcttttgcccatggtgtttggggagagacttttcagtgataataaccactctactctgggttctgtgcatgcccagactaagccccatcgccttatttctggggtacatccagacctggcagggattctgccacactgtgcagcaaaccagcatgtaggctgggtaggagagcaagagatagagccatcagagtgatggggcttcttcacagtaagaacatcggagcttagaatgagagtctctttccaaaaacaggcattgttcatcttacgctaaacatcattgtctgcctggctacagtcaccaaaacaaaacagaaatgcaaaattatgcatcttcccatagtcctgaggcttcctttgccaatggaagggctagcaatgcattctccctctcatgaaagttaaatttccagagacttccttagattgctcaaaatgttaaagatatgtccatgtctgcaattcgccagtttcaggtcaaggcctactttcatcaatattgctcccagaagttttctgacaccagaatgccattcctgatcccagctctatttttaggccaccacgataacttctttggtttctcaactgagcatgcaaccatttatttaaaagactgtcattaatgagtagatgttttcgcgggtcgtgtgatgtgctttccatttactagtgttgctgtggctaagtacaatcaaattgaaccaccaacccttggttttgtagtaatataactatttattttcctagtgtagatgctttcagattagaattggcatttgcactgatttttttatgtagatttatataaatatatagatacatatatatttgcttgaagaatcaccaagcaaattggtgagagggtcttttccaatagaatttacacctccatttgttgtgttgtcttgcacttcccaatgttgatgtctctatggctccaatgaactggtgtattttgcagcaaatctgatgacttgtatggaaatggcatgaaagttacccagattacatctggtgcaaatgcactcggagcctggggccagactggtgctaacactgcaaactttgtccagagctctctccaacctgaaggcttgctgggggtgcaatgtcaccttcacacatgctgggccctttcagaaaagtgccagatcgtgtaactggtgctatttttcatgctctggtacaatgtgtagcaccacgggggtctcagctttaccaaaatcaaaattccatttgtcagctaagtgcagaggcatttgttttttgctctcctcccacagaattgtcggccatttatttgcaggccttttgcgggatttcttggctatttatttgcaggccttttttcccagccccaaattcttgggttggctctgtctgcttaaagagcctgtcttcacaaagctgcactcgggtgcctctgtgcgctgtcttagatcctactgccggcccttcaggactccgagccaggaaagaactctccaacctctggctcgagactctactttttttctcattcttttccttactctcctcctccttctacttccgactaattccatctctttttttttttgttcctctccttttcctattcctccttcccaccatctctgagttgttgactttctcctataatccttctctattccctttctctttttgtccacctctcctttagtctctgtttctctgcccttcttattcctcttctgtcctttctcctctcctcaaatctctgatcatcttctcccgtacatccctgtattgatttttctgtcctctaaagggctcatggctgattcagacagcaagtccatgcactggactaatgacacaaatactttaggtcgccgtttcacctactcagcccagaaagtaaagctgagcgtgaggccctgacctggagcctgctccagcccgcctcccggagccagcctgcaccgttgccctggcagcgatgatgcatgtgctgtgggccctgccggcgcctgagtgcctctgcctgaacactgctcctaagcgagcccactcccagcactaccgcatggctctgaggacattttctttcaataaaggcagactctggccccaattattctgatagcaaacctcttcctcctcattgaagccatgccatcaccttggtttggagagagacatttttttcccattcataagctttctttttcccatttttatgtgaagccccctctgcttttcagctggtgattgctctggtgagactgaatggacttgctggtgaaatgaaatctcttctttcctgtcttggtcctgcctaaattcctacaaatatatttaagccaaggactcaggctaattcctaagttgatcacattaatttgttactcctagagggaaaaagatcaattcccttgaagcatgtggagtacctcctgtgacagctgacttgccaggggactccctacagaattctgtgatatacattttacttctgtgtatgtatggtatatatggtatgtataccatgtacacacgttacattgagtatgaatgactgtggttggaaacacacacacacactcaagtctgtaaatatccttcctcactgaaacctgtgctttggaaatcatttcttgtacagctgtgcagtttcttgtaacagctgaggacaaagctaagacaggcggacaatttagacaaagatcatctaaagagtatagtatctccctagcaactcatgaggacagacaaccaagtggcaaggttgactcccaatgggatggcagacttttcttctctcctttttgagtttgtgtttcctaagtgtttcttaacttctgagtgcaccaggctgtacccgttagatcctttcaatatgacagttttgtgcttctctctgacaggatgtttctccaccgagctgtagcacaggatgggagggaggtgggaatactccttgcctaggctggagtttacagagacactgcacagcttacactcctgttaagtgtaaatattcaacacttccattccatttgtgtaaaaaataaagcacacacgattataaaatcaagatgtatatttcatactcagtgtgtctgtgcatatttattgcgtttctagttgtcagcggtgggtggccccattgtaaaaatgcctgatagagtgtttataaacatgtcatggttttattataagatataaatattaaaacattttatactttatggcaaa

SEQ ID NO: 117268 - protein, 767 aa, Artificial Sequence
  derived and/or modified sequence
MSQRPRAPRSALWLLAPPLLRWAPPLLTVLHSDLFQALLDILDYYEASLSESQKYRYQDEDTPPLEHSPAHLPNQANSPPVIVNTDTLEAPGYELQVNGTEGEMEYEEITLERGNSGLGFSIAGGTDNPHIGDDPSIFITKIIPGGAAAQDGRLRVNDSILFVNEVDVREVTHSAAVEALKEAGSIVRLYVMRRKPPAEKVMEIKLIKGPKGLGFSIAGGVGNQHIPGDNSIYVTKIIEGGAAHKDGRLQIGDKILAVNSVGLEDVMHEDAVAALKNTYDVVYLKVAKPSNAYLSDSYAPPDITTSYSQHLDNEISHSSYLGTDYPTAMTPTSPRRYSPVAKDLLGEEDIPREPRRIVIHRGSTGLGFNIVGGEDGEGIFISFILAGGPADLSGELRKGDQILSVNGVDLRNASHEQAAIALKNAGQTVTIIAQYKPEEYSRFEAKIHDLREQLMNSSLGSGTASLRSNPKRGFYIRALFDYDKTKDCGFLSQALSFRFGDVLHVIDASDEEWWQARRVHSDSETDDIGFIPSKRRVERREWSRLKAKDWGSSSGSQGREDSVLSYETVTQMEVHYARPIIILGPTKDRANDDLLSEFPDKFGSCVPHTTRPKREYEIDGRDYHFVSSREKMEKDIQAHKFIEAGQYNSHLYGTSVQSVREVAEQGKHCILDVSANAVRRLQAAHLHPIAIFIRPRSLENVLEINKRITEEQARKAFDRATKLEQEFTECFSAIVEGDSFEEIYHKVKRVIEDLSGPYIWVPARERL

SEQ ID NO: 117269 - protein, 767 aa, Artificial Sequence
  derived and/or modified sequence
MSQRPRAPRSALWLLAPPLLRWAPPLLTVLHSDLFQALLDILDYYEASLSESQKYRYQDEDTPPLEHSPAHLPNQANSPPVIVNTDTLEAPGYVLQVNGTEGEMEYEEITLERGNSGLGFSIAGGTDNPHIGDDPSIFITKIIPGGAAAQDGRLRVNDSILFVNEVDVREVTHSAAVEALKEAGSIVRLYVMRRKPPAEKVMEIKLIKGPKGLGFSIAGGVGNQHIPGDNSIYVTKIIEGGAAHKDGRLQIGDKILAVNSVGLEDVMHEDAVAALKNTYDVVYLKVAKPSNAYLSDSYAPPDITTSYSQHLDNEISHSSYLGTDYPTAMTPTSPRRYSPVAKDLLGEEDIPREPRRIVIHRGSTGLGFNIVGGEDGEGIFISFILAGGPADLSGELRKGDQILSVNGVDLRNASHEQAAIALKNAGQTVTIIAQYKPEEYSRFEAKIHDLREQLMNSSLGSGTASLRSNPKRGFYIRALFDYDKTKDCGFLSQALSFRFGDVLHVIDASDEEWWQARRVHSDSETDDIGFIPSKRRVERREWSRLKAKDWGSSSGSQGREDSVLSYETVTQMEVHYARPIIILGPTKDRANDDLLSEFPDKFGSCVPHTTRPKREYEIDGRDYHFVSSREKMEKDIQAHKFIEAGQYNSHLYGTSVQSVREVAEQGKHCILDVSANAVRRLQAAHLHPIAIFIRPRSLENVLEINKRITEEQARKAFDRATKLEQEFTECFSAIVEGDSFEEIYHKVKRVIEDLSGPYIWVPARERL

SEQ ID NO: 117270 - protein, 667 aa, Artificial Sequence
  derived and/or modified sequence
MSQRPRAPRSALWLLAPPLLRWAPPLLTVLHSDLFQALLDILDYYEASLSESQKYRYQDEDTPPLEHSPAHLPNQANSPPVIVNTDTLEAPGYELQVNGTEGEMEYEEITLERGNSGLGFSIAGGTDNPHIGDDPSIFITKIIPGGAAAQDGRLRVNDSILFVNEVDVREVTHSAAVEALKEAGSIVRLYVMRRKPPAEKVMEIKLIKGPKGLGFSIAGGVGNQHIPGDNSIYVTKIIEGGAAHKDGRLQIGDKILAVNSVGLEDVMHEDAVAALKNTYDVVYLKVAKPSNAYLSDSYAPPDITTSYSQHLDNEISHSSYLGTDYPTAMTPTSPRRYSPVAKDLLGEEDIPREPRRIVIHRGSTGLGFNIVGGEDGEGIFISFILAGGPADLSGELRKGDQILSVNGVDLRNASHEQAAIALKNAGQTVTIIAQYKPEEYSRFEAKIHDLREQLMNSSLGSGTASLRSNPKRGFYIRALFDYDKTKDCGFLSQALSFRFGDVLHVIDASDEEWWQARRVHSDSETDDIGFIPSKRRVERREWSRLKAKDWGSSSGSQGREDSVLSYETVTQMEVHYARPIIILGPTKDRANDDLLSEFPDKFGSCVPHTTRPKREYEIDGRDYHFVSSREKMEKDIQAHKFIEAGQYNSHLYGTSVQSVREVAEQRD

SEQ ID NO: 117271 - DNA, 2304 bp, Artificial Sequence
  derived and/or modified sequence
atgagccagcgcccgcgggcaccacgtagcgccctctggctcttggctccgcctctcctgcggtgggcccctccgctgctgacggtgctgcatagtgacttgttccaagccctgctggacattttagattactatgaagcgagcctgagcgaatcacagaaataccgttaccaggacgaagatacgccacctctggagcattctcccgcccatctcccaaaccaagcaaattctcctcctgtaatagtgaacaccgacacactggaagcacctggctacgagctccaggtcaatgggaccgaaggcgaaatggagtacgaggaaattactctcgagaggggcaattccggtctgggattctccattgctggcggcactgataatccccatattggcgacgatccctcgattttcatcaccaagatcatcccaggaggcgccgccgcacaggatggacgcctgcgggtaaatgactcaattctgtttgtgaacgaagttgatgttagagaagtcactcactccgccgcagttgaggctctgaaagaggcagggagcatagtacgcttgtacgtgatgaggcgcaaaccaccagccgaaaaggtaatggagataaaacttattaaaggccccaagggactcggcttttcgattgccgggggggttgggaaccagcacattcctggcgacaattccatctacgtgaccaaaatcatagagggaggtgctgcccacaaagatggacgtttgcagattggcgataagatcctggccgtaaactcagtcggactggaagatgtgatgcacgaggatgccgtggctgcactgaaaaacacatatgatgtggtgtacctgaaggtggccaaaccatcaaatgcttatttgtccgacagctacgctccacctgatatcaccacttcatactcacagcacctggacaacgagataagccattcgtcttacctggggacggattaccctactgctatgactccaacaagtccccgacgttacagccctgttgctaaggacttgctgggcgaggaggatatcccacgggagccccgccgtatcgttatccatagaggcagcaccggcctgggcttcaacattgtgggcggtgaggatggggaggggattttcatatcatttatcttggccgggggacctgctgacctttccggagaactccgcaagggagatcaaatcctgtccgtgaatggcgtcgacctgaggaacgcaagtcacgagcaggcagcgattgctctaaaaaatgcgggccagactgtcacaattatcgctcaatataaacctgaagaatactctcggtttgaagctaagatacacgacttgagggaacaactgatgaactcgagtctggggagtgggacagccagcctgagatctaatcccaaaagaggattctatatacgagctctcttcgattatgataaaacgaaagattgcggctttctctcccaggctctttcatttaggtttggggacgttcttcatgtgattgacgccagcgacgaggaatggtggcaagccaggagagttcatagtgacagcgagacagatgatatcggctttataccaagcaagcgccgggtcgaaaggcgcgagtggtcccgtctgaaggccaaggactggggcagctcttccggcagtcaggggagagaggactcagtgttgtcttatgagaccgtgactcagatggaagtccactatgcacggcctataattattctcgggccaacaaaagacagagcaaacgacgacctcctgtctgaattccctgacaaatttggatcttgtgtcccacacaccacgaggcctaagagagagtacgaaatcgacggcagggactaccactttgtttcttctcgtgagaaaatggagaaggatattcaggctcacaaatttattgaggctggtcaatataactctcacctctatgggacctcagtgcaatcagtgagagaggtagctgaacaggggaagcattgcatcctcgacgtgtctgctaacgcagtccgacgcctgcaggccgctcatctccacccaatcgccatttttatccgtcctagatcccttgaaaacgtgctggagattaataagagaataactgaagagcaggcccgcaaggcctttgacagagcgacaaaacttgagcaggaatttaccgagtgtttcagtgctatcgtggaaggcgactcatttgaggaaatctatcataaggtgaagcgggtgattgaggacctctccggtccttacatttgggtgccggcccgcgagaggctctag

SEQ ID NO: 117272 - DNA, 2304 bp, Artificial Sequence
  derived and/or modified sequence
atgtctcaaagaccccgtgcacctcggagcgctctgtggctgctggctcctcctctgcttagatgggctcccccattgctgacagtgctgcatagcgacctgttccaggcactgctagatattcttgattactacgaagcgtcattgtccgaatctcagaagtatcgataccaagatgaggacacacctcccctcgagcactcccctgcacacctaccaaatcaggcgaattctccgcccgtgattgtgaatactgacaccctggaagccccgggctatgtgctgcaggtcaatggcacagaaggggagatggagtacgaggaaatcactttagaacgggggaactctggtcttgggttctctatagctgggggtaccgacaatcctcatatcggcgacgacccttctatttttatcactaaaatcattccaggcggcgctgccgcgcaggatgggagactaagggttaacgattcgatactgtttgttaatgaggtagacgtgcgggaagtcacgcatagcgctgccgtagaggcactcaaggaggctggcagcatcgtgagattgtacgtaatgcgcaggaagccccctgcggagaaggtgatggaaattaaactgattaagggccctaaggggctcgggttcagcatcgctggcggcgtcgggaaccaacatatccctggggacaattcaatctacgttactaagattattgaaggaggagcagcacacaaggatggtcgactgcagattggtgacaaaatcctggccgtcaacagcgttggcctggaagacgtcatgcatgaggatgccgtggccgccttgaaaaatacttacgacgtagtctatctgaaagtagccaagccatctaacgcttacctctcagactcctatgcacctcccgatatcaccactagttactctcagcatctggataatgaaatttctcacagttcctacctcggcacagactacccgacagcgatgacaccaacaagtcctagaaggtatagtcctgtcgctaaggacctcctgggcgaagaagacattcccagagagccacggcgcattgtcattcatcgagggtccaccggactaggcttcaatattgtgggcggggaggatggtgagggaattttcatctcttttatcctcgccgggggaccagccgacctgtcgggagagctccgtaaaggcgatcaaattttatcagtgaacggggtggatttgaggaacgcatcacacgagcaggccgctatagccctgaaaaatgctgggcagacagtgaccataatagctcagtataaacccgaggagtatagtagattcgaagcgaaaattcacgacctgagagagcagctgatgaactcttcgctggggagcggcacagctagcctcaggtcaaatccaaagcggggcttctatattcgtgccctcttcgattacgataagacaaaggattgcggcttcctgtctcaagccctcagtttccggttcggggacgtcttacacgttatagatgctagcgacgaggagtggtggcaggcccgccgcgttcactccgattctgagaccgatgacattggattcatcccaagtaaacggcgtgtcgaacggcgcgagtggtcgcgcctcaaggcgaaagactggggaagctctagcggctcccagggccgcgaggactctgtgctgtcctatgaaacagtgacccaaatggaggtgcattacgcaaggccaatcatcatcttggggcccaccaaggaccgcgctaatgacgatctgttgagtgagttccccgacaaatttggctcgtgtgtgccccacacaacgcgtccgaaacgcgaatatgagatcgatggacgggactaccatttcgtgtcgtcccgagagaagatggaaaaggacattcaggcccacaaattcatcgaggccgggcagtacaacagccacctctatggaacctctgtccagtccgtgagggaagtggctgagcagggaaaacactgtatcttagacgtgagcgccaatgccgttcgcaggctgcaggccgcccatcttcacccaattgccatctttatcagacctcggtccctggagaatgtgcttgagatcaacaaacgcatcacagaggagcaagcaaggaaagctttcgacagggcaactaaactggagcaggaatttacagaatgtttctcagctattgtcgaaggtgacagcttcgaagaaatctaccacaaggtgaaaagagtgatcgaggacctttctggtccgtacatctgggttccggcgagggagcggctgtag

SEQ ID NO: 117273 - DNA, 2004 bp, Artificial Sequence
  derived and/or modified sequence
atgtcccagaggcctcgggctcctagatccgcactgtggcttctagcaccacccctgctgcgctgggcaccccccctgttaacagttctgcatagcgacctgtttcaggctttgctggatatactagactactatgaggctagcttgagtgaatcacagaagtaccggtaccaggatgaggacacaccgcccttggagcattctcccgcccacctgcccaaccaggcaaactctccgcccgtcattgtgaacactgataccctggaggcaccaggttacgagttacaggtgaacggcacagaaggcgaaatggagtacgaggaaataactctggagagggggaactctgggctgggattcagcatcgccggcgggacggacaacccacacattggcgatgacccaagcattttcatcaccaaaatcattcctggcggcgctgcagcccaggatggacgactacgggttaatgatagcatcctgtttgtgaacgaggtggatgtgagggaagtgacccatagtgctgctgtcgaggcccttaaagaggctgggagtatcgtccggctgtatgtgatgagacgaaagcctcccgcagagaaagtgatggaaatcaagttgatcaaaggccccaaaggtctgggcttctcaattgcaggcggtgtgggaaaccagcatatccccggtgacaactctatatatgtcacaaaaatcatcgaaggaggggccgcccacaaggatgggcgactgcagataggcgacaaaatcttggcagtaaactctgtcggcctagaggatgtgatgcatgaagacgccgtggctgctttaaagaatacatatgatgtcgtctatttgaaagtggctaagccctctaacgcatacctgtctgacagttatgcccccccagatattactacatcgtactctcagcatctggacaacgagatcagtcacagcagctacctcggcacggactatcccactgcaatgacccctactagccctcggagatacagcccagtagccaaagacctgttaggagaggaggatatccctcgagagccgcgacgcattgttatccatagagggtccacgggcttaggctttaatatcgtcggtggtgaagatggcgagggtatcttcatttcatttattctcgctggcggtccagctgatctgagcggagagcttagaaagggagaccagatcctctccgtcaatggtgtcgatctgagaaatgcatcccacgaacaggctgccattgccctcaagaatgcaggtcagactgtgaccatcatcgcgcaatataaaccagaagaatattccaggttcgaggccaagatacacgatctcagagagcagctaatgaatagttcgcttggcagcgggaccgcttcgcttcgaagcaaccctaaacgcggattttacattagggccctgtttgattacgacaagaccaaggattgtgggtttctctcacaggcactgtctttccgtttcggagacgttcttcacgttattgacgcttctgatgaggagtggtggcaggctcggcgcgtgcatagcgactccgaaaccgacgacattggttttataccatccaaacggcgagtcgagaggcgggagtggtcacgcctcaaagctaaggactggggctcttctagtggctcccagggccgagaggattcggtgctttcatacgagacagtgacacaaatggaagtgcactacgcccgtccaattatcattctcggacctactaaggatagagcaaacgacgatttgctgtcagaattccccgataaatttggtagctgtgtgcctcacaccactcgtccgaaaagagagtacgagatagatggccgcgactatcactttgtgtctagtcgggagaagatggaaaaagatatccaagcacataagtttattgaggctggccaatacaactctcatctttacggaactagtgtccagtctgtgcgcgaggtggctgagcaacgggactag

SEQ ID NO: 117274 - DNA, 2304 bp, Artificial Sequence
  derived and/or modified sequence
atgagccagaggccccgggcccccaggtctgccctgtggctgctggccccacccctgctgcgctgggccccacccctgctgactgtgctgcacagcgacctcttccaggccctgctggacatcctggactactatgaggccagcctgtctgagagccagaagtaccgctaccaggatgaggacaccccacccctggagcacagccctgcccacctgcccaaccaggccaacagcccccctgtgattgtgaacacagacaccctggaggcccctggctatgagctgcaggtgaatggaacagaaggagagatggagtatgaggagatcaccctggagcggggcaacagcggcctgggcttcagcattgctgggggcacagacaacccccacatcggagatgaccccagcatcttcatcaccaagatcatccctgggggcgccgccgcccaggacggccgcctgcgggtgaatgacagcatcctgtttgtgaatgaggtggatgtgcgggaggtgacccacagcgctgctgtggaggccctgaaggaggccggcagcatcgtgcggctgtatgtgatgaggaggaagcccccagctgagaaggtgatggagatcaagctgatcaagggccccaagggcctgggcttcagcattgctgggggcgtgggcaaccagcacatccctggggacaacagcatctacgtgaccaagatcatcgagggcggggccgcccacaaggatggccgcctgcagattggagacaagatcctggccgtgaacagcgtgggcctggaggatgtgatgcatgaagatgctgtggccgccctgaagaacacctatgatgtggtgtacctgaaggtggccaagcccagcaatgcctacctgagtgacagctatgcccccccagacatcaccaccagctacagccagcacctggacaatgagatcagccacagcagctacctgggcacagactaccccacagccatgacccccaccagcccccggcgctacagccctgtggccaaggacctgctgggggaggaggacatcccccgggagcccaggagaattgtcatccaccggggcagcacaggcctgggcttcaacatcgtgggcggggaggatggagagggcatcttcatctccttcatcctggccggcggccctgctgacctgtctggagagctgaggaagggggaccagatcctgtctgtgaatggagtggacctgagaaatgccagccatgagcaggccgccatcgccctgaagaatgccggccagacagtgaccatcatcgcccagtacaagccagaggagtacagcagatttgaggccaagatccatgacctgcgggagcagctgatgaacagcagcctgggcagcggcacagccagcctgcggagcaaccccaagaggggcttctacatccgggccctgtttgattatgacaagaccaaggactgtggcttcctgagccaggccctgtccttccgctttggagatgtgctgcacgtgattgatgccagtgatgaggagtggtggcaggccaggagagtgcacagcgacagcgagacagatgacatcggcttcatccccagcaagagaagagtggagcggcgggagtggagccggctgaaggccaaggactggggcagcagcagcggcagccagggccgggaggacagcgtgctgtcctatgagaccgtgacccagatggaggtgcactacgcccggcccatcatcatcctgggccccaccaaggaccgggccaatgatgacctgctgtctgagttcccagacaagtttggcagctgtgtgccccacaccacccggcccaagcgggagtatgaaattgatggccgggactaccactttgtgagcagccgggagaagatggagaaggacatccaggcccacaagttcatcgaggccggccagtacaacagccacctgtatggcacctctgtgcagagcgtgcgggaggtggccgagcagggcaagcactgcatcctggatgtgtctgccaatgctgtgcggcggctgcaggccgcccacctgcaccccatcgccatcttcatccggcccaggagcctggagaatgtgctggagatcaacaagaggatcacagaggagcaggccaggaaggcctttgaccgggccaccaagctggagcaggagttcacagagtgcttcagcgccatcgtggagggggacagctttgaggagatctaccacaaggtgaagagggtgattgaggacctgagcggcccctacatctgggtgcctgcccgggagcggctgtag

SEQ ID NO: 117275 - DNA, 2304 bp, Artificial Sequence
  derived and/or modified sequence
atgagccagaggccccgggcccccaggtctgccctgtggctgctggccccacccctgctgcgctgggccccacccctgctgactgtgctgcacagcgacctcttccaggccctgctggacatcctggactactatgaggccagcctgtctgagagccagaagtaccgctaccaggatgaggacaccccacccctggagcacagccctgcccacctgcccaaccaggccaacagcccccctgtgattgtgaacacagacaccctggaggcccctggctacgtgctgcaggtgaatggaacagaaggagagatggagtatgaggagatcaccctggagcggggcaacagcggcctgggcttcagcattgctgggggcacagacaacccccacatcggagatgaccccagcatcttcatcaccaagatcatccctgggggcgccgccgcccaggacggccgcctgcgggtgaatgacagcatcctgtttgtgaatgaggtggatgtgcgggaggtgacccacagcgctgctgtggaggccctgaaggaggccggcagcatcgtgcggctgtatgtgatgaggaggaagcccccagctgagaaggtgatggagatcaagctgatcaagggccccaagggcctgggcttcagcattgctgggggcgtgggcaaccagcacatccctggggacaacagcatctacgtgaccaagatcatcgagggcggggccgcccacaaggatggccgcctgcagattggagacaagatcctggccgtgaacagcgtgggcctggaggatgtgatgcatgaagatgctgtggccgccctgaagaacacctatgatgtggtgtacctgaaggtggccaagcccagcaatgcctacctgagtgacagctatgcccccccagacatcaccaccagctacagccagcacctggacaatgagatcagccacagcagctacctgggcacagactaccccacagccatgacccccaccagcccccggcgctacagccctgtggccaaggacctgctgggggaggaggacatcccccgggagcccaggagaattgtcatccaccggggcagcacaggcctgggcttcaacatcgtgggcggggaggatggagagggcatcttcatctccttcatcctggccggcggccctgctgacctgtctggagagctgaggaagggggaccagatcctgtctgtgaatggagtggacctgagaaatgccagccatgagcaggccgccatcgccctgaagaatgccggccagacagtgaccatcatcgcccagtacaagccagaggagtacagcagatttgaggccaagatccatgacctgcgggagcagctgatgaacagcagcctgggcagcggcacagccagcctgcggagcaaccccaagaggggcttctacatccgggccctgtttgattatgacaagaccaaggactgtggcttcctgagccaggccctgtccttccgctttggagatgtgctgcacgtgattgatgccagtgatgaggagtggtggcaggccaggagagtgcacagcgacagcgagacagatgacatcggcttcatccccagcaagagaagagtggagcggcgggagtggagccggctgaaggccaaggactggggcagcagcagcggcagccagggccgggaggacagcgtgctgtcctatgagaccgtgacccagatggaggtgcactacgcccggcccatcatcatcctgggccccaccaaggaccgggccaatgatgacctgctgtctgagttcccagacaagtttggcagctgtgtgccccacaccacccggcccaagcgggagtatgaaattgatggccgggactaccactttgtgagcagccgggagaagatggagaaggacatccaggcccacaagttcatcgaggccggccagtacaacagccacctgtatggcacctctgtgcagagcgtgcgggaggtggccgagcagggcaagcactgcatcctggatgtgtctgccaatgctgtgcggcggctgcaggccgcccacctgcaccccatcgccatcttcatccggcccaggagcctggagaatgtgctggagatcaacaagaggatcacagaggagcaggccaggaaggcctttgaccgggccaccaagctggagcaggagttcacagagtgcttcagcgccatcgtggagggggacagctttgaggagatctaccacaaggtgaagagggtgattgaggacctgagcggcccctacatctgggtgcctgcccgggagcggctgtag

SEQ ID NO: 117276 - DNA, 2004 bp, Artificial Sequence
  derived and/or modified sequence
atgagccagaggccccgggcccccaggtctgccctgtggctgctggccccacccctgctgcgctgggccccacccctgctgactgtgctgcacagcgacctcttccaggccctgctggacatcctggactactatgaggccagcctgtctgagagccagaagtaccgctaccaggatgaggacaccccacccctggagcacagccctgcccacctgcccaaccaggccaacagcccccctgtgattgtgaacacagacaccctggaggcccctggctatgagctgcaggtgaatggaacagaaggagagatggagtatgaggagatcaccctggagcggggcaacagcggcctgggcttcagcattgctgggggcacagacaacccccacatcggagatgaccccagcatcttcatcaccaagatcatccctgggggcgccgccgcccaggacggccgcctgcgggtgaatgacagcatcctgtttgtgaatgaggtggatgtgcgggaggtgacccacagcgctgctgtggaggccctgaaggaggccggcagcatcgtgcggctgtatgtgatgaggaggaagcccccagctgagaaggtgatggagatcaagctgatcaagggccccaagggcctgggcttcagcattgctgggggcgtgggcaaccagcacatccctggggacaacagcatctacgtgaccaagatcatcgagggcggggccgcccacaaggatggccgcctgcagattggagacaagatcctggccgtgaacagcgtgggcctggaggatgtgatgcatgaagatgctgtggccgccctgaagaacacctatgatgtggtgtacctgaaggtggccaagcccagcaatgcctacctgagtgacagctatgcccccccagacatcaccaccagctacagccagcacctggacaatgagatcagccacagcagctacctgggcacagactaccccacagccatgacccccaccagcccccggcgctacagccctgtggccaaggacctgctgggggaggaggacatcccccgggagcccaggagaattgtcatccaccggggcagcacaggcctgggcttcaacatcgtgggcggggaggatggagagggcatcttcatctccttcatcctggccggcggccctgctgacctgtctggagagctgaggaagggggaccagatcctgtctgtgaatggagtggacctgagaaatgccagccatgagcaggccgccatcgccctgaagaatgccggccagacagtgaccatcatcgcccagtacaagccagaggagtacagcagatttgaggccaagatccatgacctgcgggagcagctgatgaacagcagcctgggcagcggcacagccagcctgcggagcaaccccaagaggggcttctacatccgggccctgtttgattatgacaagaccaaggactgtggcttcctgagccaggccctgtccttccgctttggagatgtgctgcacgtgattgatgccagtgatgaggagtggtggcaggccaggagagtgcacagcgacagcgagacagatgacatcggcttcatccccagcaagagaagagtggagcggcgggagtggagccggctgaaggccaaggactggggcagcagcagcggcagccagggccgggaggacagcgtgctgtcctatgagaccgtgacccagatggaggtgcactacgcccggcccatcatcatcctgggccccaccaaggaccgggccaatgatgacctgctgtctgagttcccagacaagtttggcagctgtgtgccccacaccacccggcccaagcgggagtatgaaattgatggccgggactaccactttgtgagcagccgggagaagatggagaaggacatccaggcccacaagttcatcgaggccggccagtacaacagccacctgtatggcacctctgtgcagagcgtgcgggaggtggccgagcagagggactag

SEQ ID NO: 117277 - DNA, 2304 bp, Artificial Sequence
  derived and/or modified sequence
atgagccagcggccccgggccccccggagcgccctgtggctgctggcacctccactcctcagatgggcgcccccactgctgacggtccttcactccgacctctttcaagctctgctcgacattttggactactacgaagcgagccttagtgagagccagaaataccgctaccaggatgaggacacccccccactggaacatagtccggcacatctgccaaatcaggcaaactccccccccgttatcgtgaatacagacactctcgaagcgcctggctatgagctccaagtaaatgggaccgagggggaaatggaatatgaggagatcacattggaacgtggcaatagcggccttggctttagcatcgctggggggacagataaccctcacattggagacgacccaagtattttcatcactaagattattcccggaggcgctgcggctcaggatggaaggttgagagtgaatgatagcatcctgttcgtgaacgaagtcgatgtccgcgaggttacacactctgcagctgtggaggcactgaaggaggccgggtccattgtccggttgtatgttatgaggcggaagcctccggccgaaaaagttatggagattaagctcattaaggggccaaagggcttggggtttagtatcgccggtggcgtgggtaatcagcacattcctggcgacaatagtatctacgtgaccaaaatcatcgaaggaggggccgcccataaagacgggcgcttgcagatcggggacaagatactagctgtgaatagtgtgggcctagaggatgtaatgcatgaagatgccgtggccgccttgaaaaatacctatgatgtggtctatcttaaggtggcaaaaccatctaatgcgtatctgagcgatagctacgcccccccagatatcactacaagttattctcagcatctggataatgagataagccacagttcttacttaggtacagactacccaactgccatgactcctacaagccctcgaaggtatagccccgtagctaaggaccttctgggggaggaggatataccacgcgaacctcggagaattgtcatacataggggctctaccggcctcgggttcaacatcgtggggggtgaggatggggagggcatatttatcagttttatcctggcaggggggcctgctgatctgtcaggagaactacggaagggagatcagatcttgagtgttaacggagtggaccttaggaacgcctctcacgagcaagcagctatcgcactgaaaaatgccggtcagactgttacaatcatcgcacagtataaaccagaggaatatagtagattcgaggctaaaatccacgacttgagagaacagctcatgaacagttcactcggctcaggtacagcctccctgaggtcgaacccaaagcgaggattttatattcgtgcactgttcgactatgacaagacaaaggactgcgggttcttgtctcaggccttgagctttcgtttcggcgatgtgcttcacgtgatcgacgcatcggacgaggagtggtggcaggcacggcgggtccactccgattcagagactgacgacattgggtttatcccaagcaagagaagagtcgaaaggcgcgagtggtctaggctgaaggccaaagactgggggtcctctagcggcagccaaggtagggaagattctgtgctgagctatgagaccgtgacccagatggaagtgcattacgctcgccctataatcattcttggcccgacaaaggatcgcgcaaatgatgaccttctctcggaatttccagataagttcgggtcctgtgtgccccataccaccagacctaagcgggaatatgagatagacggcagggattatcatttcgtcagtagcagagagaagatggagaaagatatccaggctcacaagttcatcgaagctggccagtacaatagccatctgtatggcacaagcgtgcagtcagtccgtgaggtggccgagcagggaaagcattgcatcttggacgtgagtgcaaatgcagtccgcaggctccaggctgcacacctgcatcctattgctattttcatcagaccacggtcccttgaaaatgtgcttgagatcaataagcgcattaccgaagagcaggcccgcaaagccttcgatcgggctaccaaattggaacaggaatttacagaatgttttagcgccatagtggaaggggactcctttgaggaaatttaccacaaggtgaaacgcgtcatagaagatctgtctggaccttatatttgggtgcctgctagggaacggctgtag

SEQ ID NO: 117278 - DNA, 2304 bp, Artificial Sequence
  derived and/or modified sequence
atgagccagcggccccgggccccccggagcgccctgtggctgctggccccacctttactccggtgggcacccccattgctaaccgtgcttcactccgatctgttccaagccttgctggatatcctggactactacgaggcttcgctgagcgaaagccagaaataccgttaccaggacgaagatacccccccgctggagcatagcccagcccacctgccgaaccaagctaatagcccaccggtgattgtgaacactgacaccttggaagcgcccggatacgtgttgcaggtgaacgggactgagggagaaatggaatacgaggagatcactctcgagcgcggcaattcgggactcggtttctcaatcgccggtgggaccgataacccacatattggtgatgacccatctatctttattacaaaaatcatcccaggaggcgcagctgcacaggatgggcgcctgagggtgaatgactccatcctgttcgtaaatgaagtggacgtgcgcgaggtaacacactccgctgccgtggaggctctcaaggaagctggatccatcgtcagactgtatgtgatgcggcgtaagcccccggccgaaaaggttatggagattaagttgatcaagggccccaaggggctcgggttcagtatagctgggggagtgggaaatcagcatattcccggcgacaactctatatacgtgaccaagattattgaaggcggcgccgcacataaggatggcaggctccagattggcgacaagattctggcagtgaactctgtcggtttggaggacgtcatgcacgaggatgcagtggctgccttgaaaaacacctacgacgtcgtctatttaaaagtggctaaacccagtaatgcctacctgtctgatagctatgcccctcctgacataaccacatcttattctcagcacctagacaacgagatctcacattccagttacctgggaacagactaccctactgcgatgacccctacgagtcctcggcgttactcacctgtcgctaaagacctcctgggagaggaggatatccctagagagccgcggcgcatcgtgattcatagagggagtactggtctgggattcaatatagttggtggggaggacggggagggcattttcatttcattcattctggctgggggccccgccgacttgagtggcgaattacggaaaggtgaccagattttgagcgtaaacggagtggatctgcgaaacgcttcacatgaacaggccgcaattgctctgaagaacgcaggtcaaactgtgacgattatagcacaatataagccggaggagtattcccgctttgaggccaagattcacgatctgcgggagcagcttatgaattcatccctcggctccggaacggcaagcctcaggagcaaccccaagcgcggattctatatacgggctctgtttgactacgacaaaacaaaggactgtgggttccttagccaagcactcagttttcggtttggtgacgtgctgcacgttatcgatgcatcagacgaagagtggtggcaggcaaggcgggtgcacagcgatagcgagacggacgacatcggcttcatcccgtctaagcggcgcgttgagagacgcgagtggtctaggctcaaggctaaggattggggatcatccagtgggagtcagggacgcgaggattctgtgctctcttacgagacagtgacccagatggaggtgcattacgcgaggccaatcattattctgggtcccaccaaagatagggctaacgatgatctgctgagcgagttcccagacaagtttggaagttgcgtcccccacaccacccgtcctaagcgcgaatacgaaattgatggtagggattaccatttcgtcagctcaagagaaaagatggaaaaagatatacaagctcataaattcatcgaagctggtcagtataattcccatctgtacggaacaagtgttcagagcgtgagagaggtcgctgagcagggcaaacactgcatcttggacgtatcggccaacgctgtccgtcgcttgcaggctgcccatctgcacccaatcgccatctttatccgacctaggtcgttggagaatgtgctggaaattaacaaaaggatcactgaggagcaagcacgaaaagcttttgaccgcgctactaaattggagcaggagtttaccgagtgtttttctgcaatcgtcgagggggattcattcgaggagatctaccataaggtgaagagggttatcgaggacctttcgggaccctacatctgggttccagctagagaaaggctttag

SEQ ID NO: 117279 - DNA, 2004 bp, Artificial Sequence
  derived and/or modified sequence
atgagccagcggccccgggccccccggagcgccctgtggctgctggctcctccgctgctgaggtgggcacctccactcctgacggtgctgcactcagacctctttcaagcgttgctggacattttggattactacgaagcaagtctgtcagaatctcagaagtaccgttatcaggatgaggacacccctcccctggaacactcccccgcccatttgcccaaccaggctaattccccaccagtgatcgttaacaccgatactttagaggccccaggatatgagcttcaagtaaacggaacagaaggtgagatggagtatgaagaaattacccttgagcgtggaaactccggactcggcttttctattgccgggggcacggacaatccccatatcggggacgacccatcaattttcattacaaagataattccagggggcgctgcagcacaggacggtcgactgcgggtgaacgactccatcctctttgtgaacgaggtggacgtgagggaagtgacccattccgccgcggtcgaggccctgaaagaagccggctcaatagtccgtctgtacgtcatgcgccggaagcctcctgccgagaaggtcatggaaatcaagcttattaagggccctaagggcttgggattttccatcgccggcggggtggggaatcagcacatccctggtgacaactccatatatgtgacaaaaattattgagggcggtgctgctcataaggatggaaggttacagattggagacaaaatcctggctgtgaactctgtggggttggaggatgtgatgcatgaggacgccgtggccgccttgaaaaacacctacgatgtcgtctacttgaaggtagcgaagccttcgaacgcgtaccttagtgattcctacgcacccccggatatcacgacctcttactcacagcacttagacaatgaaatcagccactcctcctacctgggcactgattacccaacagccatgactcccacatcccctaggaggtactcgcccgtggctaaggaccttctgggggaagaggatataccgcgcgaacctcgacgaattgtaattcaccgcggctcgaccggccttggctttaatatcgtgggcggcgaggatggggaaggtatcttcatcagctttattctggctggtggtcccgccgacctctccggggaattacgcaagggggaccaaattctaagcgtgaatggagtggatctgagaaacgcctctcacgaacaggctgcgattgccctgaagaatgctgggcagaccgttactatcatcgcacagtacaaacctgaggagtactccaggttcgaagccaagatccacgacctccgcgagcagttgatgaactctagcctcggtagtggaaccgccagccttcgtagtaacccgaaaaggggcttctatatcagggctctcttcgactacgataagacaaaagactgtggatttctctcccaggcactgtcttttcgtttcggcgacgtgttgcatgtgattgacgcgagcgatgaagagtggtggcaggctaggagggtccactcggatagtgaaaccgatgacatcggctttatacctagtaaaagacgcgttgaacgaagagagtggtctaggctgaaggctaaagattggggttcaagttctggcagccagggtagggaagatagcgtcctgagctacgaaacagtgacacaaatggaagtgcactatgcacgcccaataatcattctcggcccaacaaaggacagggctaatgacgatctgctgagcgaatttcctgataaattcgggtcctgtgtgcctcatacaactcggcctaagagggagtatgagattgatgggcgtgactatcactttgtttcaagtcgcgagaagatggaaaaagatatccaggctcataagtttatagaggccgggcagtacaatagtcacctttatggaacgtcggttcagtcagtcagagaggtggctgagcagcgcgattag

SEQ ID NO: 117280 - DNA, 2304 bp, Artificial Sequence
  derived and/or modified sequence
atgtcacagagacccagagctcccaggagtgccctgtggctcctggcccctccattgctaaggtgggcccctcccctccttacagtgttgcatagcgacttgtttcaggccctgcttgacatcctggattactatgaagcatctctcagtgagagccaaaaataccgctatcaggatgaggacacacctcccttggagcactctcctgctcatttgccaaaccaggccaattctccccctgtgatcgtgaatacagacactctggaggcgcctggctatgaactccaggtaaatgggacagaaggggaaatggagtacgaggagataacattggaaaggggtaactcagggctaggattctcgattgctggaggcaccgacaacccccacatcggtgacgaccccagcatcttcataacaaaaataatccctgggggtgcagcagcacaggatggacgcttgcgggtgaatgacagcattctgttcgtcaacgaggtcgatgtgcgagaagtgacacactcagccgcagtcgaggccctcaaagaagcgggaagcatagtgcgtctgtatgtgatgaggaggaagccacccgcagaaaaagtgatggagatcaaactgataaaaggccctaagggtctagggttttcaattgctggaggggttggaaaccagcacattcctggggacaactctatttacgtcacgaagatcatcgagggcggtgctgctcataaggacggacgcctccagattggcgacaaaatcctcgccgtgaattcagtgggactggaggacgtgatgcacgaggacgccgtcgccgctcttaagaatacatacgacgtggtctacctgaaagtcgctaagccaagcaatgcgtatcttagcgactcctatgcacctccagacattacaacatcctactctcagcacttagacaatgagatctcccatagtagctacctgggcacagattacccgacggcaatgactcctacaagtccccgtcggtacagtccagtggctaaggacttactgggtgaagaggatatccctcgagagccaagacgcatagtgatccacaggggctccactggcctgggcttcaacatcgtcggtggcgaagatggagagggaatttttatctccttcatattggctggaggtccagctgatctgagtggcgagctgcgcaagggggaccagatcctttctgtgaatggagttgatctgaggaatgcatcccacgagcaagctgccatagctctaaaaaacgcgggacagaccgtgactataattgcccaatataagcccgaggagtatagccgcttcgaagcgaaaatccacgacctgagagaacaactgatgaactcttccctcggctcagggacagcatctctccggagcaatccaaagcggggtttctatatcagagctctattcgactatgacaagacaaaagactgtggttttctaagccaggcattatcattccgttttggagacgtgctccacgtgattgacgctagcgatgaggaatggtggcaggcccgacgtgtgcactcagacagtgagaccgacgatattggctttattcctagcaagaggcgcgtcgagaggagggaatggtcccgcttgaaggccaaagattggggaagcagctctggaagccagggaagggaggatagcgtcctatcttacgagacagtcacacagatggaggtacactatgcacgccctataattattctcggcccaaccaaggacagggccaatgacgacttgctgtccgaattccctgacaaattcgggtcctgcgtccctcatactactcggcctaaacgcgaatacgaaattgatgggagggattatcatttcgttagttcaagggaaaagatggagaaagatatccaagcccataaatttatagaagccggacaatataacagccacctgtacggtacttccgtccagtcagtgcgtgaggttgcagagcagggaaaacattgcattctggatgtgtcggcaaacgcggtcagacggctgcaggcagcgcacctgcatcctatcgcaatttttatccggccacgttctcttgaaaacgtactcgagattaataaaagaattactgaggaacaagcgaggaaagccttcgacagggccacaaagctggagcaagagttcaccgagtgtttcagtgccattgttgaaggcgattcatttgaagagatttaccacaaggtcaagagggtgattgaggatctgtcaggtccttacatttgggtgcccgctagggaacgcttgtag

SEQ ID NO: 117281 - DNA, 2304 bp, Artificial Sequence
  derived and/or modified sequence
atgagtcagaggcccagggcgccacggtcagcgttgtggctcctagcccctcctctgttacgttgggcaccacccctgctgaccgtgctccattctgacttattccaggccctcctggacatacttgattattatgaagcgagcctctcagaaagtcagaagtaccgctaccaggatgaagacactccgcctctcgaacactcccctgcgcacctgcccaatcaagctaactccccaccagttatcgtcaatactgacactctggaggccccaggttacgttttacaggtaaatgggacggagggggaaatggagtacgaggaaatcactttagagcgcggtaactccggccttggcttttctattgccggagggacagataacccccacattggggacgatccctctattttcatcaccaagattatcccaggaggcgcagcggctcaggacgggaggctgagggtcaatgacagtattctgttcgttaatgaagtggatgtgcgcgaggtgactcattcagccgcagtggaggcactgaaagaggccggttctatcgttaggctgtatgtcatgcgcagaaagcctcccgcagagaaggttatggagattaagttaattaaagggcctaagggcctgggttttagtattgccggaggagtcggaaaccagcacatccccggtgataactctatctatgtgaccaagattattgagggaggagccgcacacaaggacgggcgactccagattggcgataagatcctcgcggtcaacagcgtcgggctagaagatgttatgcacgaagacgcagtcgccgctctgaaaaacacctatgacgtcgtatacctcaaggtggccaaaccttcgaatgcctacctgtccgactcatatgcaccacccgacatcacgacatcctacagccaacacttggataacgaaatcagccactctagctacctcggcacagactatcccaccgctatgacgcccacatcgcccagaaggtattcccccgtggctaaggacctgctcggagaggaagacataccacgggaacccaggcggattgtcattcatcgaggcagcactggactgggcttcaatatcgttgggggtgaggacggcgaaggaatctttatttccttcatcttggcaggcggtcctgctgatttaagtggagaactacgcaagggagatcaaatcttatccgtaaacggcgtcgatctgagaaatgcaagccatgaacaggccgctatcgccctcaagaacgccggacagacagtgacaataattgcgcaatacaagcccgaggaatacagtcggtttgaggcgaagattcacgaccttcgggagcagctgatgaacagttcacttgggtccggcactgcctctttacgttccaaccctaaaagaggcttttatattcgtgccctgtttgactacgataagactaaagactgcgggttcctatctcaggctctcagctttcgatttggggatgtgctgcacgtgatagatgccagcgacgaagagtggtggcaagctaggcgcgtccacagtgatagtgaaacggacgacatcgggttcattccttctaagcgtcgagttgaacggagagaatggtccagattaaaggccaaagactggggtagcagttcaggaagccaaggcagggaagactcagtactcagctatgagaccgtaacacaaatggaggtgcactatgctcgccctattataatcctcgggccaacaaaagatagggctaatgatgacctgttgagcgagttcccggataagttcggttcgtgcgtcccgcacacaactcgcccaaagcgcgaatatgaaatcgacggcagggactaccatttcgtctcgtcccgcgaaaaaatggaaaaggatattcaggcccacaagtttatcgaggccggacagtataactcacacttatacggcacctccgtgcagagcgttcgcgaggtcgctgaacagggaaagcattgcatacttgatgtctccgctaatgcggttcgacgactgcaggcagcacatttgcaccctattgcaatctttatccggcctcgatctctcgagaacgtgcttgagattaataaaaggatcaccgaggagcaggcacgcaaagccttcgacagagccacaaagctggaacaggagttcaccgagtgcttctccgctatcgttgagggggacagctttgaggagatctaccacaaagtgaagcgtgtgatcgaggatcttagcggaccctacatttgggtgccagcccgtgagaggctctag

SEQ ID NO: 117282 - DNA, 2004 bp, Artificial Sequence
  derived and/or modified sequence
atgagtcagcggccaagggctcccagatcggcactctggctgctggccccaccactattacgttgggcccctccacttctgacggtcttgcacagcgacctcttccaggctcttttagatatcctcgattactacgaagccagtttgtcagaaagtcaaaaatatcgctatcaggatgaggacacccccccacttgaacactcccctgcccatctgcctaaccaagccaatagtcctccggtgatcgtgaatactgacaccttagaggcccctgggtacgagctacaggtcaatggcactgaaggcgagatggaatatgaggagattaccctggaacgcggaaactccgggctgggttttagcattgctgggggaacagacaatccgcatatcggcgacgatccaagcattttcatcactaagatcattccagggggagctgctgcacaggacggaagattgcgcgtgaatgacagcattctttttgtaaatgaggtggatgtgcgcgaggtaacgcactcggcagcggtggaagccctgaaggaggccggttccatagtgagactgtacgtaatgcgcaggaaacctcctgccgaaaaggtgatggagattaaactaattaagggtccaaagggccttggattttctatcgccggaggtgttggcaaccagcacattccaggagacaactctatatatgtaacgaagataatcgagggtggcgcagcgcataaagatggcaggttgcagataggtgataaaatcctagctgtcaatagtgttggattggaggacgttatgcacgaggacgctgtcgctgctcttaaaaatacatacgatgtggtctatttaaaggttgcaaagccttctaatgcatacctgtcagattcctacgctccacccgacatcaccacctcttacagtcagcaccttgataacgaaatcagccactcatcctacttgggaaccgattacccgactgcgatgacaccaacctctcccagacggtacagccccgtcgcaaaagatctgctgggggaagaagacatccctagagagccccgacggatcgtaatccatcgaggctctactggcctggggtttaacattgtgggaggggaagatggagaaggaatctttatctctttcatcctggctggcggaccggctgatctatccggtgaattgaggaagggagatcagatcctgagcgtgaacggagtggacttgcgaaatgcctctcacgaacaagcagcaatcgcgctaaaaaacgctggacagacggtgaccatcatcgcgcagtacaagccggaagagtacagtaggttcgaggcaaaaatccatgacctcagggaacagctgatgaatagctcactgggttctggaactgccagcttgaggagcaatcctaaacggggtttttacatacgcgctttgttcgattatgataagacgaaggattgcggcttcttgtcgcaggctctcagcttcaggttcggcgatgtgctgcatgtcatcgatgcctcagacgaggaatggtggcaggctcgaagggtgcacagcgactcggaaactgatgacataggtttcatcccaagcaagaggagggtggaacgtcgagaatggtcacgcctcaaggcaaaagactgggggtccagcagcgggagtcagggacgcgaggattcagttctctcctacgaaacagtgacccaaatggaagtccattacgctcgaccaatcataatcctcgggcctaccaaggacagggcgaacgatgacctgctcagtgagttccctgacaaatttgggtcatgtgtgccacacaccactcgccctaaaagggaatacgaaatcgacggaagagattaccacttcgtgtccagcagagaaaagatggaaaaggacattcaggcccacaaattcatcgaggctgggcaatacaacagtcatctgtacggcacaagcgtgcagtccgtgcgggaggttgctgaacagagagattag

SEQ ID NO: 117283 - DNA, 2304 bp, Artificial Sequence
  derived and/or modified sequence
atgagccagagacccagagcccccagaagcgccctgtggctgctggccccccccctgctgagatgggccccccccctgctgaccgtgctgcacagcgacctgttccaggccctgctggacatcctggactactacgaggccagcctgagcgagagccagaagtacagataccaggacgaggacaccccccccctggagcacagccccgcccacctgcccaaccaggccaacagcccccccgtgatcgtgaacaccgacaccctggaggcccccggctacgagctgcaggtgaacggcaccgagggcgagatggagtacgaggagatcaccctggagagaggcaacagcggcctgggcttcagcatcgccggcggcaccgacaacccccacatcggcgacgaccccagcatcttcatcaccaagatcatccccggcggcgccgccgcccaggacggcagactgagagtgaacgacagcatcctgttcgtgaacgaggtggacgtgagagaggtgacccacagcgccgccgtggaggccctgaaggaggccggcagcatcgtgagactgtacgtgatgagaagaaagccccccgccgagaaggtgatggagatcaagctgatcaagggccccaagggcctgggcttcagcatcgccggcggcgtgggcaaccagcacatccccggcgacaacagcatctacgtgaccaagatcatcgagggcggcgccgcccacaaggacggcagactgcagatcggcgacaagatcctggccgtgaacagcgtgggcctggaggacgtgatgcacgaggacgccgtggccgccctgaagaacacctacgacgtggtgtacctgaaggtggccaagcccagcaacgcctacctgagcgacagctacgccccccccgacatcaccaccagctacagccagcacctggacaacgagatcagccacagcagctacctgggcaccgactaccccaccgccatgacccccaccagccccagaagatacagccccgtggccaaggacctgctgggcgaggaggacatccccagagagcccagaagaatcgtgatccacagaggcagcaccggcctgggcttcaacatcgtgggcggcgaggacggcgagggcatcttcatcagcttcatcctggccggcggccccgccgacctgagcggcgagctgagaaagggcgaccagatcctgagcgtgaacggcgtggacctgagaaacgccagccacgagcaggccgccatcgccctgaagaacgccggccagaccgtgaccatcatcgcccagtacaagcccgaggagtacagcagattcgaggccaagatccacgacctgagagagcagctgatgaacagcagcctgggcagcggcaccgccagcctgagaagcaaccccaagagaggcttctacatcagagccctgttcgactacgacaagaccaaggactgcggcttcctgagccaggccctgagcttcagattcggcgacgtgctgcacgtgatcgacgccagcgacgaggagtggtggcaggccagaagagtgcacagcgacagcgagaccgacgacatcggcttcatccccagcaagagaagagtggagagaagagagtggagcagactgaaggccaaggactggggcagcagcagcggcagccagggcagagaggacagcgtgctgagctacgagaccgtgacccagatggaggtgcactacgccagacccatcatcatcctgggccccaccaaggacagagccaacgacgacctgctgagcgagttccccgacaagttcggcagctgcgtgccccacaccaccagacccaagagagagtacgagatcgacggcagagactaccacttcgtgagcagcagagagaagatggagaaggacatccaggcccacaagttcatcgaggccggccagtacaacagccacctgtacggcaccagcgtgcagagcgtgagagaggtggccgagcagggcaagcactgcatcctggacgtgagcgccaacgccgtgagaagactgcaggccgcccacctgcaccccatcgccatcttcatcagacccagaagcctggagaacgtgctggagatcaacaagagaatcaccgaggagcaggccagaaaggccttcgacagagccaccaagctggagcaggagttcaccgagtgcttcagcgccatcgtggagggcgacagcttcgaggagatctaccacaaggtgaagagagtgatcgaggacctgagcggcccctacatctgggtgcccgccagagagagactgtag

SEQ ID NO: 117284 - DNA, 2304 bp, Artificial Sequence
  derived and/or modified sequence
atgagccagagacccagagcccccagaagcgccctgtggctgctggccccccccctgctgagatgggccccccccctgctgaccgtgctgcacagcgacctgttccaggccctgctggacatcctggactactacgaggccagcctgagcgagagccagaagtacagataccaggacgaggacaccccccccctggagcacagccccgcccacctgcccaaccaggccaacagcccccccgtgatcgtgaacaccgacaccctggaggcccccggctacgtgctgcaggtgaacggcaccgagggcgagatggagtacgaggagatcaccctggagagaggcaacagcggcctgggcttcagcatcgccggcggcaccgacaacccccacatcggcgacgaccccagcatcttcatcaccaagatcatccccggcggcgccgccgcccaggacggcagactgagagtgaacgacagcatcctgttcgtgaacgaggtggacgtgagagaggtgacccacagcgccgccgtggaggccctgaaggaggccggcagcatcgtgagactgtacgtgatgagaagaaagccccccgccgagaaggtgatggagatcaagctgatcaagggccccaagggcctgggcttcagcatcgccggcggcgtgggcaaccagcacatccccggcgacaacagcatctacgtgaccaagatcatcgagggcggcgccgcccacaaggacggcagactgcagatcggcgacaagatcctggccgtgaacagcgtgggcctggaggacgtgatgcacgaggacgccgtggccgccctgaagaacacctacgacgtggtgtacctgaaggtggccaagcccagcaacgcctacctgagcgacagctacgccccccccgacatcaccaccagctacagccagcacctggacaacgagatcagccacagcagctacctgggcaccgactaccccaccgccatgacccccaccagccccagaagatacagccccgtggccaaggacctgctgggcgaggaggacatccccagagagcccagaagaatcgtgatccacagaggcagcaccggcctgggcttcaacatcgtgggcggcgaggacggcgagggcatcttcatcagcttcatcctggccggcggccccgccgacctgagcggcgagctgagaaagggcgaccagatcctgagcgtgaacggcgtggacctgagaaacgccagccacgagcaggccgccatcgccctgaagaacgccggccagaccgtgaccatcatcgcccagtacaagcccgaggagtacagcagattcgaggccaagatccacgacctgagagagcagctgatgaacagcagcctgggcagcggcaccgccagcctgagaagcaaccccaagagaggcttctacatcagagccctgttcgactacgacaagaccaaggactgcggcttcctgagccaggccctgagcttcagattcggcgacgtgctgcacgtgatcgacgccagcgacgaggagtggtggcaggccagaagagtgcacagcgacagcgagaccgacgacatcggcttcatccccagcaagagaagagtggagagaagagagtggagcagactgaaggccaaggactggggcagcagcagcggcagccagggcagagaggacagcgtgctgagctacgagaccgtgacccagatggaggtgcactacgccagacccatcatcatcctgggccccaccaaggacagagccaacgacgacctgctgagcgagttccccgacaagttcggcagctgcgtgccccacaccaccagacccaagagagagtacgagatcgacggcagagactaccacttcgtgagcagcagagagaagatggagaaggacatccaggcccacaagttcatcgaggccggccagtacaacagccacctgtacggcaccagcgtgcagagcgtgagagaggtggccgagcagggcaagcactgcatcctggacgtgagcgccaacgccgtgagaagactgcaggccgcccacctgcaccccatcgccatcttcatcagacccagaagcctggagaacgtgctggagatcaacaagagaatcaccgaggagcaggccagaaaggccttcgacagagccaccaagctggagcaggagttcaccgagtgcttcagcgccatcgtggagggcgacagcttcgaggagatctaccacaaggtgaagagagtgatcgaggacctgagcggcccctacatctgggtgcccgccagagagagactgtag

SEQ ID NO: 117285 - DNA, 2004 bp, Artificial Sequence
  derived and/or modified sequence
atgagccagagacccagagcccccagaagcgccctgtggctgctggccccccccctgctgagatgggccccccccctgctgaccgtgctgcacagcgacctgttccaggccctgctggacatcctggactactacgaggccagcctgagcgagagccagaagtacagataccaggacgaggacaccccccccctggagcacagccccgcccacctgcccaaccaggccaacagcccccccgtgatcgtgaacaccgacaccctggaggcccccggctacgagctgcaggtgaacggcaccgagggcgagatggagtacgaggagatcaccctggagagaggcaacagcggcctgggcttcagcatcgccggcggcaccgacaacccccacatcggcgacgaccccagcatcttcatcaccaagatcatccccggcggcgccgccgcccaggacggcagactgagagtgaacgacagcatcctgttcgtgaacgaggtggacgtgagagaggtgacccacagcgccgccgtggaggccctgaaggaggccggcagcatcgtgagactgtacgtgatgagaagaaagccccccgccgagaaggtgatggagatcaagctgatcaagggccccaagggcctgggcttcagcatcgccggcggcgtgggcaaccagcacatccccggcgacaacagcatctacgtgaccaagatcatcgagggcggcgccgcccacaaggacggcagactgcagatcggcgacaagatcctggccgtgaacagcgtgggcctggaggacgtgatgcacgaggacgccgtggccgccctgaagaacacctacgacgtggtgtacctgaaggtggccaagcccagcaacgcctacctgagcgacagctacgccccccccgacatcaccaccagctacagccagcacctggacaacgagatcagccacagcagctacctgggcaccgactaccccaccgccatgacccccaccagccccagaagatacagccccgtggccaaggacctgctgggcgaggaggacatccccagagagcccagaagaatcgtgatccacagaggcagcaccggcctgggcttcaacatcgtgggcggcgaggacggcgagggcatcttcatcagcttcatcctggccggcggccccgccgacctgagcggcgagctgagaaagggcgaccagatcctgagcgtgaacggcgtggacctgagaaacgccagccacgagcaggccgccatcgccctgaagaacgccggccagaccgtgaccatcatcgcccagtacaagcccgaggagtacagcagattcgaggccaagatccacgacctgagagagcagctgatgaacagcagcctgggcagcggcaccgccagcctgagaagcaaccccaagagaggcttctacatcagagccctgttcgactacgacaagaccaaggactgcggcttcctgagccaggccctgagcttcagattcggcgacgtgctgcacgtgatcgacgccagcgacgaggagtggtggcaggccagaagagtgcacagcgacagcgagaccgacgacatcggcttcatccccagcaagagaagagtggagagaagagagtggagcagactgaaggccaaggactggggcagcagcagcggcagccagggcagagaggacagcgtgctgagctacgagaccgtgacccagatggaggtgcactacgccagacccatcatcatcctgggccccaccaaggacagagccaacgacgacctgctgagcgagttccccgacaagttcggcagctgcgtgccccacaccaccagacccaagagagagtacgagatcgacggcagagactaccacttcgtgagcagcagagagaagatggagaaggacatccaggcccacaagttcatcgaggccggccagtacaacagccacctgtacggcaccagcgtgcagagcgtgagagaggtggccgagcagagagactag

SEQ ID NO: 117286 - DNA, 4323 bp, Artificial Sequence
  derived and/or modified sequence
agaccttccgcccccgagcctcagcagctgccgccccaagctcgcggccatccgagccgcctgcatctccgaatctctccgggcgccgctggctcgagctctgacccagctctggcgtcctgcacgcccacgtcctggcgcccctaaccctgactcatcgtccacagtgcaccgggcggcggacggttgcgggccccggggcatgctgggagctgtagttccctggagcccggccctgcgttccgctgacttagagggatctccaagcgtccctcgtctcccccaaactccttaatcccgcccgtccgacctagagtctagtcctccgacggggtgatgggataggatgggacagaagaggaaggggcttaagtcactgcagccagagggatggaggtggactgaagggagggcttctccggtggggttagaagggaaaagtagggaaagagaagtgtaaggtagatggcagaggcagagacatggaaagacagactctagggttcctgatgaaatctatctcggccaacacaaaagggagggtacagtggtggggggcacccaagctagggtgtgagtaccctaagtgtattcttctgagatgtaggccattcactaactcttggaacagctacagtttcacagtaggaagacccccccagattcactgcccctcccttagtaaagcctctgagaccttcctgaacattcccttctgtctttgccctctgttccttccagagaccatgtgcccaggcagatggattcctcccgggcctgagaggaactgcaggaattctcctgcctcttacccgtaaaaccccaacttctctagccctagggcaggaagtcccaaacaatttctacccctttttctgcaattctcattggggtgagaggaggcccaggaggagagagagctgggctcagcttctttttgagctgctggagccctctgtgaggaggccctctttgctggcttctcaggagagcgtggctaggttctgcctgcctatgggaagagggggccagggtgtgtggagcaagatggtggcggtgctggtgccttgggacctgggggaatgggacagctggtcggctcagagacggcctactttactcacagctggaatttagtggggagaagcagctcaactccaatcctggaggattagggagattaaagtgagagaagagagagatgtcccagagaccaagagctcccaggtcagccctctggctcctggcacccccactgctgcggtgggcacccccactcctcacagtgctgcatagcgacctcttccaggccttgctggacatcctggactattatgaggcttccctctcagagagtcagaaataccgctaccaagatgaagacacgccccctctggagcacagcccggcccacctccccaaccaggccaattctcccccagtgattgtcaacacagataccctagaagccccaggatatgagttgcaggtgaacgggaccgagggggagatggaatacgaggaaatcacattggaaaggggtaactcaggtctgggcttcagcatcgcaggtggcactgacaacccacacatcggtgacgacccatccattttcatcaccaagatcattcctggtggggctgcggcccaggatggccgcctcagggtcaacgacagcatcctgtttgtaaatgaagtggacgtgcgcgaggtgacccactcagcggcggtggaagccctcaaagaggcaggctccatcgttcgcctctatgtcatgcgccggaagcccccggctgagaaggtcatggagatcaagctcatcaaggggcctaaaggtcttggcttcagcatcgcagggggcgtagggaaccagcacatcccaggagataatagcatctatgtaacaaagatcatcgaagggggtgctgcccacaaggatgggaggttgcagattggagacaagatcctggcggtcaacagtgtggggctagaggacgtcatgcatgaagatgctgtggcagccctgaagaacacgtatgatgttgtctacctaaaggtggccaagcccagcaatgcctacctgagtgacagctatgctcccccagacatcacaacctcttattcccagcacctggacaatgagatcagtcacagcagctacctgggcaccgactaccccacagccatgacccccacttcccctcggcgctactctccagtggccaaggacctgctcggggaggaagacattccccgagaaccgaggcgaattgtgatccaccggggctccacgggcctgggcttcaacatcgtgggtggcgaggacggtgaaggcatcttcatctcctttatcctggccgggggccctgcagacctcagtggggagctgcggaagggggaccagatcctgtcggtcaacggtgtggacctccgaaatgccagccatgagcaggctgccattgccctgaagaatgcgggtcagacggtcacgatcatcgctcagtataaaccagaagagtacagccgattcgaggccaagatccacgaccttcgggaacagctcatgaacagcagcctgggctcagggactgcgtccctgcggagcaaccccaaaaggggtttctacatcagggccctgtttgattacgacaagaccaaggactgcggcttcctgagccaggccctgagcttccgctttggggatgtgctgcatgtcatcgatgctagtgatgaggagtggtggcaggcacggcgggtccactctgacagtgagaccgacgacattgggttcatccccagcaaacggcgggttgagcgacgagagtggtcaaggttaaaggccaaggactggggctccagctctggatcgcagggtcgagaagactcggttctgagctacgagacagtgacgcagatggaagtgcactatgctcgccccatcatcatccttgggcccaccaaggaccgcgccaacgatgatcttctctccgagttccccgacaagtttggatcctgtgttccccatacgacacggcccaagcgggagtatgagatagatggccgggattaccactttgtgtcgtcccgggagaaaatggagaaggacattcaggcgcacaagttcattgaggccggccagtacaacagccacctctatgggaccagcgtccagtccgtgcgagaggtggcagagcaggggaagcactgcatcctcgatgtctcggccaatgccgtgcggcggctgcaggcggcccacctgcaccccatcgccatcttcatccgcccccgctccctggagaatgtgctagagattaacaagcggatcacagaggagcaagcccgcaaagccttcgacagagccaccaagctggagcaggagttcacagagtgcttctcagccatcgtggagggtgacagctttgaggagatctaccacaaggtgaagcgtgtcatcgaggacctctcaggcccctacatctgggttccagcccgagagagactctgattcctgccctggcttggcctggactcgccctgcctccatcacctgggcccttggtctggactgaattgcccaagcccttggctccccccggcctccctcccaccccttcttatttatttcctttctaactggatccagcctgttggaggggggacactcctctgcatgtatccccgcaccccagaactgggctcctgaacgccaggaacctggggtctgggggggagctgggctccttgttccgagcccttgctccttaggatccccgcccccacctgcccccaatgcacacacagacccaccgggggccacctgccctcccccatcctctcccacacacattccagaagtcagggccccctcgaggagcacccgctgcagggatgcagggccacaggcctccgctctctcctaaggcagggtctggggtcacccctgccctcatcgtaattccccatgttccttgatttctcatttattttttccactttttttcttctcaaaggtggttttttggggggagaagcaggggactccgcagcgggcccctgccttccacatgcccccaccatttttctttgccggtttgcatgagtggaaggtctaaatgtggcttttttttttttttttcctgggaatttttttggggaaaagggagggatgggtctagggagtgggaaatgcgggagggagggtggggggcaggggtcgggggtcgggtgtccgggagccagggaagactggaaatgctgccgccttctgcaatttatttatttttttcttttgagagagtgaaaggaagagacagatacttgaaa

SEQ ID NO: 117287 - DNA, 3975 bp, Artificial Sequence
  derived and/or modified sequence
gggacagaagaggaaggggcttaagtcactgcagccagagggatggaggtggactgaagggagggcttctccggtggggttagaagggaaaagtagggaaagagaagtgtaaggtagatggcagaggcagagacatggaaagacagactctagggttcctgatgaaatctatctcggccaacacaaaagggagggtacagtggtggggggcacccaagctagggtgtgagtaccctaagtgtattcttctgagatgtaggccattcactaactcttggaacagctacagtttcacagtaggaagacccccccagattcactgcccctcccttagtaaagcctctgagaccttcctgaacattcccttctgtctttgccctctgttccttccagagaccatgtgcccaggcagatggattcctcccgggcctgagaggaactgcaggaattctcctgcctcttacccgtaaaaccccaacttctctagccctagggcaggaagtcccaaacaatttctacccctttttctgcaattctcattggggtgagaggaggcccaggaggagagagagctgggctcagcttctttttgagctgctggagccctctgtgaggaggccctctttgctggcttctcaggagagcgtggctaggttctgcctgcctatgggaagagggggccagggtgtgtggagcaagatggtggcggtgctggtgccttgggacctgggggaatgggacagctggtcggctcagagacggcctactttactcacagctggaatttagtggggagaagcagctcaactccaatcctggaggattagggagattaaagtgagagaagagagagatgtcccagagaccaagagctcccaggtcagccctctggctcctggcacccccactgctgcggtgggcacccccactcctcacagtgctgcatagcgacctcttccaggccttgctggacatcctggactattatgaggcttccctctcagagagtcagaaataccgctaccaagatgaagacacgccccctctggagcacagcccggcccacctccccaaccaggccaattctcccccagtgattgtcaacacagataccctagaagccccaggatatgtgttgcaggtgaacgggaccgagggggagatggaatacgaggaaatcacattggaaaggggtaactcaggtctgggcttcagcatcgcaggtggcactgacaacccacacatcggtgacgacccatccattttcatcaccaagatcattcctggtggggctgcggcccaggatggccgcctcagggtcaacgacagcatcctgtttgtaaatgaagtggacgtgcgcgaggtgacccactcagcggcggtggaagccctcaaagaggcaggctccatcgttcgcctctatgtcatgcgccggaagcccccggctgagaaggtcatggagatcaagctcatcaaggggcctaaaggtcttggcttcagcatcgcagggggcgtagggaaccagcacatcccaggagataatagcatctatgtaacaaagatcatcgaagggggtgctgcccacaaggatgggaggttgcagattggagacaagatcctggcggtcaacagtgtggggctagaggacgtcatgcatgaagatgctgtggcagccctgaagaacacgtatgatgttgtctacctaaaggtggccaagcccagcaatgcctacctgagtgacagctatgctcccccagacatcacaacctcttattcccagcacctggacaatgagatcagtcacagcagctacctgggcaccgactaccccacagccatgacccccacttcccctcggcgctactctccagtggccaaggacctgctcggggaggaagacattccccgagaaccgaggcgaattgtgatccaccggggctccacgggcctgggcttcaacatcgtgggtggcgaggacggtgaaggcatcttcatctcctttatcctggccgggggccctgcagacctcagtggggagctgcggaagggggaccagatcctgtcggtcaacggtgtggacctccgaaatgccagccatgagcaggctgccattgccctgaagaatgcgggtcagacggtcacgatcatcgctcagtataaaccagaagagtacagccgattcgaggccaagatccacgaccttcgggaacagctcatgaacagcagcctgggctcagggactgcgtccctgcggagcaaccccaaaaggggtttctacatcagggccctgtttgattacgacaagaccaaggactgcggcttcctgagccaggccctgagcttccgctttggggatgtgctgcatgtcatcgatgctagtgatgaggagtggtggcaggcacggcgggtccactctgacagtgagaccgacgacattgggttcatccccagcaaacggcgggttgagcgacgagagtggtcaaggttaaaggccaaggactggggctccagctctggatcgcagggtcgagaagactcggttctgagctacgagacagtgacgcagatggaagtgcactatgctcgccccatcatcatccttgggcccaccaaggaccgcgccaacgatgatcttctctccgagttccccgacaagtttggatcctgtgttccccatacgacacggcccaagcgggagtatgagatagatggccgggattaccactttgtgtcgtcccgggagaaaatggagaaggacattcaggcgcacaagttcattgaggccggccagtacaacagccacctctatgggaccagcgtccagtccgtgcgagaggtggcagagcaggggaagcactgcatcctcgatgtctcggccaatgccgtgcggcggctgcaggcggcccacctgcaccccatcgccatcttcatccgcccccgctccctggagaatgtgctagagattaacaagcggatcacagaggagcaagcccgcaaagccttcgacagagccaccaagctggagcaggagttcacagagtgcttctcagccatcgtggagggtgacagctttgaggagatctaccacaaggtgaagcgtgtcatcgaggacctctcaggcccctacatctgggttccagcccgagagagactctgattcctgccctggcttggcctggactcgccctgcctccatcacctgggcccttggtctggactgaattgcccaagcccttggctccccccggcctccctcccaccccttcttatttatttcctttctaactggatccagcctgttggaggggggacactcctctgcatgtatccccgcaccccagaactgggctcctgaacgccaggaacctggggtctgggggggagctgggctccttgttccgagcccttgctccttaggatccccgcccccacctgcccccaatgcacacacagacccaccgggggccacctgccctcccccatcctctcccacacacattccagaagtcagggccccctcgaggagcacccgctgcagggatgcagggccacaggcctccgctctctcctaaggcagggtctggggtcacccctgccctcatcgtaattccccatgttccttgatttctcatttattttttccactttttttcttctcaaaggtggttttttggggggagaagcaggggactccgcagcgggcccctgccttccacatgcccccaccatttttctttgccggtttgcatgagtggaaggtctaaatgtggcttttttttttttttttcctgggaatttttttggggaaaagggagggatgggtctagggagtgggaaatgcgggagggagggtggggggcaggggtcgggggtcgggtgtccgggagccagggaagactggaaatgctgccgccttctgcaatttatttatttttttcttttgagagagtgaaaggaagagacagatacttgaaa

SEQ ID NO: 117288 - DNA, 3103 bp, Artificial Sequence
  derived and/or modified sequence
agagtctagtcctccgacggggtgatgggataggatgggacagaagaggaaggggcttaagtcactgcagccagagggatggaggtggactgaagggagggcttctccggtggggttagaagggaaaagtagggaaagagaagtgtaaggtagatggcagaggcagagacatggaaagacagactctagggttcctgatgaaatctatctcggccaacacaaaagggagggtacagtggtggggggcacccaagctagggtgtgagtaccctaagtgtattcttctgagatgtaggccattcactaactcttggaacagctacagtttcacagtaggaagacccccccagattcactgcccctcccttagtaaagcctctgagaccttcctgaacattcccttctgtctttgccctctgttccttccagagaccatgtgcccaggcagatggattcctcccgggcctgagaggaactgcaggaattctcctgcctcttacccgtaaaaccccaacttctctagccctagggcaggaagtcccaaacaatttctacccctttttctgcaattctcattggggtgagaggaggcccaggaggagagagagctgggctcagcttctttttgagctgctggagccctctgtgaggaggccctctttgctggcttctcaggagagcgtggctaggttctgcctgcctatgggaagagggggccagggtgtgtggagcaagatggtggcggtgctggtgccttgggacctgggggaatgggacagctggtcggctcagagacggcctactttactcacagctggaatttagtggggagaagcagctcaactccaatcctggaggattagggagattaaagtgagagaagagagagatgtcccagagaccaagagctcccaggtcagccctctggctcctggcacccccactgctgcggtgggcacccccactcctcacagtgctgcatagcgacctcttccaggccttgctggacatcctggactattatgaggcttccctctcagagagtcagaaataccgctaccaagatgaagacacgccccctctggagcacagcccggcccacctccccaaccaggccaattctcccccagtgattgtcaacacagataccctagaagccccaggatatgagttgcaggtgaacgggaccgagggggagatggaatacgaggaaatcacattggaaaggggtaactcaggtctgggcttcagcatcgcaggtggcactgacaacccacacatcggtgacgacccatccattttcatcaccaagatcattcctggtggggctgcggcccaggatggccgcctcagggtcaacgacagcatcctgtttgtaaatgaagtggacgtgcgcgaggtgacccactcagcggcggtggaagccctcaaagaggcaggctccatcgttcgcctctatgtcatgcgccggaagcccccggctgagaaggtcatggagatcaagctcatcaaggggcctaaaggtcttggcttcagcatcgcagggggcgtagggaaccagcacatcccaggagataatagcatctatgtaacaaagatcatcgaagggggtgctgcccacaaggatgggaggttgcagattggagacaagatcctggcggtcaacagtgtggggctagaggacgtcatgcatgaagatgctgtggcagccctgaagaacacgtatgatgttgtctacctaaaggtggccaagcccagcaatgcctacctgagtgacagctatgctcccccagacatcacaacctcttattcccagcacctggacaatgagatcagtcacagcagctacctgggcaccgactaccccacagccatgacccccacttcccctcggcgctactctccagtggccaaggacctgctcggggaggaagacattccccgagaaccgaggcgaattgtgatccaccggggctccacgggcctgggcttcaacatcgtgggtggcgaggacggtgaaggcatcttcatctcctttatcctggccgggggccctgcagacctcagtggggagctgcggaagggggaccagatcctgtcggtcaacggtgtggacctccgaaatgccagccatgagcaggctgccattgccctgaagaatgcgggtcagacggtcacgatcatcgctcagtataaaccagaagagtacagccgattcgaggccaagatccacgaccttcgggaacagctcatgaacagcagcctgggctcagggactgcgtccctgcggagcaaccccaaaaggggtttctacatcagggccctgtttgattacgacaagaccaaggactgcggcttcctgagccaggccctgagcttccgctttggggatgtgctgcatgtcatcgatgctagtgatgaggagtggtggcaggcacggcgggtccactctgacagtgagaccgacgacattgggttcatccccagcaaacggcgggttgagcgacgagagtggtcaaggttaaaggccaaggactggggctccagctctggatcgcagggtcgagaagactcggttctgagctacgagacagtgacgcagatggaagtgcactatgctcgccccatcatcatccttgggcccaccaaggaccgcgccaacgatgatcttctctccgagttccccgacaagtttggatcctgtgttccccatacgacacggcccaagcgggagtatgagatagatggccgggattaccactttgtgtcgtcccgggagaaaatggagaaggacattcaggcgcacaagttcattgaggccggccagtacaacagccacctctatgggaccagcgtccagtccgtgcgagaggtggcagagcagagagattaacaagcggatcacagaggagcaagcccgcaaagccttcgacagagccaccaagctggagcaggagttcacagagtgcttctcagccatcgtggagggtgacagctttgaggagatctaccacaaggtgaagcgtgtcatcgaggacctctcaggcccctacatctgggttccagcccgagagagactctgattcctgccctggcttggcct

SEQ ID NO: 117289 - protein, 4624 aa, Artificial Sequence
  derived and/or modified sequence
MFRIGRRQLWKHSVTRVLTQRLKGEKEAKRALLDARHNYLFAIVASCLDLNKTEVEDAILEGNQIERIDQLFAVGGLRHLMFYYQDVEEAETGQLGSLGGVNLVSGKIKKPKVFVTEGNDVALTGVCVFFIRTDPSKAITPDNIHQEVSFNMLDAADGGLLNSVRRLLSDIFIPALRATSHGWGELEGLQDAANIRQEFLSSLEGFVNVLSGAQESLKEKVNLRKCDILELKTLKEPTDYLTLANNPETLGKIEDCMKVWIKQTEQVLAENNQLLKEADDVGPRAELEHWKKRLSKFNYLLEQLKSPDVKAVLAVLAAAKSKLLKTWREMDIRITDATNEAKDNVKYLYTLEKCCDPLYSSDPLSMMDAIPTLINAIKMIYSISHYYNTSEKITSLFVKVTNQIISACKAYITNNGTASIWNQPQDVVEEKILSAIKLKQEYQLCFHKTKQKLKQNPNAKQFDFSEMYIFGKFETFHRRLAKIIDIFTTLKTYSVLQDSTIEGLEDMATKYQGIVATIKKKEYNFLDQRKMDFDQDYEEFCKQTNDLHNELRKFMDVTFAKIQNTNQALRMLKKFERLNIPNLGIDDKYQLILENYGADIDMISKLYTKQKYDPPLARNQPPIAGKILWARQLFHRIQQPMQLFQQHPAVLSTAEAKPIIRSYNRMAKVLLEFEVLFHRAWLRQIEEIHVGLEASLLVKAPGTGELFVNFDPQILILFRETECMAQMGLEVSPLATSLFQKRDRYKRNFSNMKMMLAEYQRVKSKIPAAIEQLIVPHLAKVDEALQPGLAALTWTSLNIEAYLENTFAKIKDLELLLDRVNDLIEFRIDAILEEMSSTPLCQLPQEEPLTCEEFLQMTKDLCVNGAQILHFKSSLVEEAVNELVNMLLDVEVLSEEESEKISNENSVNYKNESSAKREEGNFDTLTSSINARANALLLTTVTRKKKETEMLGEEARELLSHFNHQNMDALLKVTRNTLEAIRKRIHSSHTINFRDSNSASNMKQNSLPIFRASVTLAIPNIVMAPALEDVQQTLNKAVECIISVPKGVRQWSSELLSKKKIQERKMAALQSNEDSDSDVEMGENELQDTLEIASVNLPIPVQTKNYYKNVSENKEIVKLVSVLSTIINSTKKEVITSMDCFKRYNHIWQKGKEEAIKTFITQSPLLSEFESQILYFQNLEQEINAEPEYVCVGSIALYTADLKFALTAETKAWMVVIGRHCNKKYRSEMENIFMLIEEFNKKLNRPIKDLDDIRIAMAALKEIREEQISIDFQVGPIEESYALLNRYGLLIAREEIDKVDTLHYAWEKLLARAGEVQNKLVSLQPSFKKELISAVEVFLQDCHQFYLDYDLNGPMASGLKPQEASDRLIMFQNQFDNIYRKYITYTGGEELFGLPATQYPQLLEIKKQLNLLQKIYTLYNSVIETVNSYYDILWSEVNIEKINNELLEFQNRCRKLPRALKDWQAFLDLKKIIDDFSECCPLLEYMASKAMMERHWERITTLTGHSLDVGNESFKLRNIMEAPLLKYKEEIEDICISAVKERDIEQKLKQVINEWDNKTFTFGSFKTRGELLLRGDSTSEIIANMEDSLMLLGSLLSNRYNMPFKAQIQKWVQYLSNSTDIIESWMTVQNLWIYLEAVFVGGDIAKQLPKEAKRFSNIDKSWVKIMTRAHEVPSVVQCCVGDETLGQLLPHLLDQLEICQKSLTGYLEKKRLCFPRFFFVSDPALLEILGQASDSHTIQAHLLNVFDNIKSVKFHEKIYDRILSISSQEGETIELDKPVMAEGNVEVWLNSLLEESQSSLHLVIRQAAANIQETGFQLTEFLSSFPAQVGLLGIQMIWTRDSEEALRNAKFDKKIMQKTNQAFLELLNTLIDVTTRDLSSTERVKYETLITIHVHQRDIFDDLCHMHIKSPMDFEWLKQCRFYFNEDSDKMMIHITDVAFIYQNEFLGCTDRLVITPLTDRCYITLAQALGMSMGGAPAGPAGTGKTETTKDMGRCLGKYVVVFNCSDQMDFRGLGRIFKGLAQSGSWGCFDEFNRIDLPVLSVAAQQISIILTCKKEHKKSFIFTDGDNVTMNPEFGLFLTMNPGYAGRQELPENLKINFRSVAMMVPDRQIIIRVKLASCGFIDNVVLARKFFTLYKLCEEQLSKQVHYDFGLRNILSVLRTLGAAKRANPMDTESTIVMRVLRDMNLSKLIDEDEPLFLSLIEDLFPNILLDKAGYPELEAAISRQVEEAGLINHPPWKLKVIQLFETQRVRHGMMTLGPSGAGKTTCIHTLMRAMTDCGKPHREMRMNPKAITAPQMFGRLDVATNDWTDGIFSTLWRKTLRAKKGEHIWIILDGPVDAIWIENLNSVLDDNKTLTLANGDRIPMAPNCKIIFEPHNIDNASPATVSRNGMVFMSSSILDWSPILEGFLKKRSPQEAEILRQLYTESFPDLYRFCIQNLEYKMEVLEAFVITQSINMLQGLIPLKEQGGEVSQAHLGRLFVFALLWSAGAALELDGRRRLELWLRSRPTGTLELPPPAGPGDTAFDYYVAPDGTWTHWNTRTQEYLYPSDTTPEYGSILVPNVDNVRTDFLIQTIAKQGKAVLLIGEQGTAKTVIIKGFMSKYDPECHMIKSLNFSSATTPLMFQRTIESYVDKRMGTTYGPPAGKKMTVFIDDVNMPIINEWGDQVTNEIVRQLMEQNGFYNLEKPGEFTSIVDIQFLAAMIHPGGGRNDIPQRLKRQFSIFNCTLPSEASVDKIFGVIGVGHYCTQRGFSEEVRDSVTKLVPLTRRLWQMTKIKMLPTPAKFHYVFNLRDLSRVWQGMLNTTSEVIKEPNDLLKLWKHECKRVIADRFTVSSDVTWFDKALVSLVEEEFGEEKKLLVDCGIDTYFVDFLRDAPEAAGETSEEADAETPKIYEPIESFSHLKERLNMFLQLYNESIRGAGMDMVFFADAMVHLVKISRVIRTPQGNALLVGVGGSGKQSLTRLASFIAGYVSFQITLTRSYNTSNLMEDLKVLYRTAGQQGKGITFIFTDNEIKDESFLEYMNNVLSSGEVSNLFARDEIDEINSDLASVMKKEFPRCLPTNENLHDYFMSRVRQNLHIVLCFSPVGEKFRNRALKFPALISGCTIDWFSRWPKDALVAVSEHFLTSYDIDCSLEIKKEVVQCMGSFQDGVAEKCVDYFQRFRRSTHVTPKSYLSFIQGYKFIYGEKHVEVRTLANRMNTGLEKLKEASESVAALSKELEAKEKELQVANDKADMVLKEVTMKAQAAEKVKAEVQKVKDRAQAIVDSISKDKAIAEEKLEAAKPALEEAEAALQTIRPSDIATVRTLGRPPHLIMRIMDCVLLLFQRKVSAVKIDLEKSCTMPSWQESLKLMTAGNFLQNLQQFPKDTINEEVIEFLSPYFEMPDYNIETAKRVCGNVAGLCSWTKAMASFFSINKEVLPLKANLVVQENRHLLAMQDLQKAQAELDDKQAELDVVQAEYEQAMTEKQTLLEDAERCRHKMQTASTLISGLAGEKERWTEQSQEFAAQTKRLVGDVLLATAFLSYSGPFNQEFRDLLLNDWRKEMKARKIPFGKNLNLSEMLIDAPTISEWNLQGLPNDDLSIQNGIIVTKASRYPLLIDPQTQGKIWIKNKESRNELQITSLNHKYFRNHLEDSLSLGRPLLIEDVGEELDPALDNVLERNFIKTGSTFKVKVGDKEVDVLDGFRLYITTKLPNPAYTPEISARTSIIDFTVTMKGLEDQLLGRVILTEKQELEKERTHLMEDVTANKRRMKELEDNLLYRLTSTQGSLVEDESLIVVLSNTKRTAEEVTQKLEISAETEVQINSAREEYRPVATRGSILYFLITEMRLVNEMYQTSLRQFLGLFDLSLARSVKSPITSKRIANIIEHMTYEVYKYAARGLYEEHKFLFTLLLTLKIDIQRNRVKHEEFLTLIKGGASLDLKACPPKPSKWILDITWLNLVELSKLRQFSDVLDQISRNEKMWKIWFDKENPEEEPLPNAYDKSLDCFRRLLLIRSWCPDRTIAQARKYIVDSMGEKYAEGVILDLEKTWEESDPRTPLICLLSMGSDPTDSIIALGKRLKIETRYVSMGQGQEVHARKLLQQTMANGGWALLQNCHLGLDFMDELMDIIIETELVHDAFRLWMTTEAHKQFPITLLQMSIKFANDPPQGLRAGLKRTYSGVSQDLLDVSSGSQWKPMLYAVAFLHSTVQERRKFGALGWNIPYEFNQADFNATVQFIQNHLDDMDVKKGVSWTTIRYMIGEIQYGGRVTDDYDKRLLNTFAKVWFSENMFGPDFSFYQGYNIPKCSTVDNYLQYIQSLPAYDSPEVFGLHPNADITYQSKLAKDVLDTILGIQPKDTSGGGDETREAVVARLADDMLEKLPPDYVPFEVKERLQKMGPFQPMNIFLRQEIDRMQRVLSLVRSTLTELKLAIDGTIIMSENLRDALDCMFDARIPAWWKKASWISSTLGFWFTELIERNSQFTSWVFNGRPHCFWMTGFFNPQGFLTAMRQEITRANKGWALDNMVLCNEVTKWMKDDISAPPTEGVYVYGLYLEGAGWDKRNMKLIESKPKVLFELMPVIRIYAENNTLRDPRFYSCPIYKKPVRTDLNYIAAVDLRTAQTPEHWVLRGVALLCDVK

SEQ ID NO: 117290 - DNA, 13875 bp, Artificial Sequence
  derived and/or modified sequence
atgttccggattggtagacgccagctctggaaacattctgtcacgagggtcctgacccagcgcttaaaaggcgagaaagaggccaagagggctctgctcgacgctaggcataattacctgtttgccatcgtcgcatcttgtctagatctaaataaaaccgaggtggaagacgcgatacttgaaggcaaccaaatcgagcgaatcgatcagttgttcgcggtgggcggtcttcgccacctgatgttctactatcaggacgtggaggaagcggagactggacaacttggctccctgggcggtgtgaacctggtgtcaggaaaaatcaagaagccgaaggtgttcgtgaccgaaggcaacgatgtcgcgcttactggtgtttgcgttttttttatacgcacagatccaagcaaggctattacacccgataacattcaccaggaggttagcttcaacatgttggatgccgctgatgggggtctgttgaactcagtccggcggttactgtctgacatattcatccccgccctgagggccacctcccacggttggggtgagctggagggtctgcaggacgcagctaacattcgccaggaatttctgtcctccttggaaggctttgtgaatgtgctgtctggagcccaggaatccctgaaagaaaaagtgaacctgagaaagtgtgatattctggagttgaagacacttaaggaacctaccgattacctgacccttgcaaacaatcccgagacactggggaagattgaggactgcatgaaggtgtggattaagcagaccgaacaggtcctggctgagaacaatcagctcttaaaggaggccgacgacgtaggcccaagggccgagttagagcattggaaaaaaagactgtctaagtttaactacctcctggagcaattgaagagccccgacgtaaaggcagtgctcgccgtgctggcggctgccaaatcaaaactgttgaaaacctggcgagaaatggacatcaggattactgatgcaacaaacgaggccaaggacaatgtaaagtatctgtacactctcgagaagtgttgtgaccccctctactcctctgaccctctgtcgatgatggacgctattccaacgctcattaacgccatcaagatgatttattccatttcacactattacaatacgtccgagaagatcacgtctctgttcgtgaaggtcacaaaccagatcattagcgcatgcaaggcttatatcacgaacaacgggacagcttctatttggaatcagccacaagacgtggtggaagagaaaatcctgagtgcgataaagttaaagcaggaataccagctgtgcttccacaaaactaaacagaagttaaagcaaaaccctaacgccaaacagttcgatttctcagaaatgtatatttttggaaaattcgaaacttttcacaggcggttagctaaaattattgacatcttcacgactctgaagacttatagcgtgctgcaggattctaccatcgagggtcttgaggacatggccacgaagtaccagggaatcgtggccacaattaagaagaaggagtacaattttctcgatcagcgaaagatggattttgaccaagactacgaggaattttgcaagcaaacgaacgacctccacaacgaactgaggaagtttatggacgtcaccttcgcgaagattcagaatacaaaccaggctctgcggatgttgaagaagtttgagcgcctcaatattccgaacctgggcatcgatgataagtatcagcttatattggagaactacggagccgacattgacatgatcagtaagctgtatacaaaacagaaatatgaccctccgctcgcccggaaccagccgccaatagccgggaagattttgtgggcacgccaactgtttcacagaattcaacaaccaatgcagctcttccagcagcacccagcagtcttgtccaccgctgaagctaaaccaataattcgtagctacaacaggatggcaaaagtgctgttggaatttgaggtattgttccacagagcctggctgaggcaaatcgaggaaatacacgtcggactggaagcttccttgttagtgaaagccccaggtactggggagctctttgtgaatttcgacccacaaatccttattctctttagggaaaccgaatgtatggcgcagatgggactggaggtctccccactcgcaacttccctcttccagaagagagacagatacaaaagaaactttagcaatatgaaaatgatgctggcagagtatcagagggtgaaatctaagatccccgccgcaattgaacaactgatcgtgccacacctggccaaagttgacgaggcactgcaacccggactggccgcacttacctggacgagtctgaacatcgaagcctaccttgaaaatacattcgccaaaataaaggaccttgagcttctgttggaccgggtgaatgatctaatcgagttccggattgacgctatcctcgaagagatgagcagcactccattatgccagctcccgcaagaggagcccctgacctgtgaggagtttctacaaatgacaaaagacctttgcgttaacggagcgcagatcctccacttcaaatcctccctcgttgaggaggctgtcaacgaattggtgaatatgcttttggacgttgaggtgttgtcggaggaagagtccgagaagatcagcaatgagaacagtgtaaactataagaatgagtcctcggcaaaacgcgaagaaggaaacttcgacactcttacatccagcatcaatgccagagccaacgcactgttattaacaaccgttacacggaaaaaaaaagaaaccgagatgctaggcgaggaagcccgggagcttctctcccattttaaccaccaaaacatggacgcattactgaaagtgactcggaacactctggaagctatccggaagaggatccacagcagccacactattaattttagggactccaattctgccagcaacatgaagcagaatagcctccctatttttcgggcaagcgtcactctcgctataccgaacatagtcatggcccctgccctggaggacgtgcagcagactctgaacaaggccgtggagtgcattatttccgtccctaagggagtccgccagtggtcgagcgagctcttaagcaagaaaaagatccaggagcgtaaaatggcagctctgcagtctaatgaagattccgactccgacgttgagatgggcgagaacgagctccaggatactcttgaaattgccagcgtgaacctgcccattccggttcagacaaagaattattataagaatgtctcggagaataaggaaatcgttaagctggtgtctgtactgagcacgataatcaactccaccaaaaaggaggtgatcacttctatggattgcttcaagaggtacaaccacatctggcagaagggtaaagaagaggccatcaagacgtttataactcagtctcctctgcttagcgagtttgagtctcagatcctgtatttccagaatctggagcaagaaattaacgccgaacccgagtatgtgtgtgttggctccatcgcgctttatactgccgacctcaaattcgcactcaccgcggagactaaggcatggatggtggtcattggccggcactgcaacaagaaatacaggagtgagatggaaaacatcttcatgctcattgaagagtttaacaaaaagttaaaccgacctattaaggatctggacgacatccggatcgctatggcagcccttaaagaaatccgggaggagcagatcagtatcgacttccaagtgggccccatcgaagagtcctatgcattactgaatagatacggtcttctaattgccagggaagaaatagacaaggttgacacactgcactatgcctgggagaagttgctagcgagggcaggggaagtccagaataaactcgtaagcttgcagccaagtttcaaaaaggagctaatttcagctgtcgaggtctttttgcaggactgtcaccagttctatctggattatgacctgaacgggcccatggctagcgggctaaagcctcaggaagcgagtgatagactgatcatgtttcagaatcagttcgataacatttaccgtaagtacatcacctacacaggtggcgaagagctctttgggctcccagccacccagtacccacaactgctcgagattaaaaaacagttaaacctactgcaaaagatttataccctgtataacagcgtgattgaaacagtaaatagctactacgatattttgtggagtgaagttaacatcgagaagattaataatgagttgctggagttccagaatcggtgcagaaagctaccacgagccctaaaggactggcaggcctttttggatttaaagaaaattatcgatgacttcagtgagtgctgccccctcctggagtacatggcaagcaaggccatgatggaaaggcattgggagcgaattacaacacttaccggtcatagcctggacgtgggaaacgagtcttttaaacttcgaaacattatggaagccccgctgcttaaatataaggaagagatcgaggatatctgtatcagcgccgtaaaagaaagagacatcgagcagaaacttaagcaggttataaacgaatgggataacaaaacattcacctttgggagctttaagacccgcggtgaacttctgctgagaggagatagtactagtgaaattattgctaacatggaggactctctgatgctgctgggttcactcctcagtaatcggtataacatgcctttcaaggctcagattcaaaagtgggtgcagtatctgagtaactctactgatattatagaatcctggatgacagtgcagaatctatggatctatctggaggctgtgtttgttggaggtgacatagcaaagcagctaccgaaagaagctaagagattcagcaacatagacaagagttgggtgaaaatcatgacccgcgctcacgaggtgccctccgtggtgcaatgctgcgtaggcgatgaaactcttgggcaattgctgccacacctgttagatcagctcgagatttgccaaaaatcactgacaggatatttggaaaaaaagcgcctgtgtttccctcggtttttcttcgtgtcagacccagctctgctggagattcttggccaggcgtctgacagtcacaccattcaggcccacttgctgaatgtatttgataacattaaatcagtgaaatttcatgagaagatctatgaccgcattctctccatcagcagtcaggagggcgaaaccattgagctagacaagccagtaatggccgaaggaaatgtggaggtctggctgaatagtcttctggaagaatcacagtcatcactccacctggtaattcgtcaggctgcagctaatattcaagagacggggtttcagctgacagaattcctcagctcctttcccgctcaagtcggcttgctgggcatacaaatgatatggacgcgggacagcgaggaagctcttcggaacgcaaaattcgacaaaaaaatcatgcaaaaaacaaatcaagcctttctcgagttactgaacaccctgattgacgtaacgacaagggacctgtccagcactgagcgagtgaaatatgagacactcattacaatccacgttcatcagcgcgatatcttcgatgacctttgtcatatgcatattaagagccctatggattttgagtggctgaagcagtgtaggttctatttcaacgaagattccgacaaaatgatgatccacattaccgatgtcgcatttatttaccagaacgagtttctcggatgtacagaccgtctggtcataacaccactcactgaccgctgttatattactctggcccaggctttaggtatgagcatgggtggagcaccagccgggcccgctggaacagggaagacggagactacaaaggacatgggccgatgcctgggaaagtacgtggtggtgtttaactgcagtgatcagatggactttcgtgggctgggccgtatcttcaaaggactagcccaatccgggtcgtgggggtgctttgatgagtttaatagaattgatttgcccgtgctctctgtggccgctcagcagatttcgatcatccttacctgtaagaaggaacacaaaaaatccttcattttcacagatggagacaacgtgacaatgaacccagaatttggcctgtttcttactatgaatcctggatacgctggcagacaagaacttcctgagaacctcaaaataaatttcaggagtgtggccatgatggtgccagacagacagatcatcattagagtaaagctggcctcctgcggctttatcgataacgtggtattagctcggaaattttttaccctgtataagctctgtgaggaacagctttctaagcaggtgcactacgactttggcctaaggaatatcctgagcgtgcttcgtaccttaggggctgcaaagagagctaatcctatggacacagaatccactattgtaatgcgagtgctgagggacatgaacttaagtaaactaattgatgaagacgagccactgtttctatctctgattgaggatcttttcccaaatatcctacttgacaaagccggttacccagaactcgaagccgccatctccaggcaagttgaagaagcaggcctgatcaatcaccctccctggaagctgaaagtgatccagctgtttgaaacacagagagtgcgccacggcatgatgacactaggtccttcaggcgctgggaagactacatgcatccacacattaatgagagcaatgactgactgtggaaaaccacacagagaaatgcgcatgaatcccaaagcaattactgcccctcagatgtttggtcgcctagatgtggccaccaacgattggactgatggtatcttcagcaccctgtggaggaaaaccctgcgtgcgaagaaaggcgagcatatatggataatactggatgggccagtggacgccatctggattgagaatctgaattccgtgttggatgacaacaagaccctgactctcgctaacggggaccgaatccctatggctcccaactgcaaaatcatctttgagccccacaacattgacaacgctagtccagctaccgtgagtcgaaatggaatggtgttcatgagctcatcaatcctggattggtcacccattcttgaaggtttcctgaagaagcgaagccctcaggaggccgagattctgcgccagctatacacagaaagttttccagatttgtacaggttctgtatccagaacctagagtacaaaatggaggtcctcgaggcttttgttattacccagtccataaacatgttacaaggtctcatccctctaaaagaacaaggaggggaggtgtcccaggcccacttaggtagactgttcgttttcgcacttctgtggagcgctggcgccgcacttgagctggacggtcgccgcagactggaactctggttgcgctcacgtcctactggcacactggagctgcccccccccgccggcccaggcgacacagcctttgattactatgtggcaccagatggaacatggacccattggaatactaggacacaagagtacctgtatccctctgatacaacgccagagtatggcagcattctggtgccaaacgtcgacaatgttcgcaccgattttctgattcagacaatcgccaagcagggcaaagctgtgctacttatcggggagcagggtactgctaaaaccgttatcattaaaggttttatgtccaaatacgaccctgagtgtcacatgatcaagtcactgaatttttccagtgcaacaactcctctgatgttccagcggacaatagaaagctacgtggataagagaatggggacgacctatggcccacctgcaggaaagaagatgacagtgttcattgatgatgtgaacatgcccattatcaatgagtggggagaccaggttacgaatgagatcgttcggcaactgatggagcagaatgggttttacaacctcgagaagcccggcgagttcacctcaattgtggatatacagttcctggcagcaatgattcaccctgggggaggacggaacgatatcccccagaggctgaagagacagttttcaattttcaattgcaccctcccatcagaggccagtgtggacaaaatctttggcgtgattggggtcggccactattgtacacagagaggcttttccgaagaagtgcgtgattcggtgacaaagttggtgccactcactcggcggctctggcaaatgacaaagattaagatgctgcctactcctgccaaatttcactatgtatttaatttgcgcgatctgtcccgcgtgtggcaaggtatgctaaatacgacaagcgaggtgattaaagaacccaatgacttgctcaagctgtggaaacatgaatgcaaacgggtgatcgccgatcgatttactgtctcatccgatgtgacgtggttcgataaagccctggtgtctttagtggaggaggagtttggagaggagaagaaactactggttgattgtggtatagacacctacttcgttgatttcttaagggacgccccggaggccgcaggggagactagcgaggaggcagacgccgaaacaccaaaaatttacgagccaatcgaatccttcagtcacctgaaggaacggctaaatatgttcttacagctttataacgaatctatccgaggggcagggatggacatggtcttctttgctgatgccatggtgcatctggtgaagatttccagagtgataagaacaccccaagggaatgccctgctggtgggcgtggggggttcaggcaaacagagtctgactcgacttgccagctttatcgctggatacgtgtcttttcagattaccttgacacggtcctataataccagcaatctaatggaggacctgaaggtgctatatcgaactgccgggcagcaaggtaaaggcattacatttatcttcacagacaatgagatcaaagatgagagttttctggagtacatgaataacgtgctatctagcggcgaggtgagcaacctcttcgcaagggatgaaatcgatgagattaactctgatctggcatcagtcatgaaaaaggaattcccgcggtgcctccctaccaacgagaatctccatgattactttatgtctagagtccgacagaacctgcatatcgtcctatgctttagcccagtgggagaaaagttcaggaaccgggcacttaagtttcccgctttaataagcggttgcactatcgattggtttagccggtggccaaaagatgccctcgtcgctgtgtccgagcacttcctgaccagttatgatatcgattgttccctggagattaagaaggaagtggttcagtgcatgggttccttccaggatggtgtggcggaaaaatgcgtggactactttcaaaggtttagaagatcaacacatgtgacgccgaagtcttacctgtcctttatccaaggatataaatttatatacggcgagaagcatgttgaggttcgaacactggcgaaccggatgaacactggcctcgaaaaactgaaggaagccagtgagtccgtggccgcattgtctaaagagcttgaggccaaggaaaaggaactgcaggtcgccaacgacaaggcggacatggtgcttaaggaggtcaccatgaaggcccaggctgccgaaaaggtcaaagccgaggtacagaaagttaaagacagggcccaagccatcgtggatagcatcagcaaggacaaggccatagccgaggagaagcttgaagccgctaaacccgctctggaggaagccgaagctgcccttcagaccattcgtccaagcgacattgctactgttagaaccctcggccgtccgccacacctaattatgcgtataatggactgtgttctgctcctcttccaacgcaaggtgagcgctgtgaagattgacctggagaagagctgtactatgccgtcatggcaggaaagcctgaaactcatgactgccgggaactttctccagaacctgcagcaattccccaaggacaccattaacgaggaggtcattgagttcctctctccttactttgagatgcctgactataacattgagacggccaagagggtgtgcggaaacgtcgcgggactgtgcagctggactaaagccatggccagcttcttttctatcaacaaagaggtactgcccctcaaagccaatctcgtggtccaggaaaacaggcatctgcttgccatgcaagatctgcaaaaagctcaggctgaattggacgataaacaggcggaactagacgttgtccaggcggagtacgaacaggcaatgaccgaaaagcagacactgctggaggatgccgagaggtgcaggcacaaaatgcagaccgcctctacattgatcagtggactcgctggcgagaaagaacggtggactgaacagagccaggaatttgccgcacagactaagagactggtcggcgacgtcttgctagcgaccgccttcctgtcttactctggcccctttaaccaggaattcagggatctcctattaaatgactggcgtaaggagatgaaggcaaggaagatcccatttggcaagaacctgaatctgtctgagatgcttattgacgccccaactattagcgagtggaaccttcaggggcttcccaacgatgacttatctatccagaatgggataatcgtaacaaaagctagccggtaccctcttttgatcgatccccaaactcagggaaaaatctggatcaagaataaagagtctcgtaacgaactccagatcactagcttgaaccacaagtacttccgcaatcatctggaggattccctgtccctcggcagaccattgttgatagaggacgtaggcgaagagttggaccctgcacttgataatgtgcttgagagaaacttcataaagacagggtcaacatttaaagtgaaggtgggcgataaagaagtcgacgtgctggacggatttcgcctatatattactacaaaacttcctaatcccgcttatacccccgaaatctccgctagaacttcgattatcgattttaccgttacaatgaaaggactggaagaccagctactgggacgagtaatcctcacagagaagcaagaactggaaaaagaacgaacacacctgatggaggatgtgaccgccaacaagagacgcatgaaggaattggaggataacctgttgtaccgtctgacctcaacacaagggagcctcgtggaggatgaatctttgatcgtggtcttgtcaaatacgaagaggaccgctgaggaagtcacacagaaactggagatatctgcagaaacggaggttcagattaatagcgcacgggaggaatatcgcccagtggctacgcgcggcagcattctttactttctgattaccgaaatgaggctggtgaatgaaatgtatcaaacgtccctgaggcagtttttagggctctttgaccttagtctggcccggagcgtgaagtcacccatcacatctaagcgaatcgcaaatataattgaacatatgacgtacgaggtgtataagtatgccgcacgtgggttatatgaagaacacaagttcctgttcacactactgttgaccctaaagattgatatacagagaaacagggtgaagcacgaagaatttttaaccctgattaaaggcggcgcctctctagatctgaaagcgtgccctcccaagccttccaaatggattctagatattacatggctgaacctggtggaactgagtaaactgaggcagttcagcgacgttctcgaccagatcagcaggaacgagaaaatgtggaagatatggttcgacaaagagaaccctgaggaagagcccctgcccaatgcctacgataagagcctggattgttttaggagattgctactaatcagatcatggtgcccggaccgcaccatcgcccaggctcgcaaatatatagtggacagtatgggagaaaagtacgcggaaggagtcattctggatctggagaagacctgggaggagagtgatccccgcaccccactgatctgtctgctctctatgggctccgaccccaccgattctattatcgccttaggaaagaggttgaagatcgaaacgaggtacgtctccatgggtcagggtcaagaggtgcacgcacgtaaacttcttcaacaaaccatggctaatggcggctgggctttacttcaaaattgccatctcgggctcgacttcatggacgagctgatggatattattatagaaaccgagctcgtgcatgacgcttttcgtctttggatgactactgaagcgcacaaacagttccctatcacgttactgcagatgtcgattaagttcgcaaatgaccctccgcagggcctccgcgcggggctcaagcggacttattctggggtatcccaggatctgctggatgtgtccagtggctcccaatggaaaccgatgctgtatgcagtagcattcttgcattctacggtgcaagagcgcagaaaatttggagcgcttggatggaacattccctacgaatttaaccaggccgattttaatgcgactgtccagttcatccaaaaccacctcgatgacatggacgtgaagaagggcgtaagctggaccaccatcaggtacatgatcggagagatccagtacggaggccgcgtaaccgatgattacgataagcggctcctgaacaccttcgcaaaagtctggttctcagagaatatgttcggacccgatttctccttctatcagggatacaacattcccaagtgctcaacagttgataactatttgcagtatatccagtccttgccagcatacgattcccctgaggtgtttggcctccatccgaacgcagatatcacatatcaatctaagctagcgaaggacgtcttggataccattctcggcatccaaccgaaggatacgtctggtggtggagatgagacccgggaggctgtcgtggccagactggccgatgacatgctggaaaagctgccccccgattacgttcccttcgaggttaaagaacgattgcaaaagatgggaccattccagcccatgaatatcttcctccgccaggaaatcgacaggatgcagagggtcctgtcgctggtgaggagtaccctgactgagctgaagctcgctattgatggcacgattattatgagcgagaaccttcgggatgccctggactgtatgtttgatgctcgcatcccagcctggtggaaaaaggcctcatggatttcctcaaccctgggattctggttcaccgagttgatagaaaggaacagccagttcacatcatgggtgtttaacggcaggccacattgtttttggatgacaggtttctttaaccctcagggtttccttaccgcgatgcggcaggagatcacccgggccaataagggatgggcactagacaacatggtgttatgtaacgaggtcacgaagtggatgaaagacgatatttccgcgccgcccactgaaggcgtgtacgtatatgggctatatctggagggggccgggtgggataagaggaatatgaagctgattgaatccaaacctaaagtactgttcgagctcatgcctgtcattcgcatatacgctgagaacaatactctacgggatccaaggttttatagttgtcccatttataagaaacccgttcggactgatctcaattacatcgccgcagtagatttgcgcacggctcagacgccagagcactgggtgcttaggggggtggcactcctgtgtgacgtgaaatag

SEQ ID NO: 117291 - DNA, 13875 bp, Artificial Sequence
  derived and/or modified sequence
atgttccgcatcggccggcggcagctgtggaagcacagcgtgaccagggtgctgacccagaggctgaagggggagaaggaggccaagagggccctgctggatgcccggcacaactacctgtttgccatcgtggccagctgcctggacctgaacaagacagaggtggaggatgccatcctggagggcaaccagatcgagagaattgaccagctgtttgctgtgggcggcctgcggcacctgatgttctactaccaggatgtggaggaggccgagaccggccagctgggcagcctgggcggcgtgaacctggtgtctgggaagatcaagaagcccaaggtgtttgtgacagagggcaatgatgtggccctgactggagtgtgtgtgttcttcatcagaacagaccccagcaaggccatcaccccagacaacatccaccaggaggtgtccttcaacatgctggatgctgctgatggcggcctgctgaacagcgtgcggcggctgctgagtgacatcttcatcccagccctgcgggccaccagccacggctggggcgagctggagggcctgcaggatgctgccaacatccggcaggagttcctgagcagcctggagggctttgtgaatgtgctgagcggggcccaggagagcctgaaggagaaggtgaacctgaggaaatgtgacatcctggagctgaagaccctgaaggagcccacagactacctgaccctggccaacaaccctgagaccctgggcaagattgaggactgcatgaaggtgtggatcaagcagacagagcaggtgctggccgagaacaaccagctgctgaaggaggctgatgatgtgggccccagggctgagctggagcactggaagaagaggctgagcaagttcaactacctgctggagcagctgaagagcccagatgtgaaggctgtgctggccgtgctggccgccgccaagagcaagctgctgaagacctggagggagatggacatccgcatcacagatgccaccaatgaggccaaggacaacgtgaagtacctgtacaccctggagaagtgctgtgaccccctgtacagcagtgaccccctgtccatgatggatgccatccccaccctcatcaatgccatcaagatgatctacagcatcagccactactacaacaccagcgagaagatcaccagcctgtttgtgaaggtgaccaaccagatcatcagcgcctgcaaggcctacatcaccaacaatggaacagccagcatctggaaccagccccaggatgtggtggaggagaagatcctgagcgccatcaagctgaagcaggagtaccagctgtgcttccacaagaccaagcagaagctgaagcagaaccccaatgccaagcagtttgacttcagcgagatgtacatctttgggaagtttgagaccttccaccggcggctggccaagatcatcgacatcttcaccaccctgaagacctacagcgtgctgcaggacagcaccatcgagggcctggaggacatggccaccaagtaccagggcatcgtggccaccatcaagaagaaggagtacaacttcctggaccagaggaagatggactttgaccaggactatgaggagttctgcaagcagaccaatgacctgcacaatgagctgaggaagttcatggatgtgacctttgccaagatccagaacaccaaccaggccctgaggatgctgaagaagtttgagcggctgaacatccccaacctgggcattgatgacaagtaccagctgatcctggagaactacggggctgacatcgacatgatcagcaagctgtacaccaagcagaagtatgacccccccctggccaggaaccagccccccatcgccggcaagatcctgtgggcccggcagctgttccaccgcatccagcagcccatgcagctgttccagcagcaccctgctgtgctgagcacagctgaggccaagcccatcatccgcagctacaacaggatggccaaggtgctgctggagtttgaggtgctcttccaccgggcctggctgcggcagatcgaggagatccacgtgggcctggaggccagcctgctggtgaaggcccctggcactggagagctgtttgtgaactttgacccccagatcctgatcctcttccgggagacagagtgcatggcccagatgggcctggaggtgagccccctggccaccagcctcttccagaagagggaccgctacaagaggaacttcagcaacatgaagatgatgctggccgagtaccagagggtgaagagcaagatcccagctgccatcgagcagctgattgtgccccacctggccaaggtggatgaggccctgcagcccggcctggccgccctgacctggaccagcctgaacatcgaggcctacctggagaacacctttgccaagatcaaggacctggagctgctgctggacagagtgaatgacctgattgagttcagaattgatgccatcctggaggagatgagcagcacccccctgtgccagctgccccaggaggagcccctgacctgtgaggagttcctgcagatgaccaaggacctgtgtgtgaatggagcccagatcctgcacttcaagagcagcctggtggaggaggccgtgaatgagctggtgaacatgctgctggatgtggaggtgctgtctgaggaggagagcgagaagatcagcaatgaaaacagcgtgaactacaagaatgaaagcagcgccaagcgggaggagggcaactttgacaccctgaccagcagcatcaatgcccgggccaatgccctgctgctgaccaccgtgaccaggaagaagaaggagacagagatgctgggggaggaggcccgggagctgctgagccacttcaaccaccagaacatggatgccctgctgaaggtgaccaggaacaccctggaggccatcaggaagaggatccacagcagccacaccatcaacttccgggacagcaacagcgccagcaacatgaagcagaacagcctgcccatcttccgggcctctgtgaccctggccatccccaacatcgtgatggccccagccctggaggatgtgcagcagaccctgaacaaggctgtggagtgcatcatctctgtgcccaagggcgtgcggcagtggagcagcgagctgctgagcaagaagaagatccaggagaggaagatggccgccctgcagagcaatgaagattctgacagtgatgtggagatgggagaaaatgagctgcaggacaccctggagatcgcctctgtgaacctgcccatccctgtgcagaccaagaactactacaagaatgtgtctgagaacaaggagatcgtgaagctggtgtctgtgctgagcaccatcatcaacagcaccaagaaggaggtgatcacctccatggactgcttcaagcgctacaaccacatctggcagaagggcaaggaggaggccatcaagaccttcatcacccagagccccctgctgtctgaatttgagagccagatcctgtacttccagaacctggagcaggagatcaatgctgagccagaatatgtgtgtgtgggcagcatcgccctgtacacagctgacctgaagtttgccctgacagctgagaccaaggcctggatggtggtgattggccgccactgcaacaagaagtacagaagtgagatggagaacatcttcatgctgattgaggagttcaacaagaagctgaaccggcccatcaaggacctggatgacatcagaattgccatggccgccctgaaggagatccgggaggagcagatcagcattgacttccaggtgggccccatcgaggagagctatgccctgctgaacagatatggcctgctgattgcccgggaggagattgacaaggtggacaccctgcactacgcctgggagaagctgctggcccgggccggggaggtgcagaacaagctggtgtccctgcagcccagcttcaagaaggagctgatctctgctgtggaggtgttcctgcaggactgccaccagttctacctggactatgacctgaatggccccatggccagcggcctgaagccccaggaggccagtgacaggctcatcatgttccagaaccagtttgacaacatctacaggaagtacatcacctacacaggaggagaggagctgtttggcctgcctgccacccagtacccccagctgctggagatcaagaagcagctgaacctgctgcagaagatctacaccctgtacaacagcgtgattgaaacagtgaacagctactatgacatcctgtggagcgaggtgaacatcgagaagatcaacaatgagctgctggagttccagaaccgctgcaggaagctgccccgggccctgaaggactggcaggccttcctggacctgaagaagatcattgatgacttcagcgagtgctgccccctgctggagtacatggccagcaaggccatgatggagcggcactgggagcgcatcaccaccctgaccggccacagcctggatgtgggcaatgaaagcttcaagctgaggaacatcatggaggcccccctgctgaagtacaaggaggagattgaggacatctgcatctctgctgtgaaggagcgggacatcgagcagaagctgaagcaggtgatcaatgagtgggacaacaagaccttcaccttcggcagcttcaagaccagaggagagctgctgctgcggggggacagcaccagcgagatcatcgccaacatggaggacagcctgatgctgctgggcagcctgctgagcaaccgctacaacatgcccttcaaggcccagatccagaagtgggtgcagtacctgagcaacagcacagacatcatcgagagctggatgacagtgcagaacctgtggatctacctggaggccgtgtttgtgggcggggacatcgccaagcagctgcccaaggaggccaagcgcttcagcaacatcgacaagtcctgggtgaagatcatgacccgggcccacgaggtgcccagcgtggtgcagtgctgcgtgggagatgagaccctgggccagctgctgccccacctgctggaccagctggagatctgccagaagagcctgaccggctacctggagaagaagaggctgtgcttcccccgcttcttctttgtgtctgaccctgccctgctggagatcctgggccaggccagtgacagccacaccatccaggcccacctgctgaatgtgtttgacaacatcaagtctgtgaagttccacgagaagatctatgaccgcatcctgagcatcagcagccaggagggggagaccatcgagctggacaagcctgtgatggccgagggcaatgtggaggtgtggctgaacagcctgctggaggagagccagagcagcctgcacctggtgatccggcaggccgccgccaacatccaggagaccggcttccagctgacagagttcctgagcagcttccctgcccaggtgggcctgctgggcatccagatgatctggacccgggacagcgaggaggccctgagaaatgccaagtttgacaagaagatcatgcagaagaccaaccaggccttcctggagctgctgaacaccctgattgatgtgaccacccgggacctgagcagcacagagcgggtgaagtatgagaccctcatcaccatccacgtgcaccagagggacatctttgatgacctgtgccacatgcacatcaagagccccatggactttgagtggctgaagcagtgccgcttctacttcaatgaagacagcgacaagatgatgatccacatcacagatgtggccttcatctaccagaatgagttcctgggctgcacagaccggctggtgatcacccccctgacagaccgctgctacatcaccctggcccaggccctgggcatgtccatgggcggggccccagctggccctgctggcaccgggaagacagagaccaccaaggacatgggccgctgcctgggcaagtatgtggtggtgttcaactgcagcgaccagatggacttccggggcctgggccgcatcttcaagggcctggcccagagcggctcctggggctgctttgatgagttcaacagaattgacctgcctgtgctgtctgtggccgcccagcagatcagcatcatcctgacctgcaagaaggagcacaagaagagcttcatcttcacagatggagacaacgtgaccatgaaccctgagtttggcctcttcctgaccatgaaccctggctacgccggccggcaggagctgcctgagaacctgaagatcaacttccgctctgtggccatgatggtgcctgaccggcagatcatcatccgggtgaagctggccagctgtggcttcatcgacaacgtggtgctggccaggaagttcttcaccctgtacaagctgtgtgaggagcagctgagcaagcaggtgcactatgactttggcctgaggaacatcctgtctgtgctgcggaccctgggcgccgccaagagggccaaccccatggacacagagagcaccatcgtgatgagggtgctgcgggacatgaacctgagcaagctgattgatgaagatgagcccctcttcctgagcctgattgaggacctcttccccaacatcctgctggacaaggccggctacccagagctggaggccgccatcagccggcaggtggaggaggccggcctcatcaaccaccccccctggaagctgaaggtgatccagctgtttgagacccagagggtgcgccacggcatgatgaccctgggccccagcggggccggcaagaccacctgcatccacaccctgatgagggccatgacagactgtgggaagccccaccgggagatgaggatgaaccccaaggccatcacagccccccagatgtttggccgcctggatgtggccaccaatgactggacagatggcatcttcagcaccctgtggaggaagaccctgcgggccaagaagggggagcacatctggatcatcctggatggccctgtggatgccatctggattgagaacctgaacagcgtgctggatgacaacaagaccctgaccctggccaatggagaccgcatccccatggcccccaactgcaagatcatctttgagccccacaacatcgacaatgccagccctgccaccgtgtccagaaatggcatggtgttcatgagcagcagcatcctggactggagccccatcctggagggcttcctgaagaagaggagcccccaggaggccgagatcctgcggcagctgtacacagagagcttcccagacctgtaccgcttctgcatccagaacctggagtacaagatggaggtgctggaggcctttgtgatcacccagagcatcaacatgctgcagggcctcatccccctgaaggagcagggcggggaggtgtcccaggcccacctgggccgcctgtttgtgtttgccctgctgtggagcgctggggccgccctggagctggatggaagaagaaggctggagctgtggctgcggagccggcccaccggcaccctggagctgcccccacctgctggccctggggacacagcctttgactactacgtggccccagatggcacctggacccactggaacaccaggacccaggagtacctgtaccccagcgacaccaccccagaatatggcagcatcctggtgcccaacgtggacaacgtgaggacagacttcctgatccagaccatcgccaagcagggcaaggctgtgctgctgattggagagcagggcacagccaagacagtcatcatcaagggcttcatgagcaaatatgaccctgagtgccacatgatcaagagcctgaacttcagcagcgccaccacccccctgatgttccagaggaccatcgagagctatgtggacaagaggatgggcaccacctacggccccccagctgggaagaagatgacagtgttcattgatgatgtgaacatgcccatcatcaatgagtggggagaccaggtgaccaatgaaattgtgcggcagctgatggagcagaatggcttctacaacctggagaagccaggagagttcaccagcatcgtggacatccagttcctggccgccatgatccaccctgggggcggcagaaatgacatcccccagaggctgaagaggcagttcagcatcttcaactgcaccctgcccagcgaggcctctgtggacaagatctttggagtcatcggcgtgggccactactgcacccagaggggcttcagcgaggaggtgcgggacagcgtgaccaagctggtgcccctgacccggcggctgtggcagatgaccaagatcaagatgctgcccaccccagccaagttccactacgtgttcaacctgcgggacctgagccgggtgtggcagggcatgctgaacaccaccagcgaggtgatcaaggagcccaatgacctgctgaagctgtggaagcatgagtgcaagagggtgattgctgaccgcttcaccgtgtccagtgatgtgacctggtttgacaaggccctggtgtccctggtggaggaggagtttggagaggagaagaagctgctggtggactgtggcatcgacacctactttgtggacttcctgagagatgcccctgaggccgccggggagaccagcgaggaggctgatgctgagacccccaagatctatgagcccatcgagagcttcagccacctgaaggagcggctgaacatgttcctgcagctgtacaatgaaagcatccggggggccggcatggacatggtgttctttgctgatgccatggtgcacctggtgaagatcagcagggtcatccgcaccccccagggcaatgccctgctggtgggcgtgggcggcagcggcaagcagagcctgacccggctggccagcttcatcgccggctacgtgtccttccagatcaccctgaccaggagctacaacaccagcaacctgatggaggacctgaaggtgctgtacagaacagctggccagcagggcaagggcatcaccttcatcttcacagacaatgagatcaaggatgagagcttcctggagtacatgaacaacgtgctgagcagtggagaggtgagcaacctgtttgccagagatgaaattgatgagatcaacagcgacctggcctctgtgatgaagaaggagttcccccgctgcctgcccaccaatgaaaacctgcatgactacttcatgagccgggtgcggcagaacctgcacatcgtgctgtgcttcagccctgtgggggagaagttcaggaacagagccctgaagtttcctgccctgatcagcggctgcaccatcgactggttcagccgctggcccaaggatgccctggtggccgtgtctgagcacttcctgaccagctatgacatcgactgcagcctggagatcaagaaggaggtggtgcagtgcatgggcagcttccaggatggagtggccgagaagtgtgtggactacttccagcgcttccgccgcagcacccacgtgacccccaagagctacctgtccttcatccagggctacaagttcatctatggagagaagcacgtggaggtgaggaccctggccaacaggatgaacacaggcctggagaagctgaaggaggccagcgagagcgtggccgccctgagcaaggagctggaggccaaggagaaggagctgcaggtggccaatgacaaggctgacatggtgctgaaggaggtgaccatgaaggcccaggccgctgagaaggtgaaggccgaggtgcagaaggtgaaggaccgggcccaggccatcgtggacagcatcagcaaggacaaggccatcgccgaggagaagctggaggccgccaagccagccctggaggaggccgaggccgccctgcagaccatccggcccagcgacatcgccaccgtgaggaccctgggccggcccccccacctgatcatgaggatcatggactgtgtgctgctgctcttccagaggaaggtgtctgctgtgaagattgacctggagaagagctgcaccatgcccagctggcaggagagcctgaagctgatgacagctggcaacttcctgcagaacctgcagcagttccccaaggacaccatcaatgaggaggtgattgagttcctgagcccctactttgagatgccagactacaacattgaaacagccaagagggtgtgtggaaatgtggccggcctgtgctcctggaccaaggccatggccagcttcttcagcatcaacaaggaggtgctgcccctgaaggccaacctggtggtgcaggagaacagacacctgctggccatgcaggacctgcagaaggcccaggccgagctggatgacaagcaggccgagctggatgtggtgcaggccgagtatgagcaggccatgacagagaagcagaccctgctggaggatgctgagcgctgccgccacaagatgcagacagccagcaccctcatcagcggcctggccggggagaaggagcgctggacagagcagagccaggagtttgctgcccagaccaagaggctggtgggagatgtgctgctggccacagccttcctgagctacagcggccccttcaaccaggagttccgggacctgctgctgaatgactggaggaaggagatgaaggccaggaagatcccctttgggaagaacctgaacctgtctgagatgctgattgatgcccccaccatcagcgagtggaacctgcagggcctgcccaatgatgacctgagcatccagaatggcatcatcgtgaccaaggccagccgctaccccctgctgattgacccccagacccagggcaagatctggatcaagaacaaggagagcagaaatgagctgcagatcaccagcctgaaccacaagtacttcaggaaccacctggaggacagcctgagcctgggccggcccctgctgattgaagatgtgggggaggagctggaccctgccctggacaacgtgctggagaggaacttcatcaagacaggcagcaccttcaaggtgaaggtgggggacaaggaggtggatgtgctggatggcttccggctgtacatcaccaccaagctgcccaacccagcctacaccccagagatcagcgcccggaccagcatcatcgacttcaccgtgaccatgaagggcctggaggaccagctgctgggccgggtcatcctgacagagaagcaggagctggagaaggagaggacccacctgatggaggatgtgacagccaacaagaggaggatgaaggagctggaggacaacctgctgtaccgcctgaccagcacccagggcagcctggtggaggatgagagcctcatcgtggtgctgagcaacaccaagaggacagctgaggaggtgacccagaagctggagatctctgctgagacagaggtgcagatcaacagcgcccgggaggagtacagacctgtggccacccggggcagcatcctgtacttcctgatcacagagatgaggctggtgaatgagatgtaccagaccagcctgcggcagttcctgggcctgtttgacctgagcctggcccggtctgtgaagagccccatcaccagcaagagaattgccaacatcatcgagcacatgacctatgaggtgtacaagtatgctgcccggggcctgtatgaggagcacaagttcctgttcaccctgctgctgaccctgaagattgacatccagaggaacagagtgaagcatgaggagttcctgaccctcatcaagggcggggccagcctggacctgaaggcctgcccccccaagcccagcaagtggatcctggacatcacctggctgaacctggtggagctgagcaagctgcggcagttcagtgatgtgctggaccagatcagcagaaatgagaagatgtggaagatctggtttgacaaggagaaccctgaggaggagcccctgcccaatgcctatgacaagagcctggactgcttccggcggctgctgctgatccgctcctggtgcccagacaggaccatcgcccaggccaggaagtacatcgtggacagcatgggagagaagtatgcagagggcgtcatcctggacctggagaagacctgggaggagagtgaccccaggacccccctcatctgcctgctgtccatgggcagtgaccccacagacagcatcatcgccctgggcaagaggctgaagattgagacccgctacgtgtccatgggccagggccaggaggtgcacgccaggaagctgctgcagcagaccatggccaatggaggctgggccctgctgcagaactgccacctgggcctggacttcatggatgagctgatggacatcatcattgaaacagagctggtgcatgatgccttccggctgtggatgaccacagaggcccacaagcagttccccatcaccctgctgcagatgagcatcaagtttgccaatgaccccccccagggcctgcgggccggcctgaagaggacctacagcggcgtgtcccaggacctgctggatgtgagcagcggcagccagtggaagcccatgctgtatgctgtggccttcctgcacagcacagtgcaggagaggaggaagtttggagccctgggctggaacatcccctatgagttcaaccaggccgacttcaatgccaccgtgcagttcatccagaaccacctggatgacatggatgtgaagaagggcgtgtcctggaccaccatccgctacatgattggagagatccagtatggaggccgggtgacagatgattatgacaagaggctgctgaacacctttgccaaggtgtggttcagcgagaacatgtttggaccagacttctccttctaccagggctacaacatccccaagtgcagcacagtggacaactacctgcagtacatccagagcctgcctgcctatgacagccctgaggtgtttggcctgcaccccaatgctgacatcacctaccagagcaagctggccaaggatgtgctggacaccatcctgggcatccagcccaaggacaccagcggcggcggagatgagacccgggaggccgtggtggcccggctggctgatgacatgctggagaagctgcccccagactatgtgccctttgaggtgaaggagcggctgcagaagatgggccccttccagcccatgaacatcttcctgcggcaggagattgacaggatgcagagggtgctgagcctggtgcgcagcaccctgacagagctgaagctggccattgatggcaccatcatcatgtctgagaacctgagagatgccctggactgcatgtttgatgcccgcatcccagcctggtggaagaaggcctcctggatcagcagcaccctgggcttctggttcacagagctgattgaaagaaacagccagttcacctcctgggtgttcaacggccggccccactgcttctggatgacaggcttcttcaacccccagggcttcctgacagccatgaggcaggagatcacccgggccaacaagggctgggccctggacaacatggtgctgtgcaatgaggtgaccaagtggatgaaggatgacatcagcgccccacccacagagggcgtgtatgtgtatggcctgtacctggagggcgccggctgggacaagaggaacatgaagctgattgagagcaagcccaaggtgctgtttgagctgatgcctgtgatccgcatctatgcagagaacaacaccctgcgggacccccgcttctacagctgccccatctacaagaagcctgtgaggacagacctgaactacatcgctgctgtggacctgaggacagcccagaccccagagcactgggtgctgcggggcgtggccctgctgtgtgatgtgaagtag

SEQ ID NO: 117292 - DNA, 13875 bp, Artificial Sequence
  derived and/or modified sequence
atgttccggatcggccggcggcagctgtggaagcacagcgtgacccgggtgctgacacaaagattgaaaggggaaaaggaggccaaaagagctctccttgatgccagacataactatcttttcgccattgtggcatcctgtcttgacctgaataaaacagaggtcgaggacgcaatcctggaaggaaatcaaattgaacggatcgatcagttgttcgccgttggcggattgagacatctcatgttttattatcaggacgtggaagaggccgagactggccaactgggaagcctggggggggtcaatttggtaagcggaaagatcaagaaacctaaggtgttcgtgaccgagggtaacgatgtggccctcacgggcgtgtgcgtgttctttatacgaactgacccttccaaagctatcactccagataacattcatcaagaggtctcctttaacatgttagacgccgcagacgggggcctcctgaacagcgttcgaagattactgtctgacattttcataccggctctgcgcgcgacaagccacggctggggggagctcgaggggctccaggacgcagcgaatattaggcaagagtttctgagcagcctggaagggtttgtgaacgtcctctctggcgcacaggaatcactgaaggagaaagttaacctgcgcaaatgcgacatcctagagctgaagactctgaaggagcccacagactacctaactttagccaataatcccgagactctaggaaagattgaagactgtatgaaggtttggatcaagcagacagagcaggtgctggctgaaaataatcaactcttaaaggaagcggacgacgtaggaccgagagcggaattggaacactggaagaagaggttgtccaagttcaactatctgctggaacagctaaagtcccctgacgtgaaagccgtgctcgctgtgttggccgccgcgaagtctaaactgctgaagacatggagggaaatggatatccggattaccgacgcaactaacgaagcaaaggataatgttaagtatctctatacacttgaaaaatgttgtgatcccctttattcttcagaccccctgtccatgatggatgctatccctactcttataaacgctatcaaaatgatatactccattagccactactacaatacctccgagaaaataacttcactgtttgtgaaagtgacaaaccagatcatctcagcatgtaaggcctatatcacaaacaatggaaccgccagtatttggaatcagccacaggacgtagtggaagaaaagattctgagtgctatcaaactgaagcaggagtaccagctctgtttccacaagaccaagcagaaacttaagcagaaccccaacgcaaaacaatttgacttctctgaaatgtatatattcgggaaattcgagacttttcacaggagactcgctaaaatcatagatatcttcaccaccttaaagacctatagtgttctgcaggatagcactatagaagggctcgaggacatggccacaaagtaccagggcattgtcgctactataaagaaaaaggaatacaacttccttgaccagagaaaaatggactttgatcaggattacgaagagttttgcaagcaaaccaacgacctgcataacgagctgcggaagttcatggacgtcacttttgccaaaattcagaacaccaaccaggccctgaggatgctcaaaaagtttgagagactcaacatacctaacctcggaattgatgataaataccaactgattctggaaaattatggtgctgatatcgacatgatatccaagctttatactaaacagaaatatgaccccccactggccaggaatcagcctcccattgccggcaaaatcctgtgggcgcggcagctgtttcaccgaatccagcagcccatgcagttattccaacagcatcctgctgtcttgtcaactgcagaagccaagcccatcattaggagctacaaccgcatggcgaaggtcctcctagagtttgaagtattatttcatcgcgcatggctacgtcagattgaggaaatacacgtggggcttgaggctagtttattggttaaggcgcctgggaccggagagctcttcgtgaactttgacccgcagatcttgatcctattcagagagacagaatgcatggctcagatgggcctggaagtgtctcccctggctaccagtttattccaaaagcgagatcggtataagcgcaatttctccaacatgaagatgatgctagctgaataccagcgtgttaagtctaaaataccagcagctatcgaacagcttatcgtcccccacctggccaaggtggacgaggcactgcaacctgggctcgctgcgctcacttggacgagccttaacattgaagcctacctcgagaataccttcgcgaaaataaaggatttggagctgttactggacagagtaaatgatctcattgagtttagaattgacgcgattctcgaagagatgtcttccacacctctttgccagctgccacaggaagagcccctaacttgtgaggaattcctccaaatgacaaaagatttgtgcgtgaacggggctcagatcctccacttcaagagtagtcttgtggaggaggccgtcaacgagctggtgaacatgctcctggatgtagaagtgttgtctgaggaggagtctgagaaaatctcaaacgaaaattccgtgaattataaaaacgagagcagcgccaagagagaggaggggaactttgacactctcacctcttcaatcaatgcacgagccaacgcccttctcctcaccacggtgactaggaagaaaaaggaaaccgagatgttaggtgaggaggcgagagagctgctttctcatttcaaccaccagaacatggatgctttactgaaagtgaccagaaataccctggaagcaattcgcaagcggattcattcatcgcacaccataaacttcagggattctaattctgcctccaatatgaagcagaactcccttccaattttccgcgccagcgtaacattggccatcccaaacatagttatggcacctgccctagaggatgtgcagcagactcttaataaggcagtggagtgtatcatcagtgtgcctaaaggcgtaagacaatggtcttccgagctgctttctaagaagaagatccaggagcgtaagatggctgctctgcagagtaacgaggactcggacagcgacgtggaaatgggggagaatgagctgcaggacaccttggagatagcttccgtcaacctgcccatccccgtgcagacaaagaattactacaagaatgtcagtgaaaataaagaaatcgtcaaactcgtgagcgtactttcgacaataataaattcgaccaagaaggaagttataaccagtatggactgttttaaaaggtataatcacatctggcaaaaaggtaaggaggaagccattaagacctttatcacccagtctcctctactgagcgaattcgagagccagatcttatactttcaaaacctggaacaggagatcaacgcagaaccagagtatgtttgtgtgggttccatcgctctttatacagccgacctcaaattcgctctcaccgccgaaacaaaggcatggatggtcgtgattggtcgccactgtaacaagaagtatagaagcgaaatggagaatattttcatgttgatcgaggaatttaacaaaaaacttaaccgacccattaaggatttggacgatatcaggatcgcaatggcagcgctgaaggaaataagggaagagcaaatctctattgactttcaggtaggtccaatagaagaatcttatgcgctcctgaataggtatggccttctcatcgctcgcgaagagatcgataaagtggatacactgcactatgcttgggagaaactgttggcccgggcaggggaagtccagaataagcttgtgagcctgcaaccgtcttttaaaaaggaattgatctcggctgtggaagtgtttctgcaggattgtcaccagttttacctggactacgaccttaatggaccaatggcctccggactcaaacctcaggaagcctccgatcggctgatcatgtttcagaaccagtttgataatatttatcgtaagtatattacctacactggtggcgaagaactgttcggcctgcctgcaactcagtacccacaacttttagaaattaagaaacagctcaatctgttgcagaagatatatacattgtacaatagcgtcatcgagaccgtgaatagctattacgacattctgtggagcgaggttaacattgagaaaattaacaacgagctcctcgaattccagaacaggtgcagaaagttgccgagagcactgaaggattggcaagctttcctcgacttgaagaagatcatagacgacttctcagaatgttgtccattgctggagtacatggcctccaaggccatgatggaaaggcactgggaaaggattaccaccctgactgggcatagtctggacgtcggaaatgagagttttaaactccgcaacatcatggaagcgcccctgttaaaatataaggaagagatagaagacatttgcatctcggctgtgaaagagagagatattgaacaaaagctcaaacaagtgatcaatgagtgggacaataagacatttacttttggatcgtttaaaacaaggggggagctcctgctacggggcgatagcacctccgaaatcatcgcaaacatggaggacagcctaatgttactggggtcactgctctccaacagatacaacatgccctttaaggcccagatccagaagtgggtccaatatctctccaactctacagacattattgagtcttggatgactgttcaaaacttatggatctacttggaagccgtttttgtcgggggtgatatcgccaagcagttgcctaaagaagctaaaaggttttcaaatattgataagtcttgggttaaaatcatgacacgagcccacgaagtccctagcgtggtgcagtgctgcgtcggcgacgagacattaggacagctgctgccgcacctactcgatcagctggaaatatgccaaaaatcacttaccgggtatctggagaaaaagcgactgtgttttccacgattttttttcgttagcgaccctgctttactcgagatactggggcaggcttccgacagccacacaatacaggcccatctgttgaacgtgttcgacaacatcaaaagtgtcaaatttcacgagaaaatatacgaccgtatccttagcatctcgagccaagaaggggagactattgagctggataaaccggtgatggccgagggaaacgtggaggtctggctgaacagtctgctggaagagtctcagagcagtctgcatctcgttattcggcaggccgcggctaacattcaggaaaccgggtttcagctgacggaattcctgtcatccttccctgcccaggtcggactgctcggaattcaaatgatttggacaagagactctgaggaggctttaaggaatgccaagttcgacaagaagataatgcagaaaacaaatcaagccttcttagagctgcttaataccctgattgacgtgacgacaagggacctgagtagcactgagagagtgaaatatgagacccttattactatccacgtccatcagcgggatatttttgacgacctgtgtcacatgcacattaaatctcccatggacttcgagtggcttaagcaatgtcgattctacttcaacgaggactcagacaaaatgatgatccacatcacagacgtggcattcatttaccaaaacgagttcctgggatgtaccgacaggcttgtgataacaccactgaccgacaggtgctatatcactctcgcccaggccctgggcatgagcatgggcggtgcccctgccggacccgcagggaccggcaaaacagaaaccacgaaagatatgggtcggtgtctgggaaagtacgtcgtcgtgttcaattgttccgaccagatggactttcgcggcctggggcggattttcaaagggctggctcagtccggatcatggggctgtttcgatgaatttaacagaatcgatcttcctgtgttgtctgttgccgcacaacagattagtattatcctgacatgtaagaaagaacacaaaaagtccttcatatttaccgacggggacaatgtcacaatgaacccggagttcggcttgtttctgactatgaacccagggtatgccgggcggcaggagttgccggagaacttaaagatcaattttaggtccgtagccatgatggtgcccgacagacagataatcatacgcgttaaattagcgagctgcggatttatcgataacgtggtactagctagaaaatttttcactctctacaagctgtgcgaagagcagctgagtaaacaagtccactacgattttgggctgcggaacattctcagtgttcttcgcacactcggcgccgccaagcgcgccaatcctatggacacggaaagcactattgtaatgagggttctccgggacatgaatctcagcaagttgattgacgaggacgaaccgctgttcctttcactgattgaggacctgtttccaaacatcctgctggacaaggccgggtatcccgaattggaggccgcgatcagcaggcaggtagaggaggcaggtctgataaatcaccctccctggaagctgaaagtgatccaactgttcgagacacagagagttcgccacggtatgatgaccctggggccctccggagccggcaagacgacttgtattcatacactcatgcgggccatgactgactgtgggaaacctcatagggagatgcgtatgaacccgaaagctattaccgctccacagatgtttgggagactcgacgtcgccaccaacgactggaccgacggaatctttagcaccttatggcgtaagactttgcgagccaaaaagggagagcatatctggatcatcttggacggtccagtcgatgccatatggatcgagaacctgaactccgttctggacgacaataaaacactgaccctggccaatggggatagaatcccaatggctccaaattgcaaaattatttttgaaccacacaatatcgacaacgctagtcctgcaactgtgtccaggaatggtatggtgtttatgagctcatcaattctggattggtcgccgatcttagagggattcttaaaaaaacgatctccacaagaagcagaaatcctcaggcagctctataccgaatcatttcctgacctttacaggttttgcattcagaacctcgaatacaaaatggaggtgctggaagccttcgttataacccaatctatcaacatgctgcaaggtctgatccctctaaaagagcagggcggcgaagtcagtcaggctcaccttggacggttatttgttttcgcactgctgtggtccgccggggcggccttagagctggatggtagacgccgcctcgaattgtggctgagatcgagaccgactgggacccttgagttgccccctccagccggtccgggggataccgcttttgactattacgtcgctccggacggaacctggacccattggaacacccggacacaagagtatctctacccttcagacaccacaccagaatatgggagcatcttagtgcctaacgtggataatgtccgcacagacttcctaattcagacaatagccaaacaggggaaagccgtgctgctcatcggcgagcaggggaccgccaagactgtcatcataaagggatttatgtccaagtatgaccctgagtgccacatgatcaaaagtctgaatttttctagtgcaacaaccccactaatgttccagcggaccatcgagtcctacgtggataagaggatggggaccacctatggacccccagccgggaagaaaatgaccgtttttattgacgatgtgaacatgcccataataaatgaatggggagaccaggtgacaaacgaaatagtcagacagttgatggagcagaacggattctacaacttggagaaacctggagaatttaccagcattgttgatattcagtttctggccgcgatgatacaccccggaggcggcagaaacgacatacctcaacgactgaaacgtcagttctccatatttaactgcactcttccttccgaggccagcgtggacaagatctttggtgtcatcggggtgggccattactgtacacaacgcggctttagcgaggaggtgagagactcggtgactaaactggtgccactcaccagacgcctgtggcaaatgaccaaaataaaaatgctgcccacaccagcaaaatttcattatgtgtttaatctgcgcgatttatccagggtgtggcagggcatgctaaacacgacctcggaggttatcaaagaacccaacgatctgctgaaactatggaagcacgaatgcaagagagtgatagcggaccgctttaccgtgtctagtgacgtgacctggtttgataaggccctcgttagcctggtggaagaagagttcggggaggaaaaaaagctgcttgtggactgcgggatagatacctactttgtcgattttttgcgcgatgcccctgaagcggccggagaaacttctgaggaggcggacgctgagacccccaaaatttacgagccgatcgagagcttttctcatctgaaagagcggcttaacatgtttctgcagttgtacaatgagagcattcgaggtgccgggatggatatggtgttctttgccgacgccatggtgcatcttgttaaaatttcgagagtgatccgtacaccgcagggtaatgccctgctcgtgggtgttggtggttcgggcaagcagagcctgaccagattggcatccttcattgctggctatgttagcttccaaataacccttactaggtcgtataacacatccaatctgatggaagacctcaaagtattgtacagaacagctggccagcaggggaaagggattaccttcattttcacagacaacgagatcaaggacgagtccttcttggagtatatgaacaatgtccttagttctggggaggtgagtaacctcttcgcaagagacgaaatcgacgaaatcaacagcgatctcgctagcgtcatgaagaaggagttccctcgatgcctgcctacaaatgagaacctgcacgactactttatgtcccgggtgcggcaaaacctgcacatcgttctgtgcttttcccccgtcggggaaaagtttcggaaccgggccctcaaatttccggcgctgatcagcggctgtaccattgactggtttagcagatggcctaaggatgcccttgtggctgttagtgaacactttttgacatcgtatgacatcgactgttctctggagatcaagaaggaggttgtgcagtgcatgggaagttttcaggacggagtggctgaaaaatgcgtggactacttccaacggttccgacgatccacccacgtcacccctaaatcttatcttagtttcatccagggctataagtttatttacggcgagaagcacgtagaggtgaggaccctcgccaaccgaatgaatacaggactggaaaagctgaaggaggcatccgaatctgttgcagctctaagcaaggaactggaggctaaagaaaaggagctccaggtggccaacgacaaagcagatatggttctgaaggaggtgacaatgaaggcgcaagccgcagagaaggtgaaagcagaagtacagaaggtcaaagaccgtgcccaggcaatcgtagactcaatttctaaggacaaggctattgcggaggagaagttggaggcagccaaacccgctctggaggaagcagaagcagccctgcagactatacggcccagcgacatcgccacagtccggaccttggggcgtcctcctcatctgatcatgcgaatcatggactgtgtgctgttattgtttcagaggaaggtgtcagcagtaaagatagatctcgaaaaaagttgtactatgccctcctggcaggagtccctgaagcttatgaccgcgggtaatttcttgcagaatcttcagcagtttccaaaagataccatcaacgaggaggtgattgagttcttgagcccctacttcgaaatgccagactacaatattgaaacagctaagcgggtgtgcgggaacgtggccggcctgtgctcttggactaaggcaatggcttctttttttagcattaacaaggaggtccttcccctgaaggccaatctcgtggttcaggagaaccgacacttgctggcaatgcaggatctccagaaggctcaggccgaactcgatgacaagcaggcggaattggacgtggtccaggcggagtatgagcaggccatgacagagaaacaaactctgttggaggatgcggaaaggtgtaggcacaaaatgcagaccgctagtactttgatctcaggactcgctggagaaaaagaaaggtggactgaacaatcgcaggagtttgccgctcagaccaagaggctggtgggggatgtgttgttggcaaccgctttcttaagctactccggtccatttaaccaggaattccgagatttgctgcttaacgattggaggaaagaaatgaaagctcggaagattccttttggcaaaaacctgaatctctccgagatgctgatcgacgctcccaccataagcgaatggaacttacaggggctacctaatgatgatctgagcattcaaaacggcataatcgttacgaaggcatctcggtatccactgcttatcgacccacaaactcaggggaaaatatggataaagaacaaagagtcccgcaatgagcttcagatcacctctttaaaccataagtacttccggaaccacctggaagatagcctgtccctggggcggcccttactgatcgaggatgtcggtgaagagcttgatcctgccttggataatgtactggagagaaacttcattaagacaggaagtaccttcaaagtaaaagtgggggacaaggaagtggatgtccttgacggatttcgcctgtatattacgacaaagttgcccaatccagcttatacccccgagatttctgcacggacaagcatcatcgacttcacagtgactatgaaaggcctagaagatcagctgctgggccgcgttatcctgaccgagaaacaggagcttgaaaaggagcgtacacatctcatggaggacgtcacagccaacaagaggcgtatgaaggagttagaggataatctgctttatagattgacctcaacacaaggttcactcgttgaagatgaatcgttaatagttgtgttgtcgaacacaaagcgcaccgctgaagaggtcactcagaaactcgaaatctctgctgaaacggaggtgcagataaactctgcccgggaggaataccggccagtggcaacaaggggctccatcctctactttctcatcacagagatgcgtctagtcaatgagatgtatcagacctctctgcggcaatttctggggttgtttgacctcagtctagccagaagtgtgaaaagccctatcacctccaaacggatcgcaaatatcattgagcacatgacatatgaggtttataagtacgctgcccgaggattgtatgaggaacacaagttcctgtttacactcttactgacactcaaaatagatattcagcgaaatcgtgtcaagcacgaagagtttctaactctgattaaaggcggggcttcattagatctcaaagcctgcccaccgaagcctagcaaatggatactggacatcacgtggttaaatctagtggaattgagcaagttgaggcaattttcagatgtactggatcagatttcaagaaacgagaagatgtggaaaatatggttcgataaagaaaaccctgaggaagaaccgctgccgaatgcctacgataagtctctggattgttttcggcggctgctgttgatacgatcctggtgtccagaccgcacaatcgctcaggctaggaaatacattgtggacagcatgggcgagaagtacgctgaaggagtaattctggatctcgagaaaacctgggaggaaagcgacccccggacccccctcatatgtcttttaagcatgggttccgaccccaccgactctattattgctctgggtaagaggcttaagatagagacgcggtatgtctcaatgggacagggtcaggaagttcatgccaggaagctgctgcagcagaccatggccaatggcggctgggcgctgcttcaaaactgccatctgggattggacttcatggacgagctgatggacataatcatcgaaactgaactggtacacgatgcctttcgtctctggatgactaccgaggcacataaacagttcccgattactcttcttcaaatgtccattaagttcgcaaacgacccgccccagggtctcagagctggactgaagcgcacttactccggagtatcccaggatctgctggacgtgagcagtggatcgcaatggaagcctatgttgtatgcggtcgcctttctccactcaaccgtgcaggagagacggaaattcggtgccttaggttggaatataccctatgagttcaaccaggctgacttcaacgccacggtccagttcattcagaaccacctggacgacatggacgttaaaaaaggtgtgagttggactactattagatacatgatcggcgaaattcagtatggaggtcgagtgaccgatgactacgataagaggcttctcaatactttcgccaaggtatggttcagcgaaaatatgttcggcccagattttagcttctaccagggttataacatcccaaaatgtagtactgttgataactacctgcagtatattcagagtttgcccgcatacgatagccctgaggttttcgggctccatccaaatgccgacataacataccagagtaagctagcaaaagatgtgttagacacaatcctggggattcagccgaaggatacttctgggggtggcgacgagacacgtgaggcggtcgtggcccgactggctgatgacatgctggagaagctaccgcccgattacgtgccctttgaagttaaagaacggttgcagaaaatggggcctttccaacccatgaacatctttttacgccaggaaatcgataggatgcagcgtgtcctctctctggtgagatcaaccctcacagagttaaagctcgctatagatggcactattatcatgtccgagaatcttcgcgacgccttggactgtatgttcgacgcccggatacccgcgtggtggaaaaaggcctcttggatctcttcaaccttggggttttggttcactgagctgatcgagagaaacagtcaatttacatcctgggtgttcaatgggagaccacactgcttttggatgacggggttttttaacccccaggggtttctcacagccatgagacaggagattacacgcgccaacaagggatgggccctcgacaatatggttctgtgcaatgaggtcacaaaatggatgaaggatgatatttccgctcctcctaccgagggagtttatgtttatggattgtacctggaaggagccgggtgggacaagaggaatatgaaattaatcgagtcgaagccaaaagtcctgttcgaactgatgcctgtgatcagaatttatgctgaaaacaacacccttagggatcctcgattctactcatgtccaatctataaaaaacccgtgaggacagacctgaattacatagctgcagttgatcttaggaccgcccaaacacctgaacactgggtattgcgtggagtggcccttctgtgcgatgttaagtag

SEQ ID NO: 117293 - DNA, 13875 bp, Artificial Sequence
  derived and/or modified sequence
atgttcaggattgggcgacgacagctgtggaagcattctgttacccgggtcttgacccaaagattaaagggtgagaaggaagccaagagagcactgctcgacgcacgccacaattatctcttcgccatcgtggcatcttgcttagacctcaataagaccgaggtggaagacgctatcctcgaggggaatcagatcgagagaatcgaccagctgttcgccgtgggcggtctgcgacacctgatgttctactaccaggacgtggaagaggctgagacagggcagctgggatccctaggcggagtgaacctggtgagtggaaagatcaagaaaccaaaggtattcgttactgagggcaatgatgtggccttgacaggggtgtgtgttttctttatccgaacagacccctccaaggccatcaccccagacaacattcatcaggaagtgagcttcaacatgcttgatgctgcggacggtggccttttgaactccgtacggaggctgctgagcgacatctttataccagctctcagagccaccagccatggctggggagaactggaagggctccaagacgcagctaacatccgccaggagtttctctcctctttggagggatttgtcaatgtgttatctggagctcaggaatcgctgaaggaaaaggtgaatctcagaaaatgtgacattttggagctcaagaccttgaaagagcccacggattatttgactctcgccaacaatccagagactttgggaaagatcgaggattgtatgaaagtttggataaaacagacagagcaggtcctcgccgagaataatcagctgctcaaagaggctgatgacgtcggtcccagagcggaattagagcactggaagaagcggttgagtaagttcaattatctgctggagcaactcaaatcacccgatgttaaagcggtattggctgtgttggccgctgccaagtctaagctgctgaaaacatggcgcgaaatggacatcagaatcactgatgctactaatgaagcgaaggacaacgtcaagtacttgtataccctcgagaaatgctgtgatcccctatattcctctgaccccttgagcatgatggatgccatccccacactcattaatgccataaagatgatctattcaatttcacactactataatacgagcgaaaagatcaccagcctcttcgtcaaggtaaccaatcaaatcatctccgcctgcaaagcttatataactaataatgggaccgcctctatttggaaccaaccgcaggatgtggtggaagagaagatcctctccgcaatcaagctcaagcaggaatatcagctgtgttttcacaaaacaaagcagaaactgaagcagaacccaaacgcgaagcagtttgacttttcagaaatgtacatatttggcaagttcgagacttttcaccggaggttggcaaagattatcgatattttcaccaccctcaaaacttatagtgtgctgcaggattcgaccattgagggactcgaagacatggccaccaaatatcaggggatcgtcgccaccattaagaagaaggagtacaactttttggaccagaggaagatggacttcgatcaggattacgaggagttctgtaagcaaacaaatgaccttcataatgaactaaggaagttcatggatgttacctttgctaaaatccagaatacaaaccaggctcttcgcatgctaaaaaaattcgagcgtctcaacatccccaatctggggattgacgataaatatcaactcatcctagagaattacggagccgacatcgacatgatcagcaagctctacacaaaacaaaagtatgacccaccactggcgcgaaatcagccgcctattgctggaaaaattctctgggcgcgacagctgttccataggatccagcagcccatgcagttgttccaacagcaccccgctgttttatcgacggctgaggccaaacctataatcagatcatataaccggatggccaaagtgctcttggaattcgaagttctgttccatcgggcatggctgcgacagatcgaggaaattcatgtggggctggaggcctctctcctagtgaaggcccctggtacaggagaattgttcgttaactttgatccacagatcctgattctctttcgcgaaacagaatgtatggcccagatgggtctagaggtgagtcccttggcgacttctctgttccagaaaagagataggtacaagagaaactttagtaacatgaagatgatgctggccgagtaccagcgcgtgaaaagtaaaattccggctgctatcgaacaactgatcgtgccgcatctcgccaaagtggatgaggcgcttcagcctgggttggccgcactgacatggaccagcttgaacatcgaggcctatctggagaatacatttgctaagattaaggacctcgaattactgctcgacagggtcaacgatcttatagagttcaggatcgacgccatactagaggagatgagttccactccactgtgccagctaccacaggaggagcccctaacatgcgaggagtttttgcagatgacaaaggacctttgcgttaacggagctcaaatcctccatttcaagtccagccttgttgaggaggcagtcaatgagttggtaaatatgctgctagacgtggaagtgctgtccgaagaagaaagcgaaaaaatcagtaacgagaacagtgtaaattataagaatgagtcgtctgccaaaagagaagagggcaatttcgacacactaacatcttccatcaatgcccgagcaaatgccctgctacttactactgtgacccgaaagaagaaggaaaccgaaatgcttggggaggaggccagggaattgctgagtcattttaaccaccaaaatatggatgctctcctgaaggtgacacgcaacacccttgaagcgattcgtaaacgaattcattcaagccacacgattaacttcagggattccaatagtgcgagcaatatgaaacagaacagcctgcctatttttcgcgcttctgtaacactggccatacccaacatcgtgatggcaccagcccttgaagacgtgcaacagacgcttaacaaagccgtggaatgtatcatcagcgtacctaagggtgtccgccagtggtcatctgagctgcttagtaaaaaaaaaattcaggagcgaaagatggccgcattacaatcgaatgaggactctgactccgatgtcgagatgggggaaaatgagctgcaagacaccttagagattgccagcgtaaacttacccattccagtgcaaacgaagaattactacaagaacgtgagcgaaaataaggagattgtgaagctagtgtctgtgctctccacaattatcaatagcacaaagaaagaagtcattacctctatggactgctttaaacgttataaccacatctggcagaagggtaaggaagaagcaataaaaacgttcataacgcaaagccctctgctgtccgaatttgaatctcagatcttatacttccagaacttggagcaggagataaacgctgaacccgagtatgtctgcgtaggctccatagccctttacaccgccgacttaaagtttgccttaaccgcagagacgaaggcatggatggtcgtgatcggcaggcactgcaacaagaagtatagatcagaaatggagaacatcttcatgttgatcgaggagtttaataagaagttgaaccggccaatcaaagacttagacgatatccggatcgccatggcggcactgaaagagattcgggaggaacagattagcatcgatttccaggtggggcctatcgaggaaagctacgccctgttgaataggtacggcctgttaattgccagggaggagatcgataaagtcgatacacttcactacgcttgggagaagttgttagctagagctggagaggttcagaataaacttgtaagtttgcagccgtccttcaagaaggagttaatcagcgccgtcgaagttttccttcaggactgccaccagttctatttggactatgatcttaacggtcccatggctagcggtctgaagccccaagaagcttccgacagactgatcatgttccagaatcagtttgataacatttatcggaagtacatcacctatacaggcggtgaagaactgttcggcctgcctgcaacccaatatcctcagctcctggagattaaaaagcagcttaatctcctccagaagatctacactctttataactctgtcattgagactgtgaattcctattatgacatcctgtggtcagaagtcaacattgagaaaattaataatgagttgctggaatttcagaacaggtgtcggaagcttccgagggcactcaaggattggcaagcttttctagatctaaaaaaaattattgatgatttctccgaatgttgtccgctcctggaatacatggcatcaaaggcaatgatggagaggcactgggagcggatcacaacgctgaccggacattctttggatgtcggaaacgagtcctttaagttaagaaacatcatggaggctccacttctgaagtacaaggaggaaattgaggacatttgcatatcagccgtcaaagagcgcgacatcgaacaaaaactaaagcaggtaattaatgaatgggataataaaacctttacgttcggatctttcaaaaccaggggggagctgcttctgcggggagactccacatccgagatcatagcaaatatggaggacagtctcatgctcctcggatcactcctctctaaccggtacaatatgcccttcaaggcgcagatacagaagtgggtgcagtacctgtccaactccactgacatcattgagtcttggatgactgtgcaaaacctgtggatatatctagaggcggtgtttgtagggggagatattgctaagcagctccccaaagaggcgaagcgcttctcaaatattgacaagtcttgggtaaagataatgactcgcgcacatgaagttccatccgttgtgcaatgttgcgttggagatgaaacccttggccaactgcttccccacctacttgatcagctggagatttgtcagaaatcactcactggttacctcgaaaagaagaggttatgcttccccaggttctttttcgtgagtgatcctgcgctgctagaaatcctgggtcaggcgtccgacagccatacgattcaagcccatctgctgaatgtgttcgacaatataaaatctgttaaatttcacgaaaagatttatgatcggatcctctcgatctcatctcaggagggagaaaccatcgaattggacaaaccggttatggcggagggcaatgtggaagtgtggttgaactcactcttagaagagagtcagagttccctgcacctggttatacggcaggcggcagcaaacatccaagagacaggattccaactgaccgagttcctctccagtttccccgctcaggtgggccttctgggcatccagatgatctggacgcgggatagtgaagaggcactgcgaaacgcaaagttcgataaaaagattatgcagaaaaccaaccaggccttcctggagctgttgaacactctgatcgatgtgaccacccgggacctctccagtacagagcgggtaaagtatgaaacactgatcactatacacgtgcatcagcgagatattttcgatgacctgtgccacatgcacatcaagtctcctatggactttgaatggctgaagcaatgtagattttacttcaacgaagattctgataaaatgatgattcatattaccgatgttgccttcatttaccagaatgaattcctaggctgcacagatagattggttatcaccccattgacagacagatgctacataactctcgcccaggcactgggaatgagcatgggcggtgctccggcagggccagccggaactggcaagactgagacaactaaggatatgggcaggtgccttggaaagtacgttgtggtttttaattgttcagatcagatggactttcgaggattagggaggatcttcaagggccttgcccagtccggctcttgggggtgttttgatgagtttaatagaatcgaccttccggtgttgtctgtggcagctcagcaaatctcgattatcctgacctgcaaaaaagaacacaaaaaatcattcatcttcaccgatggcgataatgtcaccatgaacccggagttcggactgttccttacaatgaatcccggatacgccggtcggcaagagcttcctgagaatctgaagattaactttcgctccgtggccatgatggtgcctgacaggcagatcataattagggtgaaattggcttcatgtggctttatcgacaacgtcgtccttgctcgcaagttcttcaccctctataagctgtgtgaggagcaactcagcaagcaggtccactacgattttggcctgcgcaatatcctatctgtgctacgtactttgggtgcagccaagcgcgcaaaccctatggacacggaatctactatcgtaatgcgcgttctccgcgatatgaacctctcaaaattaattgatgaggacgagccattgttcctgagcctaattgaagacctgttcccaaacatactcttggacaaggcagggtatcccgagttagaggctgctatctcgcgacaggtggaagaggctgggcttatcaatcatccgccttggaaactcaaggtcatccagctgtttgaaactcagagagtgcggcatggcatgatgacgctgggcccatcaggggctggcaaaaccacgtgtatccatacgctgatgcgggcaatgactgattgcggtaaaccccatagggaaatgaggatgaacccaaaagccattacagctccacagatgtttggtcgactcgatgtagccacaaatgattggaccgacggcatcttcagcacactttggcggaaaaccctccgtgcaaagaagggggagcatatctggatcatcctagatggcccagtagatgccatctggatcgaaaacctgaactccgtcctcgatgataataaaacactgacactggctaacggtgaccgcattccgatggccccaaattgcaaaataatatttgagccacacaacatagacaacgctagccccgcaactgtgagccgaaacggaatggtgtttatgtcatcctccatactggattggtctccaattctggagggctttcttaaaaaacggagccctcaagaggctgaaattctccgacagctttacactgaatcatttcccgatctatatcggttttgtatccaaaacctggagtataagatggaggtgctcgaagcttttgtgatcacccaatccatcaacatgttgcagggacttattcctctaaaggagcagggaggggaggtttctcaagctcatctgggtcgactcttcgtatttgcactcctatggtcggcaggcgcagcgctagaactggatgggcgacgccgactggagctttggctgagaagcagacccacgggaaccttggaacttcctcccccagccggacctggcgatacagcatttgactattacgtagcgcctgacgggacgtggacccactggaatactaggacccaggagtatttgtaccccagtgacaccacccctgaatatggatctatattagtccccaacgtggacaatgtgagaacagacttcctgatccagacgattgccaagcagggcaaagctgttctcttgatcggagagcaggggactgccaaaacagtgatcattaaagggtttatgtctaaatacgatcctgagtgccacatgatcaagtctctgaatttctcaagcgcaacaacccccctgatgttccagcggacaattgaatcctacgtggacaagagaatgggcacaacatatggccctccagcagggaaaaaaatgacagtgttcatcgatgatgtcaacatgcccataatcaacgaatggggggatcaggtaacaaacgagatcgtgaggcaacttatggagcagaatggattctacaatcttgagaagccaggcgagttcacctcgatagtcgacattcagttcttggccgcaatgatccatccaggaggcggacgcaacgatattccacagaggttaaagcgccagttttctatattcaattgcacactaccatctgaagcttccgtcgacaagatcttcggggtaatcggcgtgggacactactgcacccagagaggcttcagcgaagaagtcagggacagcgtgactaagctggtgccattaacccggaggctgtggcagatgacaaaaataaagatgctgcccaccccggctaaattccactacgtgtttaatctgagagacctcagtcgtgtgtggcagggaatgttgaatactacctccgaggtgataaaggaacctaatgacctgctgaaattatggaagcatgaatgcaagagggtcatcgccgaccgcttcactgtttcgagtgacgtgacctggttcgataaggcccttgtttctttggtcgaagaggaattcggggaggagaagaaactgctggtggactgtggcatagacacctactttgtcgacttcctccgtgacgcccctgaagccgcaggggagacttcagaggaggcggatgccgagactcctaagatctacgaaccaattgaaagtttctctcacctgaaggaaagactgaacatgttcctgcagctctacaacgagtctatacgaggggctggcatggacatggtgttctttgccgatgccatggtacacctggtcaagatcagcagggttattagaacacctcagggcaacgccctcctcgttggcgtcggcggtagtgggaaacaatctttgacccgcctcgccagctttatcgcaggatacgtgtctttccagatcacactgacacgcagctacaatacaagcaatcttatggaagacctcaaggttctctaccgaacagcaggtcaacaggggaagggaattacttttatcttcacagataacgagatcaaagacgagtcatttcttgaatatatgaacaatgtcctctccagcggagaggtgtccaacttgtttgctagagatgaaatagacgaaattaacagcgaccttgcctctgtgatgaagaaggagttccccagatgcctacctaccaatgaaaacttgcacgactactttatgagtagggtgcggcaaaatctccacattgtgctttgtttctctccagtgggcgaaaaatttcgcaatagggcattgaagtttcccgcactgatctccgggtgcacaatcgattggttctctcgatggcctaaagatgcgctggtagccgtatccgagcatttcctgacatcttatgacatcgactgtagcctggaaatcaaaaaggaggtcgtgcagtgcatggggtcatttcaggacggcgtggcagagaaatgtgtggactatttccagcgctttcggagatccactcacgtcacgccaaaatcatatctatcgtttatccaaggctataagttcatatatggtgagaaacatgtggaagtgaggacactggcgaatcgaatgaacacgggattggaaaaacttaaggaggcctctgaatccgtcgctgccctcagcaaggagttagaggccaaggagaaagagctgcaagtcgccaatgacaaagctgacatggtgctgaaggaggtgacgatgaaggcacaagccgcagagaaagtcaaagcagaggtccagaaagttaaagatcgagcccaggctatagtggattccatctctaaggacaaggctatagctgaggagaaactggaagcagccaagccagccttagaagaggccgaagcggcactgcagacaatcagacccagcgacatcgcaaccgtgaggacgctgggcaggcctccccatctcataatgcgcatcatggactgcgtcttgttgcttttccaacggaaggtttccgcagtcaagattgatttggagaagagttgtacgatgccatcgtggcaggagtccctgaagcttatgactgctggaaacttcttgcagaatctacagcagttcccgaaggataccatcaatgaggaggtcatcgagttcttgtcaccttacttcgagatgccggactacaatattgaaaccgctaagagggtgtgcggcaacgtggctggcttatgctcttggactaaagcgatggctagcttcttctcaatcaataaggaagttcttccactgaaggccaatttagttgtccaggaaaaccggcaccttttagctatgcaggacctgcaaaaggcacaggcagaattggatgataagcaagcggagctagatgtggtacaggccgaatacgagcaagcaatgacggaaaaacagacacttcttgaggatgccgagcgatgtaggcataagatgcagaccgcttccaccctaatctccggattggcgggagaaaaagagcgatggaccgaacagtctcaggagtttgccgcacagacaaaaagactcgttggggatgtactgctggccaccgcctttctgagttactccggcccattcaatcaggagtttagggatcttctgctaaacgactggaggaaggagatgaaagcgagaaagattccattcggtaagaatttgaacctgtccgagatgctcatcgacgctcccaccatcagcgaatggaatctacagggcctgcctaacgacgacttatcaatccaaaatggaattatcgtaaccaaggccagtcggtaccctctcctgattgatccacagactcaaggaaagatctggataaagaacaaagagagtcgaaacgagctgcagataacatccttaaaccataaatatttccggaatcacctcgaagactccttgagcctaggcagacccctgcttattgaggatgtcggtgaggagctggaccctgctctagacaatgtcctggaaaggaatttcatcaagacggggagcacctttaaagttaaagtgggtgataaggaggtcgatgttcttgacggatttcgtctatacatcacaaccaaactgccgaatccagcttacacgccagaaatctcagcccgaacctcgattatagacttcaccgtgacaatgaaagggctggaggaccagctgctgggtcgagttatcctgacggaaaaacaggagctcgagaaggagcgcactcatttgatggaagatgtgactgccaataagcgcagaatgaaagagctagaggataatctgctgtacaggctgacatctacccaagggtccctggtggaggatgagagcctgatagtggtgctctctaatactaagcgaactgcagaggaggtcactcagaagttggagataagcgccgagactgaagtgcagattaacagtgctcgagaggagtaccgccctgtcgctacccgtggcagtatcttgtattttttgataactgagatgcggctggtgaacgagatgtatcagacatcacttagacagtttctgggcttgttcgacctgtctctcgcccgttccgtaaagtccccaattactagtaagcgaatcgccaatattatcgaacacatgacttacgaggtctacaaatacgcagcaagaggcctgtacgaagagcataagttcctgttcaccttgctgctgacccttaaaatcgacatccagcgcaatcgtgtaaaacatgaagaattccttactcttatcaagggaggggcatctctggatcttaaagcatgtcccccaaaaccgtcgaagtggatcctggatattacatggcttaacttggtggaactgtcaaagctcaggcagttttcggacgttttggaccagatctcacggaatgaaaaaatgtggaaaatttggtttgacaaggagaacccggaggaggaaccgctccccaacgcatacgacaagtccctcgactgcttcaggagactgcttctcattcgcagttggtgccccgatcgaaccatcgcccaggccagaaagtacatcgtcgatagcatgggcgaaaagtacgccgaaggagtgattctggatctggagaaaacctgggaagagagcgatccaagaactccgcttatatgcctcctctccatgggaagtgatccgacggacagcatcattgcattgggtaagaggttaaaaatcgagactagatatgtgtccatgggccagggccaagaggtgcatgcacggaaactgcttcagcagaccatggctaacgggggatgggctttattgcagaattgccacctcggcctggatttcatggacgaactaatggatatcataattgagacggagctggtacatgacgccttcaggctgtggatgacaactgaagcacataagcagttccccatcactcttctccagatgagtataaagtttgccaatgatccaccccagggactccgggcagggctgaaacggacttactctggagtgtcccaggatctgctggacgtcagtagtgggtctcaatggaaacctatgttgtatgctgttgcttttctgcactctactgtgcaggagcggaggaagttcggggctctgggatggaatattccttatgagtttaaccaggccgacttcaatgccacagtgcaatttattcagaatcacctagatgatatggacgttaagaaaggagtgagttggactacaatccggtacatgattggagaaatccaatacggaggtcgcgtgaccgatgattacgacaagagacttctgaatacctttgctaaggtttggtttagcgaaaatatgttcggtcctgatttctctttttaccaggggtataatatcccaaaatgttctacagtggacaactatcttcagtacatccagagtctacctgcttatgattcccctgaggtgtttggcctccatccaaatgcagacattacgtaccagtccaagctggctaaagacgtgctggacaccatcctgggcatccagcccaaagacacttcgggagggggtgatgagacccgcgaggcggtggtggccaggttagccgacgacatgttagagaagctccctccagactacgtgcccttcgaagtgaaagagcgcttacaaaagatggggccatttcagccaatgaacattttcctgcgacaggagatagaccggatgcagcgcgtcctgtcgctggtccggagcaccctgacagagctgaaactcgccattgatggcacaattattatgagtgaaaatctgagagacgctctggattgtatgttcgatgccagaattccagcttggtggaagaaggcatcttggatcagttcaactctggggttctggttcactgaactcatcgaacgaaattcccagttcacatcatgggtgtttaatgggcgaccccactgtttctggatgaccggcttctttaacccgcaaggttttctcacagcaatgcgtcaagagatcacacgcgcaaataagggctgggcgttggacaatatggtgctctgcaatgaggtcactaaatggatgaaggacgatattagtgcacccccaacagagggtgtctatgtatacggtctgtacttagagggtgccggttgggataagaggaacatgaagctcatagaaagtaaacccaaagtgctgtttgagctaatgccagtgattaggatctacgcagaaaacaataccttgcgcgacccccgtttctacagttgccccatatacaagaagcccgtgcggaccgacctcaactacattgccgcagtagacctgagaacggcccaaacacctgagcattgggtgctgaggggagtggcgctattgtgtgacgtcaagtaa

SEQ ID NO: 117294 - DNA, 13875 bp, Artificial Sequence
  derived and/or modified sequence
atgttcagaatcggcagaagacagctgtggaagcacagcgtgaccagagtgctgacccagagactgaagggcgagaaggaggccaagagagccctgctggacgccagacacaactacctgttcgccatcgtggccagctgcctggacctgaacaagaccgaggtggaggacgccatcctggagggcaaccagatcgagagaatcgaccagctgttcgccgtgggcggcctgagacacctgatgttctactaccaggacgtggaggaggccgagaccggccagctgggcagcctgggcggcgtgaacctggtgagcggcaagatcaagaagcccaaggtgttcgtgaccgagggcaacgacgtggccctgaccggcgtgtgcgtgttcttcatcagaaccgaccccagcaaggccatcacccccgacaacatccaccaggaggtgagcttcaacatgctggacgccgccgacggcggcctgctgaacagcgtgagaagactgctgagcgacatcttcatccccgccctgagagccaccagccacggctggggcgagctggagggcctgcaggacgccgccaacatcagacaggagttcctgagcagcctggagggcttcgtgaacgtgctgagcggcgcccaggagagcctgaaggagaaggtgaacctgagaaagtgcgacatcctggagctgaagaccctgaaggagcccaccgactacctgaccctggccaacaaccccgagaccctgggcaagatcgaggactgcatgaaggtgtggatcaagcagaccgagcaggtgctggccgagaacaaccagctgctgaaggaggccgacgacgtgggccccagagccgagctggagcactggaagaagagactgagcaagttcaactacctgctggagcagctgaagagccccgacgtgaaggccgtgctggccgtgctggccgccgccaagagcaagctgctgaagacctggagagagatggacatcagaatcaccgacgccaccaacgaggccaaggacaacgtgaagtacctgtacaccctggagaagtgctgcgaccccctgtacagcagcgaccccctgagcatgatggacgccatccccaccctgatcaacgccatcaagatgatctacagcatcagccactactacaacaccagcgagaagatcaccagcctgttcgtgaaggtgaccaaccagatcatcagcgcctgcaaggcctacatcaccaacaacggcaccgccagcatctggaaccagccccaggacgtggtggaggagaagatcctgagcgccatcaagctgaagcaggagtaccagctgtgcttccacaagaccaagcagaagctgaagcagaaccccaacgccaagcagttcgacttcagcgagatgtacatcttcggcaagttcgagaccttccacagaagactggccaagatcatcgacatcttcaccaccctgaagacctacagcgtgctgcaggacagcaccatcgagggcctggaggacatggccaccaagtaccagggcatcgtggccaccatcaagaagaaggagtacaacttcctggaccagagaaagatggacttcgaccaggactacgaggagttctgcaagcagaccaacgacctgcacaacgagctgagaaagttcatggacgtgaccttcgccaagatccagaacaccaaccaggccctgagaatgctgaagaagttcgagagactgaacatccccaacctgggcatcgacgacaagtaccagctgatcctggagaactacggcgccgacatcgacatgatcagcaagctgtacaccaagcagaagtacgacccccccctggccagaaaccagccccccatcgccggcaagatcctgtgggccagacagctgttccacagaatccagcagcccatgcagctgttccagcagcaccccgccgtgctgagcaccgccgaggccaagcccatcatcagaagctacaacagaatggccaaggtgctgctggagttcgaggtgctgttccacagagcctggctgagacagatcgaggagatccacgtgggcctggaggccagcctgctggtgaaggcccccggcaccggcgagctgttcgtgaacttcgacccccagatcctgatcctgttcagagagaccgagtgcatggcccagatgggcctggaggtgagccccctggccaccagcctgttccagaagagagacagatacaagagaaacttcagcaacatgaagatgatgctggccgagtaccagagagtgaagagcaagatccccgccgccatcgagcagctgatcgtgccccacctggccaaggtggacgaggccctgcagcccggcctggccgccctgacctggaccagcctgaacatcgaggcctacctggagaacaccttcgccaagatcaaggacctggagctgctgctggacagagtgaacgacctgatcgagttcagaatcgacgccatcctggaggagatgagcagcacccccctgtgccagctgccccaggaggagcccctgacctgcgaggagttcctgcagatgaccaaggacctgtgcgtgaacggcgcccagatcctgcacttcaagagcagcctggtggaggaggccgtgaacgagctggtgaacatgctgctggacgtggaggtgctgagcgaggaggagagcgagaagatcagcaacgagaacagcgtgaactacaagaacgagagcagcgccaagagagaggagggcaacttcgacaccctgaccagcagcatcaacgccagagccaacgccctgctgctgaccaccgtgaccagaaagaagaaggagaccgagatgctgggcgaggaggccagagagctgctgagccacttcaaccaccagaacatggacgccctgctgaaggtgaccagaaacaccctggaggccatcagaaagagaatccacagcagccacaccatcaacttcagagacagcaacagcgccagcaacatgaagcagaacagcctgcccatcttcagagccagcgtgaccctggccatccccaacatcgtgatggcccccgccctggaggacgtgcagcagaccctgaacaaggccgtggagtgcatcatcagcgtgcccaagggcgtgagacagtggagcagcgagctgctgagcaagaagaagatccaggagagaaagatggccgccctgcagagcaacgaggacagcgacagcgacgtggagatgggcgagaacgagctgcaggacaccctggagatcgccagcgtgaacctgcccatccccgtgcagaccaagaactactacaagaacgtgagcgagaacaaggagatcgtgaagctggtgagcgtgctgagcaccatcatcaacagcaccaagaaggaggtgatcaccagcatggactgcttcaagagatacaaccacatctggcagaagggcaaggaggaggccatcaagaccttcatcacccagagccccctgctgagcgagttcgagagccagatcctgtacttccagaacctggagcaggagatcaacgccgagcccgagtacgtgtgcgtgggcagcatcgccctgtacaccgccgacctgaagttcgccctgaccgccgagaccaaggcctggatggtggtgatcggcagacactgcaacaagaagtacagaagcgagatggagaacatcttcatgctgatcgaggagttcaacaagaagctgaacagacccatcaaggacctggacgacatcagaatcgccatggccgccctgaaggagatcagagaggagcagatcagcatcgacttccaggtgggccccatcgaggagagctacgccctgctgaacagatacggcctgctgatcgccagagaggagatcgacaaggtggacaccctgcactacgcctgggagaagctgctggccagagccggcgaggtgcagaacaagctggtgagcctgcagcccagcttcaagaaggagctgatcagcgccgtggaggtgttcctgcaggactgccaccagttctacctggactacgacctgaacggccccatggccagcggcctgaagccccaggaggccagcgacagactgatcatgttccagaaccagttcgacaacatctacagaaagtacatcacctacaccggcggcgaggagctgttcggcctgcccgccacccagtacccccagctgctggagatcaagaagcagctgaacctgctgcagaagatctacaccctgtacaacagcgtgatcgagaccgtgaacagctactacgacatcctgtggagcgaggtgaacatcgagaagatcaacaacgagctgctggagttccagaacagatgcagaaagctgcccagagccctgaaggactggcaggccttcctggacctgaagaagatcatcgacgacttcagcgagtgctgccccctgctggagtacatggccagcaaggccatgatggagagacactgggagagaatcaccaccctgaccggccacagcctggacgtgggcaacgagagcttcaagctgagaaacatcatggaggcccccctgctgaagtacaaggaggagatcgaggacatctgcatcagcgccgtgaaggagagagacatcgagcagaagctgaagcaggtgatcaacgagtgggacaacaagaccttcaccttcggcagcttcaagaccagaggcgagctgctgctgagaggcgacagcaccagcgagatcatcgccaacatggaggacagcctgatgctgctgggcagcctgctgagcaacagatacaacatgcccttcaaggcccagatccagaagtgggtgcagtacctgagcaacagcaccgacatcatcgagagctggatgaccgtgcagaacctgtggatctacctggaggccgtgttcgtgggcggcgacatcgccaagcagctgcccaaggaggccaagagattcagcaacatcgacaagagctgggtgaagatcatgaccagagcccacgaggtgcccagcgtggtgcagtgctgcgtgggcgacgagaccctgggccagctgctgccccacctgctggaccagctggagatctgccagaagagcctgaccggctacctggagaagaagagactgtgcttccccagattcttcttcgtgagcgaccccgccctgctggagatcctgggccaggccagcgacagccacaccatccaggcccacctgctgaacgtgttcgacaacatcaagagcgtgaagttccacgagaagatctacgacagaatcctgagcatcagcagccaggagggcgagaccatcgagctggacaagcccgtgatggccgagggcaacgtggaggtgtggctgaacagcctgctggaggagagccagagcagcctgcacctggtgatcagacaggccgccgccaacatccaggagaccggcttccagctgaccgagttcctgagcagcttccccgcccaggtgggcctgctgggcatccagatgatctggaccagagacagcgaggaggccctgagaaacgccaagttcgacaagaagatcatgcagaagaccaaccaggccttcctggagctgctgaacaccctgatcgacgtgaccaccagagacctgagcagcaccgagagagtgaagtacgagaccctgatcaccatccacgtgcaccagagagacatcttcgacgacctgtgccacatgcacatcaagagccccatggacttcgagtggctgaagcagtgcagattctacttcaacgaggacagcgacaagatgatgatccacatcaccgacgtggccttcatctaccagaacgagttcctgggctgcaccgacagactggtgatcacccccctgaccgacagatgctacatcaccctggcccaggccctgggcatgagcatgggcggcgcccccgccggccccgccggcaccggcaagaccgagaccaccaaggacatgggcagatgcctgggcaagtacgtggtggtgttcaactgcagcgaccagatggacttcagaggcctgggcagaatcttcaagggcctggcccagagcggcagctggggctgcttcgacgagttcaacagaatcgacctgcccgtgctgagcgtggccgcccagcagatcagcatcatcctgacctgcaagaaggagcacaagaagagcttcatcttcaccgacggcgacaacgtgaccatgaaccccgagttcggcctgttcctgaccatgaaccccggctacgccggcagacaggagctgcccgagaacctgaagatcaacttcagaagcgtggccatgatggtgcccgacagacagatcatcatcagagtgaagctggccagctgcggcttcatcgacaacgtggtgctggccagaaagttcttcaccctgtacaagctgtgcgaggagcagctgagcaagcaggtgcactacgacttcggcctgagaaacatcctgagcgtgctgagaaccctgggcgccgccaagagagccaaccccatggacaccgagagcaccatcgtgatgagagtgctgagagacatgaacctgagcaagctgatcgacgaggacgagcccctgttcctgagcctgatcgaggacctgttccccaacatcctgctggacaaggccggctaccccgagctggaggccgccatcagcagacaggtggaggaggccggcctgatcaaccaccccccctggaagctgaaggtgatccagctgttcgagacccagagagtgagacacggcatgatgaccctgggccccagcggcgccggcaagaccacctgcatccacaccctgatgagagccatgaccgactgcggcaagccccacagagagatgagaatgaaccccaaggccatcaccgccccccagatgttcggcagactggacgtggccaccaacgactggaccgacggcatcttcagcaccctgtggagaaagaccctgagagccaagaagggcgagcacatctggatcatcctggacggccccgtggacgccatctggatcgagaacctgaacagcgtgctggacgacaacaagaccctgaccctggccaacggcgacagaatccccatggcccccaactgcaagatcatcttcgagccccacaacatcgacaacgccagccccgccaccgtgagcagaaacggcatggtgttcatgagcagcagcatcctggactggagccccatcctggagggcttcctgaagaagagaagcccccaggaggccgagatcctgagacagctgtacaccgagagcttccccgacctgtacagattctgcatccagaacctggagtacaagatggaggtgctggaggccttcgtgatcacccagagcatcaacatgctgcagggcctgatccccctgaaggagcagggcggcgaggtgagccaggcccacctgggcagactgttcgtgttcgccctgctgtggagcgccggcgccgccctggagctggacggcagaagaagactggagctgtggctgagaagcagacccaccggcaccctggagctgcccccccccgccggccccggcgacaccgccttcgactactacgtggcccccgacggcacctggacccactggaacaccagaacccaggagtacctgtaccccagcgacaccacccccgagtacggcagcatcctggtgcccaacgtggacaacgtgagaaccgacttcctgatccagaccatcgccaagcagggcaaggccgtgctgctgatcggcgagcagggcaccgccaagaccgtgatcatcaagggcttcatgagcaagtacgaccccgagtgccacatgatcaagagcctgaacttcagcagcgccaccacccccctgatgttccagagaaccatcgagagctacgtggacaagagaatgggcaccacctacggcccccccgccggcaagaagatgaccgtgttcatcgacgacgtgaacatgcccatcatcaacgagtggggcgaccaggtgaccaacgagatcgtgagacagctgatggagcagaacggcttctacaacctggagaagcccggcgagttcaccagcatcgtggacatccagttcctggccgccatgatccaccccggcggcggcagaaacgacatcccccagagactgaagagacagttcagcatcttcaactgcaccctgcccagcgaggccagcgtggacaagatcttcggcgtgatcggcgtgggccactactgcacccagagaggcttcagcgaggaggtgagagacagcgtgaccaagctggtgcccctgaccagaagactgtggcagatgaccaagatcaagatgctgcccacccccgccaagttccactacgtgttcaacctgagagacctgagcagagtgtggcagggcatgctgaacaccaccagcgaggtgatcaaggagcccaacgacctgctgaagctgtggaagcacgagtgcaagagagtgatcgccgacagattcaccgtgagcagcgacgtgacctggttcgacaaggccctggtgagcctggtggaggaggagttcggcgaggagaagaagctgctggtggactgcggcatcgacacctacttcgtggacttcctgagagacgcccccgaggccgccggcgagaccagcgaggaggccgacgccgagacccccaagatctacgagcccatcgagagcttcagccacctgaaggagagactgaacatgttcctgcagctgtacaacgagagcatcagaggcgccggcatggacatggtgttcttcgccgacgccatggtgcacctggtgaagatcagcagagtgatcagaaccccccagggcaacgccctgctggtgggcgtgggcggcagcggcaagcagagcctgaccagactggccagcttcatcgccggctacgtgagcttccagatcaccctgaccagaagctacaacaccagcaacctgatggaggacctgaaggtgctgtacagaaccgccggccagcagggcaagggcatcaccttcatcttcaccgacaacgagatcaaggacgagagcttcctggagtacatgaacaacgtgctgagcagcggcgaggtgagcaacctgttcgccagagacgagatcgacgagatcaacagcgacctggccagcgtgatgaagaaggagttccccagatgcctgcccaccaacgagaacctgcacgactacttcatgagcagagtgagacagaacctgcacatcgtgctgtgcttcagccccgtgggcgagaagttcagaaacagagccctgaagttccccgccctgatcagcggctgcaccatcgactggttcagcagatggcccaaggacgccctggtggccgtgagcgagcacttcctgaccagctacgacatcgactgcagcctggagatcaagaaggaggtggtgcagtgcatgggcagcttccaggacggcgtggccgagaagtgcgtggactacttccagagattcagaagaagcacccacgtgacccccaagagctacctgagcttcatccagggctacaagttcatctacggcgagaagcacgtggaggtgagaaccctggccaacagaatgaacaccggcctggagaagctgaaggaggccagcgagagcgtggccgccctgagcaaggagctggaggccaaggagaaggagctgcaggtggccaacgacaaggccgacatggtgctgaaggaggtgaccatgaaggcccaggccgccgagaaggtgaaggccgaggtgcagaaggtgaaggacagagcccaggccatcgtggacagcatcagcaaggacaaggccatcgccgaggagaagctggaggccgccaagcccgccctggaggaggccgaggccgccctgcagaccatcagacccagcgacatcgccaccgtgagaaccctgggcagacccccccacctgatcatgagaatcatggactgcgtgctgctgctgttccagagaaaggtgagcgccgtgaagatcgacctggagaagagctgcaccatgcccagctggcaggagagcctgaagctgatgaccgccggcaacttcctgcagaacctgcagcagttccccaaggacaccatcaacgaggaggtgatcgagttcctgagcccctacttcgagatgcccgactacaacatcgagaccgccaagagagtgtgcggcaacgtggccggcctgtgcagctggaccaaggccatggccagcttcttcagcatcaacaaggaggtgctgcccctgaaggccaacctggtggtgcaggagaacagacacctgctggccatgcaggacctgcagaaggcccaggccgagctggacgacaagcaggccgagctggacgtggtgcaggccgagtacgagcaggccatgaccgagaagcagaccctgctggaggacgccgagagatgcagacacaagatgcagaccgccagcaccctgatcagcggcctggccggcgagaaggagagatggaccgagcagagccaggagttcgccgcccagaccaagagactggtgggcgacgtgctgctggccaccgccttcctgagctacagcggccccttcaaccaggagttcagagacctgctgctgaacgactggagaaaggagatgaaggccagaaagatccccttcggcaagaacctgaacctgagcgagatgctgatcgacgcccccaccatcagcgagtggaacctgcagggcctgcccaacgacgacctgagcatccagaacggcatcatcgtgaccaaggccagcagataccccctgctgatcgacccccagacccagggcaagatctggatcaagaacaaggagagcagaaacgagctgcagatcaccagcctgaaccacaagtacttcagaaaccacctggaggacagcctgagcctgggcagacccctgctgatcgaggacgtgggcgaggagctggaccccgccctggacaacgtgctggagagaaacttcatcaagaccggcagcaccttcaaggtgaaggtgggcgacaaggaggtggacgtgctggacggcttcagactgtacatcaccaccaagctgcccaaccccgcctacacccccgagatcagcgccagaaccagcatcatcgacttcaccgtgaccatgaagggcctggaggaccagctgctgggcagagtgatcctgaccgagaagcaggagctggagaaggagagaacccacctgatggaggacgtgaccgccaacaagagaagaatgaaggagctggaggacaacctgctgtacagactgaccagcacccagggcagcctggtggaggacgagagcctgatcgtggtgctgagcaacaccaagagaaccgccgaggaggtgacccagaagctggagatcagcgccgagaccgaggtgcagatcaacagcgccagagaggagtacagacccgtggccaccagaggcagcatcctgtacttcctgatcaccgagatgagactggtgaacgagatgtaccagaccagcctgagacagttcctgggcctgttcgacctgagcctggccagaagcgtgaagagccccatcaccagcaagagaatcgccaacatcatcgagcacatgacctacgaggtgtacaagtacgccgccagaggcctgtacgaggagcacaagttcctgttcaccctgctgctgaccctgaagatcgacatccagagaaacagagtgaagcacgaggagttcctgaccctgatcaagggcggcgccagcctggacctgaaggcctgcccccccaagcccagcaagtggatcctggacatcacctggctgaacctggtggagctgagcaagctgagacagttcagcgacgtgctggaccagatcagcagaaacgagaagatgtggaagatctggttcgacaaggagaaccccgaggaggagcccctgcccaacgcctacgacaagagcctggactgcttcagaagactgctgctgatcagaagctggtgccccgacagaaccatcgcccaggccagaaagtacatcgtggacagcatgggcgagaagtacgccgagggcgtgatcctggacctggagaagacctgggaggagagcgaccccagaacccccctgatctgcctgctgagcatgggcagcgaccccaccgacagcatcatcgccctgggcaagagactgaagatcgagaccagatacgtgagcatgggccagggccaggaggtgcacgccagaaagctgctgcagcagaccatggccaacggcggctgggccctgctgcagaactgccacctgggcctggacttcatggacgagctgatggacatcatcatcgagaccgagctggtgcacgacgccttcagactgtggatgaccaccgaggcccacaagcagttccccatcaccctgctgcagatgagcatcaagttcgccaacgaccccccccagggcctgagagccggcctgaagagaacctacagcggcgtgagccaggacctgctggacgtgagcagcggcagccagtggaagcccatgctgtacgccgtggccttcctgcacagcaccgtgcaggagagaagaaagttcggcgccctgggctggaacatcccctacgagttcaaccaggccgacttcaacgccaccgtgcagttcatccagaaccacctggacgacatggacgtgaagaagggcgtgagctggaccaccatcagatacatgatcggcgagatccagtacggcggcagagtgaccgacgactacgacaagagactgctgaacaccttcgccaaggtgtggttcagcgagaacatgttcggccccgacttcagcttctaccagggctacaacatccccaagtgcagcaccgtggacaactacctgcagtacatccagagcctgcccgcctacgacagccccgaggtgttcggcctgcaccccaacgccgacatcacctaccagagcaagctggccaaggacgtgctggacaccatcctgggcatccagcccaaggacaccagcggcggcggcgacgagaccagagaggccgtggtggccagactggccgacgacatgctggagaagctgccccccgactacgtgcccttcgaggtgaaggagagactgcagaagatgggccccttccagcccatgaacatcttcctgagacaggagatcgacagaatgcagagagtgctgagcctggtgagaagcaccctgaccgagctgaagctggccatcgacggcaccatcatcatgagcgagaacctgagagacgccctggactgcatgttcgacgccagaatccccgcctggtggaagaaggccagctggatcagcagcaccctgggcttctggttcaccgagctgatcgagagaaacagccagttcaccagctgggtgttcaacggcagaccccactgcttctggatgaccggcttcttcaacccccagggcttcctgaccgccatgagacaggagatcaccagagccaacaagggctgggccctggacaacatggtgctgtgcaacgaggtgaccaagtggatgaaggacgacatcagcgccccccccaccgagggcgtgtacgtgtacggcctgtacctggagggcgccggctgggacaagagaaacatgaagctgatcgagagcaagcccaaggtgctgttcgagctgatgcccgtgatcagaatctacgccgagaacaacaccctgagagaccccagattctacagctgccccatctacaagaagcccgtgagaaccgacctgaactacatcgccgccgtggacctgagaaccgcccagacccccgagcactgggtgctgagaggcgtggccctgctgtgcgacgtgaagtag

SEQ ID NO: 117295 - DNA, 15633 bp, Artificial Sequence
  derived and/or modified sequence
agtaaaactttccatttggaagcctgttggatgttgagcaggtctgccaggagttagaagaccattccggaagagctgactccagcctgtccatgcacggctacaatgtttaggattgggaggagacagctctggaagcatagcgtcactcgagttttaacgcaaagactgaagggagagaaggaagccaagcgggctcttttggatgcgaggcataactacttatttgcaattgtggcttcctgtttggacctgaacaaaaccgaagtggaggatgccattcttgaagggaatcagattgaaagaattgatcaactttttgctgttggaggtctccgacacctcatgttttactatcaagatgtggaggaagcagaaacaggacaacttggctctctaggaggggtaaatcttgtttctggaaagattaaaaaacctaaggtgttcgtgaccgagggaaacgatgtggctcttactggggtatgtgtgttcttcatcaggactgacccttccaaagccatcacccctgacaacatccaccaggaggtgagttttaacatgttagatgcggcagatggaggcctgctcaacagtgtgagacgtttgctgtcggacatcttcattcctgctctcagagccacgagccatggctggggcgagctcgagggccttcaggacgcagctaacattcgccaggagttcttgagctccctggaaggctttgtgaacgtcctgtcgggtgcacaggagagtctgaaggagaaggtgaaccttcgaaagtgtgacatacttgaactgaaaaccctaaaggaacctacggactacttgactctagcaaataaccctgagactttgggaaaaatagaggattgcatgaaagtatggatcaaacagacagaacaggttcttgctgaaaacaatcagctgctgaaggaagcggatgacgttgggccacgagcggagctggagcactggaaaaaaagactctccaagtttaactaccttttggaacaattgaaaagcccggatgtgaaggctgtgctggcagtgcttgcggcggccaagtcgaaactgctgaagacttggcgggagatggatattcgaatcactgatgcaactaatgaagcaaaggacaatgtgaaatacttgtatacacttgaaaaatgttgtgaccctttgtacagcagtgatcccctatccatgatggatgctattcctacacttataaatgcaattaaaatgatctatagtatctctcattactataatacctctgagaagatcacatctctgtttgtaaaggtgacaaatcagattatatctgcatgtaaagcctatattaccaataatggaaccgcttccatctggaaccagccacaggatgttgttgaagaaaaaatactatctgcgattaaactgaaacaggaataccagctctgctttcacaagacaaaacaaaagcttaaacaaaatccaaatgcaaaacaatttgattttagcgagatgtatatttttggaaaattcgaaacttttcaccgacgccttgccaagataatagacatctttacaaccctcaagacgtattcagtcctgcaagattccacaattgaagggctggaagacatggccactaaataccagggcattgtggcaaccataaagaaaaaggaatacaatttcctagaccagcggaaaatggattttgaccaagattacgaagagttttgcaagcagactaatgaccttcataacgagttgcggaagttcatggatgttacatttgcaaagattcaaaacacaaatcaagctctaagaatgttgaagaaatttgaaagattgaatatacctaatcttggtattgatgacaaatatcaacttatccttgagaactatggggctgacattgatatgatttcaaagctgtatacaaagcagaaatacgatcctcctctggctcgaaaccagcctcccatcgctggaaagattttgtgggcccgccagctcttccataggattcagcagcccatgcagcttttccagcagcacccagctgtgctaagcacggcagaagccaaacctataattcgcagttacaacaggatggccaaggtcctcctggagtttgaggtcctcttccacagggcgtggcttcggcaaattgaagaaattcatgtaggtcttgaggcttcattattggtgaaggctccaggcacaggggaattgtttgtaaactttgaccctcagatattaatcttatttagagaaacagagtgcatggcccagatgggtctggaagtctctccactggcaacttccctcttccagaaacgagatagatacaaaaggaacttcagtaacatgaagatgatgctagctgaatatcagagagtgaagtcaaaaatacctgctgccattgagcaattgattgtccctcacttggccaaagtggatgaagctctccaacctggcttggctgcactgacctggacatcactgaatattgaggcttatttagaaaacacttttgcaaagatcaaggacctggagttgctgcttgacagggtcaatgatttgattgagttccgcattgatgccattctagaagaaatgagcagcacgcctctttgtcagcttccccaggaggagccactaacctgtgaagagtttctccaaatgacaaaggatctttgtgtaaatggtgcacaaatactacattttaaaagctcattagtggaggaggcagtcaatgagcttgtaaatatgttgctggatgtggaagttttatctgaagaagaaagtgaaaaaatatccaatgagaatagtgttaattacaaaaatgaaagttcagcaaaaagagaagaaggaaattttgacaccttgacatcatctattaatgccagggccaatgccctgcttttgacgacagtcacgaggaaaaagaaagaaactgagatgttaggggaagaagcccgcgagttactctctcatttcaaccatcagaacatggatgctcttctgaaagttacaaggaatacactagaggccattcgcaaacgtattcattcctctcacacaattaacttccgggacagtaacagtgcctctaacatgaagcagaacagtttgcccattttccgggcaagcgtcactctggccattcccaacatcgtcatggcccctgccctggaagatgtacagcagaccctgaacaaagccgtggagtgcatcatcagtgtccctaagggggtcagacagtggagcagtgaactgttgtccaagaaaaagatacaagaaagaaaaatggctgctttgcagagtaatgaagacagtgattctgatgttgaaatgggagaaaatgaacttcaagataccttggagatagcatctgtaaatttacccattcccgtgcaaaccaagaactattataagaatgtttctgaaaacaaagagattgtaaaattagtttctgtgcttagcacaattatcaactccaccaaaaaggaagttattacatccatggattgcttcaaacgctacaatcacatttggcaaaagggaaaagaagaagccattaagacatttattacacagagccccttgctttctgaatttgagtcccagattctctatttccaaaacctagagcaggaaattaatgctgagcctgaatatgtctgtgtgggttccattgctctgtacacagctgacttgaagttcgccctgactgctgagacaaaggcctggatggttgtcattggacgccactgtaacaaaaaataccggagtgagatggaaaacatttttatgcttattgaagaattcaataagaaactaaatcgtccaattaaggacctagatgatattcggattgcaatggcagcgctgaaagaaataagggaggagcaaatctccattgactttcaagtaggacctattgaggaatcttatgccctgcttaacagatatggacttctgatagcaagggaagagatagacaaagttgatacactgcactatgcttgggagaagctgctggcacgtgctggcgaagtccagaataaattagtctcactgcagcccagtttcaagaaagagcttattagtgctgtggaggtattcctccaagattgtcaccagttttatctggactatgatttgaatggtccaatggctagcggcttgaagccccaggaagccagtgacaggcttatcatgtttcagaatcaatttgataatatctatcggaaatacatcacatatactggaggagaggagctttttggcctgccagctacacagtatcctcagcttcttgaaataaagaagcaactaaatcttctacagaaaatatatactctgtacaacagtgtcatagaaactgtaaatagctattatgatattctttggtcagaggtgaatattgaaaaaattaacaatgaactcttagaattccagaacagatgtcgaaagcttccccgggccttgaaggactggcaggcttttttggacctgaagaagatcattgatgatttcagcgagtgttgcccgctgctggaatacatggccagtaaagccatgatggagcggcactgggaaaggataaccaccctcaccgggcacagtctggatgtggggaatgaaagctttaagttaagaaatatcatggaggcacctcttctgaaatataaagaggaaatagaggacatctgtatcagtgcggtgaaagagagagacattgagcaaaagctgaagcaagtgattaatgaatgggacaataaaacattcaccttcggcagctttaaaacccgtggagagctcctcttgagaggagacagtacctcggaaatcatcgccaacatggaggacagcttgatgttgctgggatccctactgagcaacaggtacaatatgccattcaaagcccagattcaaaaatgggtgcagtacctttccaactcaacagacatcatcgagagctggatgacggtgcaaaacctgtggatttatttagaagctgtctttgtgggaggagacattgccaagcagctgcccaaggaagccaagcggttttctaacatagataaatcttgggtgaagatcatgactcgggcacatgaagtgcccagtgtagtccagtgctgtgttggagatgagaccctggggcagctgttaccacacttgctggaccagttggaaatatgccagaaatcccttactgggtacttggagaaaaaacgactgtgctttcctcggtttttcttcgtctcagatcctgcccttctagagattctggggcaggcgtcggactcccacactatacaggcccatttgctgaatgtgtttgacaacattaaatctgtcaagttccacgaaaagatctatgatcgaattctgtcaatttcctctcaagagggtgagacgattgaattggataaacctgtcatggcagagggcaatgtggaagtttggcttaattctcttttggaagaatctcagtcctcattgcatcttgtgattcgccaggcagccgcaaatattcaagaaacaggtttccaactaactgaatttctttcatccttccctgctcaggttggattattaggaattcagatgatatggacacgggattcagaagaagcccttagaaatgccaagtttgataaaaaaatcatgcagaaaactaatcaggctttcctggagctactcaatacattgatagacgtcaccacgagggatctgagttccacggaacgagtgaaatacgagactctgattactattcatgtgcaccaaagggatatctttgatgacctgtgtcatatgcatatcaagagtcccatggactttgagtggctgaaacagtgcagattttactttaacgaagattctgacaagatgatgattcacatcacagatgtggcgttcatataccagaatgaatttttaggctgcactgacaggcttgtaataactccacttacagacagatgttacatcacgctggctcaagctctgggaatgagcatggggggagcccctgctggacctgcaggcacaggcaaaacagaaaccactaaagacatgggacgatgcctcgggaaatacgtcgtggttttcaattgttcagaccagatggatttccgaggacttggacggatttttaagggactggcacagtctggatcctggggttgttttgatgaatttaaccgtattgatctaccagttctctcggttgcagcccagcaaatttccattattctgacatgtaaaaaggagcacaaaaagtcttttatctttactgatggagataatgtgactatgaaccctgaatttgggcttttcttaaccatgaatcctggctatgccggacggcaggaactccctgaaaacttgaagattaatttccgctcagtggccatgatggtgcctgaccgtcagattatcataagggtgaagttggctagttgtggcttcattgacaacgttgttttggccaggaagtttttcacgctctacaaactgtgtgaggagcagctttctaagcaggttcattatgactttggcctgcgtaacattctgtcagttcttcggaccttgggagcagcaaaaagagccaatccaatggatacggagtccacgattgtcatgcgtgtactacgggacatgaatctttctaaactgattgatgaggatgaacccttgtttttgagtttgattgaagatctctttccaaatattcttctggacaaggcaggttaccctgaactggaagcagcaattagtagacaggttgaagaagctggtttaatcaaccatcctccttggaaactgaaggtcatccagctattcgaaacgcagagagtgcgacatgggatgatgactctggggcccagtggggctgggaagaccacctgcatccacaccttgatgagagccatgacagattgtggaaaaccacatcgggaaatgaggatgaatcccaaagcgattactgccccacagatgtttggtcggctggacgttgccacaaatgactggactgatgggatattttctacgctttggaggaaaacattaagagcaaagaaaggggaacatatctggataattcttgatggtccagtagatgccatctggattgaaaatctgaattctgttttggatgataacaaaactctaacccttgccaatggtgatcggattcccatggctccaaactgcaagatcattttcgagcctcataacattgacaatgcttctcctgccaccgtctcaagaaatggaatggttttcatgagctcttctatccttgattggagtcctattcttgagggttttcttaagaaacgctcacctcaagaagcagaaattcttcgtcagctgtacaccgagtctttcccagacttgtatcgcttctgtatccagaacttagaatacaagatggaggtgctggaggcctttgtcatcacacagagcattaacatgcttcaaggcctgattcctctgaaggagcaaggcggggaggtgagccaggctcacctggggcggctgttcgtgttcgcgctgctgtggagcgcgggggcggcgctggagctggacggacggcgccgcctggagctctggctgcgctctcggcccacagggacgctggagctgccgccgccagcggggcccggggacaccgccttcgactactatgtggcgcccgatggtacatggacgcactggaacacgcgtacccaggaatacctgtatccgtctgataccaccccagagtatggttctattctggtgccaaatgttgacaatgtgaggactgactttctaattcaaaccattgctaaacagggcaaggctgtgctattaattggtgaacaaggaacagccaaaacagtaataattaaaggatttatgtcaaaatatgatcctgaatgtcacatgatcaagagtctgaatttttcttctgcaaccaccccactgatgttccagaggacgatagagagctatgtggataaacgaatgggtacaacatatggccctcctgcgggaaagaagatgactgtttttattgatgatgtgaatatgccaataatcaatgagtggggagatcaggttacgaatgagatagtgcgacagctgatggaacaaaatggattctataatctagagaagcctggggagttcaccagcatcgtggacatccagtttttggcagccatgatccatcctggtggtggacgcaatgacataccccaaagactcaagaggcagttctctatatttaattgcacgttgccctctgaagcttctgtggacaagatctttggtgtgattggggtaggccactactgtactcagaggggtttctcagaagaagtgagagattctgtgacaaaattggtgcctctgacacgccgactatggcagatgaccaagattaaaatgcttcctacccctgcaaaattccattatgtgtttaacctacgagatctttctcgggtctggcagggaatgctgaacactacttcagaggtcatcaaggaaccaaatgatctgttaaagctgtggaagcatgagtgtaaacgtgttatagctgaccgtttcacagtgtccagtgatgtgacctggtttgataaggctttagtaagtttggtagaggaggagtttggtgaagagaaaaaactcttggtggattgtggaattgacacatattttgtggatttcttgagagatgcacctgaagctgcaggtgaaacatctgaagaggctgatgctgaaacacctaaaatttatgagccaattgaatcttttagtcacctaaaagagcgtctgaatatgttcctgcagctctataatgagagcatccgtggcgccggcatggacatggtgttctttgcagatgccatggttcacttagtcaagatctctcgtgtcattcgtactcctcagggaaatgccctcctggtcggggtgggcggatcaggaaagcagagcctgacgaggttggcttcattcattgctggctacgtttccttccagatcactctgacgagatcctacaacacatcaaatctgatggaagatctgaaggttttgtatcgaacagctggtcagcaaggcaaaggaatcacttttattttcacagacaatgagattaaagatgagtcatttttggaatatatgaacaatgttttatcatcaggtgaggtctctaacctatttgctcgagatgaaattgatgaaattaatagcgacctggcatcagtcatgaaaaaagaattccccaggtgccttcctaccaatgagaacctgcacgactacttcatgagtcgggtccgacagaaccttcatattgtgctctgcttctcgccagtgggggagaaatttcgaaacagagctttgaagttccctgccctaatttcaggatgcacaattgactggttcagccgatggcccaaagatgctttagttgctgtgtctgaacacttcctcacttcctatgatattgactgcagtttggaaatcaagaaggaggtggtccaatgcatgggctccttccaggatggggtggctgagaagtgtgttgattattttcagagattccgacgttctacccacgtgacgcccaaatcatacctctcctttattcagggctataagttcatatatggagaaaagcatgtggaggtgcggaccctggccaacagaatgaatactggattggaaaagctcaaagaagcttcagagtctgttgcagccttgagtaaagaactggaagcgaaagaaaaggagctacaagtggccaacgataaagccgacatggtcttaaaagaagtgacaatgaaagcacaggctgctgaaaaggtcaaggctgaggtacagaaggtgaaggacagggcccaggccattgtggacagcatctctaaagacaaagccattgctgaagaaaaactggaagcagcaaaaccagctttagaagaggcagaagctgcattgcagaccatcaggccttcggacatcgccactgttcgcacgttgggccgcccccctcacctcatcatgcggatcatggattgcgtactgctgctgtttcaaaggaaagtcagtgctgtgaaaattgacctggaaaaaagctgtaccatgccctcctggcaggaatccttaaaattgatgactgcagggaactttttacagaacttacagcaattcccaaaagacacaatcaatgaagaggtgatagaatttttgagtccttactttgaaatgcctgactataacatcgaaactgctaaacgcgtatgtggaaatgtagctggtctttgttcctggacgaaagctatggcttccttcttttctataaacaaagaagtactgcctctgaaggccaacttggtggtgcaagagaatcgccatctcctggccatgcaggatctgcagaaagcccaggccgagttggatgacaagcaggcggaacttgacgtggtgcaggctgagtatgaacaggccatgactgaaaagcagaccttgcttgaagatgcagagcgatgcagacacaagatgcagacagcttccacgctcatcagtggcttggcaggtgaaaaagaaagatggacagagcaaagccaagagtttgctgcacaaactaaaagacttgtaggggatgtactgttggctacagcttttctatcttattctggtccatttaaccaagagtttcgtgatcttctgttaaatgactggcggaaggaaatgaaagcccggaaaattccatttggaaagaacctaaatctcagtgagatgttgattgatgctcctactattagtgaatggaacctccaaggtctgccaaatgatgacttgtccattcaaaatggaattattgtcacgaaggcatctcgttaccctttgttaattgatccacagactcaaggcaagatctggattaaaaataaagaaagccgaaatgaactccagatcacgtctttaaatcacaagtacttcagaaaccacctggaagacagcctttctcttggaaggcctttgcttattgaagatgttggagaggaactagatccagcactagataatgttttggaaagaaacttcattaaaactgggtctacctttaaggtgaaagttggtgacaaggaagtagatgtgttggatggctttagactctacattaccaccaaattgcctaacccagcctacacccctgagataagtgcccgtacctccatcattgacttcactgtcaccatgaaaggtctagaagatcagttactggggagggtcattctcacagagaagcaggaattggagaaagaaagaactcatctgatggaagatgtaactgcaaacaaaagaaggatgaaggaactagaagataacttgctttaccgcctgacaagtacccaggggtccctggtagaagatgaaagtctcattgtcgtgctgagtaacacaaaaaggacagccgaggaggtgacacagaagctagaaatttctgctgagacagaagttcaaattaactcagcccgggaggaatacagacctgtggctacgcggggcagcatcctctacttcctcattactgagatgcgcttggttaatgagatgtatcagacttcgcttcgccagtttctgggcttatttgacctttccttagccaggtctgtcaagagcccgattacaagcaagaggattgctaatatcatcgagcacatgacctacgaggtttataagtatgctgcccgagggctgtacgaggagcacaaattcctgttcaccttgttgcttaccctaaagattgacatccagaggaaccgagtcaagcatgaagagtttctcactcttattaaaggaggtgcctcattagaccttaaagcttgtcctccaaaaccatcaaaatggatcctggacataacatggctgaatttggtggaacttagcaaactcagacagttttcagatgtccttgaccagatatcgagaaatgagaaaatgtggaaaatttggtttgataaggaaaacccggaggaggaacctcttccaaatgcctatgataaatctcttgactgcttcagacgtcttctccttattagatcctggtgtcctgacagaaccatcgcccaggcccgcaagtacatcgtggactccatgggagaaaaatatgccgaaggtgttattttagacttggagaagacgtgggaggaatctgatccacggacgccactcatctgtctcctgtctatgggctcagaccccacagattccatcattgccttggggaagagattaaaaatagaaacccgttatgtgtccatgggccagggccaggaagtccatgctcggaagctcttgcagcagaccatggcgaacggaggatgggcacttctgcagaactgccatctgggacttgatttcatggatgagctgatggacataatcatagaaactgagcttgtacatgatgcgttccgcctctggatgaccaccgaggctcataagcagtttcccattacactccttcagatgtccattaaatttgccaacgatcctccacaaggactccgggcaggactgaaaagaacatatagtggtgtcagccaagacctgctggacgtgagctctgggtcccagtggaagcccatgctgtacgcagtggctttcctgcactccactgtccaggagaggcgcaagttcggtgccctggggtggaatatcccctacgaatttaaccaagcggactttaatgccactgtgcagttcatccaaaaccacttggatgacatggatgtcaaaaagggtgtctcctggaccaccatccgctacatgataggagagattcaatatggaggcagagtcactgacgactatgataagagattgttgaacacatttgctaaggtttggttcagtgaaaatatgtttggaccagatttcagtttttaccaaggatacaatattccaaaatgcagcacagtggataactatcttcagtatatccagagtttgcctgcctatgacagccctgaggtgtttgggctgcaccccaatgctgacatcacctaccagagcaagctggccaaggacgtgctggacaccatcctaggcatccaacccaaggacacctctggtggaggggatgagacccgggaggcggtggtggcccggctggctgatgatatgctggagaagctgcccccagactatgtcccctttgaagtaaaagagaggctgcagaagatggggccattccagcctatgaacattttcctcaggcaggaaatagacagaatgcaaagggtactcagccttgtccgcagcaccctcactgagctgaaacttgctattgatggcaccatcatcatgagcgaaaatctgcgagatgcattggattgcatgtttgatgctagaatccctgcttggtggaaaaaagcttcttggatttctagtacactgggtttctggtttactgaacttatagaaagaaacagccagtttacctcgtgggttttcaatggccgacctcactgcttttggatgacgggtttttttaacccccagggatttttaactgcaatgcgacaggaaataactcgggccaacaaaggctgggctctggacaatatggtgctttgcaatgaagtcaccaaatggatgaaggacgacatttctgcccctcccacagagggtgtctatgtctatggcttatatcttgaaggtgctggctgggacaagaggaacatgaaactcattgaatcaaagccaaaagtgctctttgagttgatgcctgtcataaggatttatgcagaaaacaatactttacgagatcctcggttttactcctgtcccatctataagaagccagttcgaacggacttgaactacattgccgctgtggatctcaggacagcccagacccctgaacactgggtgctccgtggggttgcccttctgtgtgatgtcaagtaacatgtggggagtgtccccacccaatgctttggaaaatgcaagatctaaattattgtaacctttatttctgtatgactgctggacagtgtatgttaggtcgtttatgcaattaatgagctgcataggttttccccactccttaattggatgcttatattttacttgtttcatcattagtgaccaatgtctgagtttgttgaaaatgttatttagtgatataaaagtaaatttacagcatcctaatgaagtgtggccctcaaatccacagtagtatattttcttcttacttcgctccgaagactgactagggtaagcagacagtatttctctgggaggaattattcttctgttaacgtggcctggtaacagccaagttcttgaaggtaacagggcaagtctgtgctgattttgcttctattgcctttcgtatttaggtcaagttaagagacttattttcagggtttcaagcagccaattaaaaataccttttaaaaaatagaaggaaatagaagaatggattaagaatgtaaatagaaaatttatgtaaacatagagaataaacgtagaacaatgcttaagcctacttataattaataatgaaatactaattgataattcttataataaaaattaaagctaaaagtaaatgatagcatgctctcagtaaaactgatccactcacaaattgctggagcaatgtaaatcaacccaacctttttgtaaaatgattaaatacagaaagagccataaaaatattcacacccttggatctttgttttctctacatcaaggaaacaatttaaaagactgaaaacagtctatataaaattgcatttaataacagaaaaaaatggaaaaatcataaatattcaatagtcaggctatggttaaggaaattaagagatatttggcaaccataaaaaacaattttgaagattccataatatgaaatggtagacccagactgttaagtgaaagatttagtttacaaaatattgagcacactgtgattataacagcaaatatatttgcatgtggacaaagattagatggcaagatagaaaaataagaacagatgtgatagcaagaattatagttggcttgaaaaaatgtgatgatcaggagaaaaaataaaaaaagggtagaaatattagacggtgcgtagggactttctatggacttttattaattaggaaacattatcaaaggaacttttcacgtatttttctttaaattctggttagatgttattaataattcttcatctaacctactgactagaaaatatagtcagtactaaattagaattgtggtttataaacttttggttagctctggatctgtataactgcatttttttggataaacagtttttggtaggtggataccgggagacaagtgtgggtccctctcactgggcttcattctgtggaccaggatcattatttcatgctcatgatcatgagagttaggactgagtggctcctgtgactcccaccatcttagatgatactgttttcttgtgagttctttcttttggtgtggattagtatatcagttgatttgtgtgaattgtggtgaaacaatcatttcattttgaaaagcaagtaatgaaaatgtcaacatcataggaattaataaaatgtttttact

SEQ ID NO: 117296 - protein, 4158 aa, Artificial Sequence
  derived and/or modified sequence
MTFRATDSEFDLTNIEEYAENSALSRLNNIKAKQRVSYVTSTENESDTQILTFRHITKAQEKTRKRQQPIKLEPLPVLKVYQDHKQPEYIHEQNRFQLMTAGIIKRPVSIAKKSFATSSTQFLEHQDAVKKMQIHRPYVEVFSPSPPKLPHTGIGKRGLFGTRSSAYPKYTFHDREEVVKANIRDPLQIIKIIRENEHLGFLYMIPAVPRSSIEYDTYNLKVVSYENINKNDYYTISQRAVTHIYNEDIEFIEIDRWEQEYLYHRELTKIPIFSLFRKWKAFSVWRKNVRSKKITGCQKSLQKNLFIVNPHLRPALLKINELCYHLSFMGLCYIEKCHTYTLQEFKAAQVIRLAEVTERLGEFRNEAKYVVRRACRFALRAAGFVPDDCAFGPFEDYHKVQSSGSFINTPHELPTYGDSEKMTYTEQASKRHYCMRLTCFIRLNDYLIENTMHILTVNAVNSLLNHLTDKLKRTPSADVIQKWITEEKPEVPDKKGTLMVEKQEEDESLIPMFLTELMLTVQSLLFEPSLEDFLDGILGAVNHCQNTVLSVPNLVPDSYFDAFTSPYINNKLEGKTCGTGPSLAAVFEDDKNFHTIISQIKETIQAAFESARIYAATFEKFQIFFKENESLDLQALKLQEPDINFFSEQLEKYHKQHKDAVALRPTRNVGLLLIDTRLLREKLIPSPLRCLEVLNFMLPRQSKKKVDAIIFEAQDAEYKLEFVPTTTTEYVHSLLFLDEIQERIESLEDEGNIVTQMYKLMEQYQVPTPPEDFAVFATMKPSIVAVRNAIDKSVGDRESSIKQFCVHLGSDLEELNNEVNEVKLQAQDPQILDISADQDKIRLILNNLQSVLADLQKRAFQYKSYQKNFKVEVSKFEALEEVSAELKLKQLLWDSFSEWDKLQQEWLKSKFDCLDPEVLNGQVSKYAKFVTQLEKGLPPNSVVPQLKYKVEKMKEKLPVIIDLRNPTLKARHWAAIEQTVDATLVDAEIPLTLERLSQLHVFDFGQEIQDISGQASGEAALEAILKKVEDSWKTTEFVILPHRDSKDVFILGGTDDIQVLLDDSTINVATLASSRYLGPLKTRVDEWQKQLALFNQTLEEWLTCQRNWLYLESIFNAPDIQRQLPAEAKMFLQVDKSWKEIMRKVNRLPNALRAATQPGLLETFQNNNALLDQIQKCLEAYLESKRVIFPRFYFLSNDELLEILAQTRNPQAVQPHLRKCFDSISKLEFALMPPAEGKIPGIDGEPEKVYTNDILAMLSPEGERVSLGKGLKARGNVEEWLGKVEEAMFTSLRRLCKAAIADYQGKLRTDWVVAGHPSQVILTVSQIMWCRDLTECLETEHSNHIQALKNFEKVNFERLNALAAIVQGSLPKLHRNILTALITIDVHARDIVTELVQSKVETVESFDWQRQLRYYWDIDLDNCVARMALSQYTYGYEYLGACPRLVITPLTDRCYLCLMGALQLDLGGAPAGPAGTGKTETTKDLAKALAIQCVVFNCSDGLDYKMMGRFFSGLAQSGAWCCFDEFNRIDIEVLSVIAQQLITIRNAKAAKLSRFMFEGREIKLVMTCAAFITMNPGYAGRTELPDNLKALFRPFAMMVPNYALIAEVILYSEGFESSKILARKMTQMYKLCSEQLSQQDHYDFGMRAVKSVLVMAGSLKRENPDLNEDVVLIRALQDSNLPKFLTDDALLFSGIISDLFPGVQIPEHDYGILQSTIVDVMNRQNLQPEMCMVRKVIQFYETMLVRHGVMLVGPTGGGKTTVYRILAETLGNLQKLGIENSFYQAVKTYVLNPKSITMGELYGEVNNLTLEWKDGLMALSVRAAVNDTSEDHKWIISDGPVDALWIENMNTVLDDNKMLCLANSERIKLTPQIHMLFEVQDLRVASPATVSRCGMVFVDPEELKWMPYVKTWMKGISKKLTEETQEYILNLFQRYVDEGLHFINKKCSQAIPQVDISKVTTLCCLLESLILGKDGVNLAMEQTKLNTILCQTFVFCYLWSLGGNLTENYYDSFDTFIRTQFDDNPDARLPNSGDLWSIHMDFDTKRLDPWERIIPTFKYNRDVPFFEMLVPTTDTVRYGYLMEKLLAVKHSVLFTGITGVGKSVIAKGLLNKIQESAGYVPVYLNFSAQTSSARTQEIIESKLERKRKNILGAPGNKRIVIFVDDLNMPRLDRYGSQPPIELLRQYQDFGGFYDRNKLFWKEIQDVTIISACAPPGGGRNPVTPRFIRHFSMLCLPMPSEHSLKQIFQAILNGFLSDFPPAVKQTASSIVEASVEIYNKMSVDLLPTPAKSHYVFNLRDLSKCVQGILQCDPGTIREEIQIFRLFCHECQRVFHDRLINNEDKHYFHVILTEMANKHFGIAIDLEYFLNKPIIFGDFIKFGADKADRIYDDMPDIEKTANVLQDYLDDYNLTNPKEVKLVFFQDAIEHVSRIARMIRQERGNALLVGVGGTGKQSLTRLAAHICGYKCLQIELSRGYNYDSFHEDLRKLYKMAGVEDKNMVFLFTDTQIVVEEFLEDINNILNSGEVPNLFEKDELEQVLAATRPRAKEVGISEGNRDEVFQYFISKVRQKLHIVLCMSPVGEAFRSRCRMFPSLVNCCTIDWFVQWPREALLSVSKTFFSQVDAGNEELKEKLPLMCVNVHLSVSSMAERYYNELRRRYYTTPTSYLELINLYLSMLSEKRKQIISARDRVKNGLTKLLETNILVDKMKLDLSALEPVLLAKSEDVEALMEKLAVDQESADQVRNTVQEDEATAKVKAEETQAIADDAQRDLDEALPALDAANKALDSLDKADISEIRVFTKPPDLVMTVMEAISILLNAKPDWPSAKQLLGDSNFLKRLLEYDKENIKPQILAKLQKYINNPDFVPEKVEKVSKACKSMCMWVRAMDLYSRVVKVVEPKRQKLRAAQAELDITMATLREKQALLRQVEDQIQALQDEYDKGVNEKESLAKTMALTKARLVRAGKLTAALEDEQVRWEESIQKFEEEISNITGNVFIAAACVAYYGAFTAQYRQSLIECWIQDCQSLEIPIDPSFSLINILGDPYEIRQWNTDGLPRDLISTENGILVTQGRRWPLMIDPQDQANRWIRNKESKSGLKIIKLTDSNFLRILENSIRLGLPVLLEELKETLDPALEPILLKQIFISGGRLLIRLGDSDIDYDKNFRFYMTTKMPNPHYLPEVCIKVTIINFTVTKSGLEDQLLSDVVRLEKPRLEEQRIKLIVRINTDKNQLKTIEEKILRMLFTSEGNILDNEELIDTLQDSKITSGAIKTRLEEAESTEQMINVAREKYRPVATQGSVMYFVIASLSEIDPMYQYSLKYFKQLFNTTIETSVKTENLQQRLDVLLEQTLLTAYVNVSRGLFEQHKLIYSFMLCVEMMRQQGTLSDAEWNFFLRGSAGLEKERPPKPEAPWLPTATWFACCDLEESFPVFHGLTQNILSHPISIRLGSFETYINPQKWEGYSKMKHEDKHMRQEKEAAHQDPWSAGLSSFHKLILIKCCKEEKVVFALTDFVIENLGKQFIETPPVDLPTLYQDMSCNTPLVFILSTGSDPMGAFQRFARESGYSERVQSISLGQGQGPIAEKMVKDAMKSGNWVFLQNCHLAVSWMLAMEELIKTFTDPDSAIKDTFRLFLSSMPSNTFPVTVLQNSVKVTNEPPKGLRANIRRAFTEMTPSFFEENILGKKWRQIIFGICFFHAIIQERKKFGPLGWNICYEFNDSDRECALLNLKLYCKEGKIPWDALIYITGEITYGGRVTDSWDQRCLRTILKRFFSPETLEEDYKYSESGIYFAPMADSLQEFKDYIENLPLIDDPEIFGMHENANLVFQYKETSTLINTILEVQPRSSTGGEGKSNDEIVQELVASVQTRVPEKLEMEGASESLFVKDLQGRLNSLTTVLGQEVDRFNNLLKLIHTSLETLNKAIAGFVVMSEEMEKVYNSFLNNQVPALWSNTAYPSLKPLGSWVKDLILRTSFVDLWLKRGQPKSYWISGFFFPQGFLTGTLQNHARKYNLPIDELSFKYSVIPTYRDQAAVIEAAKTVQFGQELPMDMELPSPEDGVLVHGMFMDASRWDDKEMVIEDALPGQMNPVLPVVHFEPQQNYKPSPTLYHCPLYKTGARAGTLSTTGHSTNFVVTVLLPSKRSKDYWIAKGSALLCQLSE

SEQ ID NO: 117297 - DNA, 102 bp, Artificial Sequence
  derived and/or modified sequence
taacacataaacaaacacagagacaaaatctccgagatgttaatctgctccagcaatacagaacaatttctattaccaacagaatgcttaatttttctgcct

SEQ ID NO: 117298 - DNA, 12477 bp, Artificial Sequence
  derived and/or modified sequence
atgaccttccgagctaccgactccgagttcgatctgacaaatatagaagaatatgcagagaactcagcactctcgcgcctcaacaatatcaaggctaagcaacgcgtatcctacgtgacctccaccgaaaacgagtctgacactcaaatactgaccttccgccacatcaccaaagctcaggagaagacaaggaaacggcagcaaccaattaagctggagcctctgccagttcttaaggtctatcaggaccataaacagcctgaatacattcacgagcagaaccgcttccagctgatgacagcaggaataattaaacgtccagtttctatcgccaaaaagagttttgctacctctagcacccagttcctggagcaccaggatgctgtgaaaaaaatgcagattcatcgcccttacgtggaagtatttagcccatcacccccaaagcttccgcataccggtatcggcaaacgtggattattcggcactaggtcctcagcctaccccaagtacaccttccatgaccgggaagaggtggttaaggcaaacattcgggaccctctacagatcatcaagatcatacgggagaacgaacatctcggctttctgtacatgatccctgccgtcccacggtctagtattgagtacgacacatacaatttgaaagtcgtgagttatgaaaatatcaataagaacgactattacactatctctcagagggcagtgacccatatatataacgaggatatagaatttatcgaaattgatcggtgggagcaggagtatctgtatcaccgggaactgactaaaatcccaatattcagtctatttaggaaatggaaggccttttcagtttggcgcaaaaacgtacggtctaaaaaaatcacggggtgtcagaagtccctgcaaaagaatctcttcattgtcaatccgcacctgaggcccgctttgctcaaaatcaacgaattgtgctatcatctctcatttatggggttatgttacattgaaaagtgtcacacatacacgctgcaggagttcaaggcagcacaagtgattagactcgcggaggtcactgagaggttgggggagttccgaaacgaagccaaatacgtggttaggcgggcgtgtaggtttgccctacgggctgcgggattcgtgcctgacgactgcgcctttggcccttttgaggactatcacaaggtgcaaagcagcggaagttttatcaacacgcctcacgagcttcccacatatggcgactcggagaaaatgacatacacagaacaagcttccaagagacattattgtatgcggttgacttgcttcatccgcctcaacgattacctcattgaaaataccatgcacattctaacagtgaatgccgtcaactcactcttgaaccatctcaccgacaaattgaaaaggaccccgagcgccgacgtaattcagaagtggatcactgaagagaagccggaagtgcctgataaaaaaggcactttgatggtggagaagcaggaagaagatgagagcttgatccctatgttcctgacagagctgatgctaacagtccagtcattgctcttcgagcctagtctcgaggattttttagacggaattctcggcgcagttaatcattgccagaataccgtgctcagtgtgccaaacctcgtgcccgattcttactttgatgctttcacttccccatacataaacaataagttagaagggaaaacgtgcggaaccggcccaagcctggccgccgtctttgaagatgataagaatttccacacgattatctcacagatcaaggagactatccaggccgctttcgaatctgctaggatttacgcagctacctttgagaagttccaaatcttttttaaggaaaacgaaagcctggatctgcaggcgctgaaattgcaagagcctgacatcaacttcttttccgaacagctcgagaaataccataaacagcataaagacgctgttgcattacgacctaccagaaatgtgggactgctgctgattgataccagactcctgcgcgagaagctgattccatctcccctcagatgcttggaggtgctgaatttcatgctgccccgccagtctaagaagaaggtggatgcgatcatattcgaggcccaggatgccgaatacaagctggagttcgtgcccacaacaacgaccgagtatgtccacagcttgctgttcctggatgagattcaggaaagaatagagtctttggaagatgaggggaatattgtcacgcagatgtataagctcatggaacagtaccaggtgcctaccccacccgaggacttcgcagtgttcgctactatgaaacccagtatcgtggccgtgcgcaatgccatcgacaagagcgtcggcgaccgcgagtcttctattaaacagttttgtgtgcacttgggaagcgacctcgaggagttaaataatgaggttaacgaagttaagctgcaagcacaggatccccagatccttgatattagcgctgaccaggacaaaataaggctgattctcaacaatctgcagagcgttctggctgatctccagaaacgagcctttcagtacaagagttaccaaaagaactttaaggtggaagtgtccaaatttgaagcgttagaggaagtgtctgctgaattaaagttaaagcagctgctgtgggatagcttctccgagtgggacaagctgcagcaggaatggctgaagagcaagttcgactgtctcgatcctgaggttttaaacgggcaggtttcgaaatatgctaaattcgtcacacagctggagaaaggactgccgccaaacagtgtagtgcctcaattaaagtataaagtcgagaagatgaaagagaagcttccagtcattattgatcttagaaatcccacccttaaggccagacattgggccgctatcgaacagactgttgatgctactttggtcgacgcagaaattcctttgacacttgagagactctcccagctccacgtgtttgattttggacaggagattcaagatatttctggacaggcctccggagaggcagctcttgaggccatcttgaaaaaagtcgaggactcctggaaaactacagagttcgtcatcctgcctcatcgcgactccaaagacgtctttatattggggggaactgacgacatacaagtgctgctcgatgatagcacaatcaacgtggccactctggcctccagccggtacctaggccctctcaagactcgcgttgacgagtggcaaaaacagttagcattattcaaccagacccttgaggaatggctgacatgccagcgaaactggctctatctggaaagcattttcaatgcccctgacattcaaagacagctgcctgcagaggccaagatgttcctgcaagtggacaaatcctggaaggagattatgcgaaaggtcaatcggctgccaaacgccctgcgggctgctacacagccaggccttttagaaacatttcagaacaacaacgctcttctggatcagatccagaaatgtctggaagcatatctagaatctaaacgtgttatttttccaaggttctatttcctgtcaaacgatgagcttctggagatcctagctcaaacccgtaatccccaagccgttcagccgcacctgaggaagtgttttgacagcatatcaaagctcgagtttgcacttatgccacccgctgaagggaaaatccctggcattgatggagaaccggagaaagtgtataccaatgatattcttgcaatgctttcacccgagggcgaacgtgtctcacttggaaagggcttgaaagcacgcgggaatgtggaggagtggcttggtaaggtcgaggaggccatgttcacctctttgcgccgcctgtgcaaggcagcaattgccgactatcagggaaagcttagaaccgattgggtcgtggccgggcacccaagccaggttattttgacagtttctcagatcatgtggtgtagggatctcactgagtgtctggagactgaacactctaatcacattcaggcccttaagaacttcgaaaaggtcaactttgagagactgaatgccctggctgctattgtgcaggggagtctcccaaaactgcaccgcaacatcctgactgccttaataactatcgatgttcacgcccgcgacatcgtgactgagttagtccagtccaaagtggagactgtagagagctttgactggcagaggcagctcaggtactactgggatatcgatctggataattgcgtggcacgaatggctctgagccaatacacatatggatatgagtatctcggagcttgtccgagactggtcatcacaccactgactgaccgatgctacttgtgtttgatgggcgcgctccaactggatctcggcggtgcgcccgcagggcccgcaggtacaggaaagaccgagacaactaaagatctggccaaggcccttgctattcaatgcgtagtcttcaactgctccgacggcctcgactataagatgatgggtcgcttctttagcggcctcgcacaatccggagcatggtgctgcttcgacgagttcaaccggattgacatcgaagtgctgtccgtcatcgcgcagcagctgattactatcagaaacgccaaggccgcaaagctttcccggtttatgttcgagggacgagagatcaaactggtcatgacttgcgctgcatttatcacaatgaacccaggctacgcaggcaggaccgaactcccagataacttaaaagctcttttccgtccattcgccatgatggtcccaaactacgcactgattgctgaggtcattttgtactccgagggcttcgaatcttctaaaatcctagcgcgaaaaatgacccagatgtataagctctgcagtgagcagctgtctcagcaagaccactatgactttggtatgagggctgtgaaatccgttctcgtgatggccggtagtctgaaacgggagaaccctgatcttaacgaggatgtggttctcatcagggccctgcaggactctaatttacctaaatttttaactgatgacgcgctgctgttttccggtattatcagtgacctttttcccggcgtccagatccccgagcatgattacgggatcctccaatccactatcgttgatgttatgaacaggcagaatctgcagcccgaaatgtgtatggttcggaaagttattcagttctacgaaaccatgctggtaagacatggtgtgatgttagtgggaccaacaggcggaggaaagacaactgtgtataggatcctggccgaaaccctcggtaatctgcagaagttaggtatagaaaactcattctaccaagccgtcaagacatatgttctgaaccccaaatcaatcacgatgggggagctctatggtgaggtgaataaccttaccctggaatggaaagatggcctgatggcactttcagtccgtgccgctgtaaatgatacctctgaagaccacaagtggatcattagcgatggaccggtggacgctctgtggatagaaaacatgaacaccgtgctcgacgataacaagatgttatgcctagctaactctgagcgtatcaagctcactccccagattcatatgctgtttgaggtccaggacttgcgggtcgcttcccccgccacagtgagccgttgcggaatggtgtttgtggatccagaggagctcaaatggatgccgtacgtgaagacgtggatgaagggaatttctaaaaagctgacagaggaaacccaagaatacatcctgaacttgttccagcgctatgtggacgagggcttgcatttcatcaataagaagtgtagtcaggcaattccccaggtggatatctccaaagttaccacattatgttgtctcttagaatccctaatcctcgggaaagacggtgtcaatctcgctatggagcagactaagcttaatacgatactgtgtcaaacatttgtgttttgctatctgtggtcattgggcggcaacctcaccgagaactactatgattcattcgacacctttattagaacccagttcgatgataaccccgatgcaagactgcccaactccggagacctgtggtccattcacatggacttcgataccaaacgtctagatccttgggaacggatcatacctacattcaaatacaaccgggacgtaccattctttgagatgctggttcccaccacagacaccgtcaggtatggctacctcatggagaagttgcttgcggtgaagcatagtgtcctcttcaccggtatcaccggtgtggggaaaagcgttattgcgaaaggcttgctgaacaaaattcaggagtcagctgggtacgttccagtctacttaaacttcagcgcccagaccagctccgcgagaacccaggagattatagagtctaagctggaaagaaagagaaagaacatcttgggggctcccgggaataagagaatcgtgatcttcgtcgatgatctcaacatgccccgcttagatcggtacggttctcagccacccatcgagctattgcggcagtaccaggattttggaggtttttacgacaggaataagctcttctggaaggagatccaggacgtcacgatcatcagtgcttgtgctccacccggcgggggaagaaaccctgttaccccccgattcatccgtcatttttccatgctatgcctgccgatgccctcagagcattctcttaagcaaatctttcaggccatactgaatggctttctcagtgatttcccaccagcggtgaagcagaccgcttcatcgattgtcgaggccagcgtggagatatacaataagatgagcgtagatcttctgcctactcctgccaaatcccattatgtcttcaatctccgggatctttcaaagtgtgtacaaggaatactccagtgcgacccaggcactatccgggaggagatccagatctttagattgttctgccacgaatgccagcgggtgtttcatgatcgcttgattaacaacgaagacaagcattactttcatgtgatccttacagaaatggctaataagcatttcggcatcgccatcgatctggagtatttcctgaacaagccaatcatcttcggcgactttatcaagttcggtgctgataaggccgatcgaatttatgacgacatgcctgacatcgagaaaacagccaacgtgctgcaggactacctggatgattataacctgacaaatccaaaagaggttaagctggtttttttccaggatgctattgaacacgtcagccgcatagcacggatgataaggcaggagcggggcaatgctttgctagtgggagtcggaggcacagggaagcagtccctgactagactcgcggcccatatttgtggttacaaatgccttcagatcgaactcagtagagggtataactacgactcattccacgaggatcttaggaaattatacaagatggccggtgttgaggacaagaacatggtgtttctctttactgacactcagatagtggtggaggagttcctagaggacatcaataacatactaaacagtggggaggttccaaacctgtttgaaaaggatgaactggaacaagtcctggctgcaacgaggcctcgggccaaagaggtcggaatcagtgaagggaatcgggacgaggtttttcagtattttatttctaaggtgaggcagaaactacatatcgtgctgtgcatgtcacccgtcggagaagccttccgttccaggtgtcgcatgttccccagcctggtaaactgttgcaccatcgactggtttgtacagtggcctcgcgaggccctgctttcagtcagcaaaacttttttctctcaggtggacgccgggaatgaagagcttaaggagaagctgcccctgatgtgtgtgaacgttcatctgtctgtatcttctatggcagagcggtattacaatgagttgaggcgcaggtactataccaccccaacttcatatctagaattaatcaatctgtacctgagtatgcttagcgaaaagaggaaacagatcatctctgcgcgggaccgtgtcaaaaatggattgaccaagttactggaaacaaatattctggttgacaagatgaagctggatcttagtgcgctagagcccgttctgctcgcgaagagcgaagacgtcgaggcgctgatggagaaactggccgttgatcaggaatcggccgatcaggttcgcaataccgttcaggaagatgaagcaactgccaaggttaaggccgaggaaactcaggccatcgcagacgacgcccagcgggatcttgatgaagcattgccagccctggatgcagctaacaaggcgttggactccttagataaggcggacatctctgagatcagggtgtttacgaagccaccagacctggtaatgacagtgatggaagcgatctctattctcctgaatgccaagccagattggccaagtgccaaacagctgctgggagactccaactttctgaagaggctcctggagtatgacaaagagaatataaagcctcagattcttgctaaactccagaagtatattaataaccctgatttcgtgcctgagaaagtggaaaaggtgtctaaggcctgtaagtccatgtgcatgtgggtgagagctatggatctgtattccagggttgtcaaagtagtagaacctaaacgccagaagttacgcgcggcccaggccgagctggacataacgatggcaacactgcgcgaaaagcaggccttgctgcggcaggtggaggaccagatccaggctctccaggacgaatatgataaaggggtgaatgaaaaagaatctctggccaaaaccatggctctaacgaaggccaggctcgttagggctggaaaattaaccgcagctctggaagacgagcaggttagatgggaagagtctattcagaagttcgaggaggagatctcaaacataactggaaacgtatttatagccgctgcttgtgttgcatactatggtgcattcactgcgcaatatagacagagcctgatagagtgttggattcaggattgtcaatctctcgagattccgatagaccctagttttagtctgattaatatcctgggtgacccctacgagattcggcagtggaatactgacggactccctcgggatctgatcagcactgaaaatggcatcctcgtcacccagggtaggaggtggccactcatgatagatcctcaggaccaagcgaacagatggataaggaataaggagagcaagtctggcttaaaaatcattaagctcacggatagcaatttcctcaggatcctggaaaactcaattaggctgggccttcccgtgcttctcgaggagctcaaggagactttggatcccgccctcgagcctattcttcttaaacagatcttcatttccggcggacgcttattaattcgactcggcgacagtgatattgattatgataagaacttcaggttttacatgaccaccaagatgcctaacccgcactatctgcccgaagtgtgtattaaggtgaccatcattaacttcactgtgacaaagagtggtctggaggaccaattgctgtccgatgttgtgaggctcgagaaacctcgcctcgaggaacagcggataaaactgatcgtccgaatcaacaccgacaagaaccagctgaaaaccatagaggagaagattttaagaatgttgtttaccagcgagggcaatatcctggacaacgaggagcttatcgataccttgcaagacagcaagattaccagcggcgccataaaaacaaggctcgaagaggctgagagtacagagcaaatgatcaacgtggccagagaaaaatatcggcccgtcgccacccagggatccgtgatgtacttcgttatcgccagcctgagcgaaatcgacccgatgtaccaatactccctaaaatattttaagcagttgtttaataccaccattgagacttccgtgaagaccgagaatctccagcagcgccttgatgtcctgctcgagcagacactactgacagcatacgtgaacgtgagtagaggcctgttcgaacagcacaagttgatctacagcttcatgctgtgtgtggagatgatgcgccagcaggggacattatccgacgcggaatggaacttctttctgcgcggttccgcaggcctggagaaggagaggccacctaagcccgaggcaccatggttgccgaccgctacttggtttgcttgctgcgatcttgaagagagcttccccgttttccatgggctgacccagaacattctttctcatccaatttcaattcgcttgggatccttcgagacgtatataaatcctcagaaatgggagggctacagcaagatgaaacacgaggataaacacatgcggcaggagaaggaagccgctcaccaggatccgtggtctgctggactcagttccttccataaattgatactgatcaaatgctgtaaggaagaaaaggtggtgttcgctctcacagactttgtcattgaaaatctcggtaagcagttcattgaaacccctccagttgatttgcccacactctaccaggatatgtcctgcaacaccccactggtgttcatcctgtccacgggaagtgacccaatgggggctttccagcgattcgcaagagaatctggttatagcgaacgggtccagagcatcagccttggccaggggcagggacccattgctgaaaaaatggtgaaagatgctatgaagtctggcaactgggtattcttacagaactgtcacttggcagtgtcttggatgttggctatggaagagctgatcaagacatttactgatccggactctgcaatcaaagatactttcaggctctttctctcctctatgccatctaacacattccccgtgacggtgctccagaatagcgtcaaggtgaccaacgaaccacccaaggggctgagagcaaatataaggagagctttcacagaaatgaccccatccttctttgaagagaacatcctgggtaagaaatggcggcagatcattttcggaatctgtttctttcacgcaataatacaggaacgtaagaaattcggtccactcggctggaacatatgctacgagtttaacgacagcgatcgcgagtgcgcactcctgaacctcaaactttactgcaaggagggaaaaattccttgggatgctctcatttacattacaggggaaatcacgtacgggggtcgtgtaacagattcttgggaccagcgttgcctgcggaccatattgaaacgcttcttctcccctgagacattggaggaggattacaaatacagtgagtccgggatttatttcgccccaatggctgactctctccaggaatttaaggattatatcgagaacttaccactgattgatgatcccgaaatcttcggcatgcacgaaaacgctaatctggtcttccagtataaggagacctccacactgatcaatacaattctggaggtccagccccggtccagtacagggggggagggcaagtccaacgacgagatcgtccaagagctcgttgcgtctgtacagacccgggtgccagaaaagttggaaatggagggtgcctctgaatctcttttcgtgaaggaccttcagggacgactgaacagcctgacgaccgttctgggtcaggaagtcgatcgttttaacaacctgctgaaactgatacatacttcattggagactttaaataaagctattgccggattcgtggtcatgtccgaggagatggagaaggtatataactccttcctcaacaaccaggtgccagctttgtggagcaacactgcctatccctctctgaagcccctggggtcatgggtgaaggacctcatcttacgaacctctttcgtcgatctatggctcaaacggggccagccaaagtcttattggataagtggattctttttcccacaggggttccttacgggcactttacagaatcatgcccgcaagtataacctacctatagatgaactgagcttcaagtactctgttattcccacatacagggaccaggccgcggttatagaggccgctaaaactgtgcagtttggacaagagctcccaatggatatggagctcccatcaccggaggatggagtgctggtacacggcatgttcatggatgcgagcaggtgggatgataaggaaatggtgattgaagacgcactgccaggacaaatgaaccccgtacttccagtggtccacttcgaaccgcagcagaactacaaaccaagccccaccttgtatcactgcccgctgtataaaacaggtgctagagcaggcaccttgtctactaccgggcacagcaccaattttgtggttacggtcctgctgccttcgaagaggagcaaagactactggattgccaaaggatccgcccttctctgtcagcttagtgagtag

SEQ ID NO: 117299 - DNA, 12477 bp, Artificial Sequence
  derived and/or modified sequence
atgaccttccgggcaactgatagcgagtttgatctaacgaatattgaagagtatgctgagaactccgctctgtcacggctgaataacatcaaagccaagcagagggtctcgtatgtgacctcgactgaaaatgagagcgatacgcaaatcctcacatttcgtcatattacaaaggctcaggagaaaactaggaaacgacaacagcctattaagctggagcctttgccagtgctaaaggtctatcaggatcacaaacaacctgagtacatccatgagcagaacaggttccagctgatgactgccggtatcataaaacgtccagttagcattgccaagaagtcctttgccacttctagtacacagttccttgaacaccaggatgctgtgaaaaagatgcaaatccaccggccttatgtggaagtgttctcgccttccccgcccaagctgcctcatactggaatcggtaagcggggcctattcggcactcgaagctctgcctatcccaagtacacattccacgatagagaggaagtagttaaagccaacatccgggatcccctccagataattaagatcattagagagaacgagcacctcgggttcctctacatgatccctgccgttcctaggtctagcatagagtatgacacttataacctgaaggtggtatcttatgagaacatcaacaaaaacgactattacacgatttctcagagggccgttacccacatttacaacgaggatattgaattcatagagattgaccggtgggagcaggaatatctttaccacagggagcttacgaagatcccaatcttttctctgttcagaaagtggaaggccttttctgtttggagaaagaacgtgcgctccaagaaaatcacaggctgccagaagagcttacagaagaatctcttcattgtcaaccctcatctgaggccagccttgctgaagatcaatgagctgtgttaccacctgagctttatgggcctgtgctacattgagaaatgtcacacctacaccttgcaggaatttaaagcagcccaggttatcaggctggccgaggtcacggaacgactgggagaattccggaatgaagcaaaatatgtggtgaggcgcgcctgcagattcgctctaagagccgccggctttgtacctgacgattgcgccttcggacctttcgaagattaccacaaagtccagagttctggtagttttatcaatactccccacgaacttccaacgtacggggacagcgaaaagatgacatatacggagcaggcttctaaaagacattactgcatgagactgacctgttttatccgattgaacgattatctgatcgagaacacaatgcatatccttacagtcaacgcggtaaactctctgttgaaccacttgaccgacaaactgaagcgaaccccttcggcggacgtgatccagaagtggattactgaggagaaacctgaggtcccggacaagaaaggaacacttatggtggaaaagcaagaagaggatgaatccctcatacccatgtttctcacagagctcatgctaactgtccagagtctgctgtttgagccaagtctagaagacttcctggacgggattctcggggctgtcaatcactgtcaaaatacagtcctgtccgtgccaaacctggtgcctgacagctactttgacgccttcactagtccatatattaacaataaattggaggggaaaacctgtgggactggcccatccctcgccgcggtgtttgaagacgacaagaatttccacacgatcatttcccagatcaaggagacaatacaggccgcattcgagagtgcccggatctatgccgccactttcgagaagtttcagatattttttaaggaaaacgagtcactcgatcttcaggccctgaaactccaggagcccgacatcaacttcttctccgaacaactggaaaagtatcacaaacagcacaaggacgcggtagcactgaggcccactcgcaacgtcgggttgcttcttatcgacaccaggcttctgcgcgagaagctgatcccatcgcccctacggtgtctggaggtgctaaatttcatgctgccacggcaaagcaagaagaaggtggacgctatcatcttcgaggcccaggatgctgaatataaactcgaattcgtccccaccactactaccgagtacgttcattcactgctctttttggatgagatccaggaacggattgagtccctggaggatgagggtaacatcgtgacccagatgtacaagcttatggagcagtaccaggtaccaacccccccagaggacttcgccgtatttgcaactatgaagccgagcatagtcgctgtgaggaatgctatagacaaaagcgttggggatagggagtctagcatcaaacaattttgcgtccacctgggcagtgatctggaggagctgaacaacgaggtaaatgaagtgaagctgcaggcccaagatccgcagatcttagacataagcgccgaccaagataagatcaggctcatcctcaacaacttacagtctgtcctggccgatctccagaaacgagcttttcagtacaagagttatcagaaaaactttaaggtagaagtatccaagtttgaagcgctggaagaggtgtcggccgagctcaagctcaagcaactcttatgggatagctttagcgaatgggataagcttcaacaggagtggttaaaatccaagtttgactgcctggatcctgaggtgttgaatggacaagtgtcaaagtatgccaaattcgtgacccagctggagaaggggcttcctcctaacagtgtggtgcctcagcttaaatataaagtcgagaaaatgaaggagaagctgcccgtgattatcgacctgagaaatcctactcttaaggcccgacattgggctgccattgagcaaactgttgacgccacgcttgtggacgcagaaatcccattgaccctcgaaagattgtctcaactccacgtcttcgattttgggcaggaaatccaggacatctctggccaggcttcaggggaggcggccttagaagcaattcttaagaaggtggaggatagctggaagacaacagagttcgtcatcctaccccaccgggattcaaaggacgttttcattcttggagggactgacgatattcaggtgctattggatgactcaacgatcaacgtcgccactcttgcaagcagtagatatctagggccgttaaagactcgcgttgacgagtggcagaaacaattggcccttttcaaccagactttagaagaatggcttacatgtcaaagaaattggctctatttggagtccatttttaacgccccagatattcagcgtcagctgcctgccgaggcaaagatgtttctgcaggtggataagtcctggaaagagatcatgcgcaaggtgaatcggctccctaacgcgctgagggctgcgacacagcccggtttacttgaaacattccaaaataataatgcccttctggatcagatacaaaaatgcttggaggcctatctcgagtcaaagagagtgattttcccgcgtttctactttctatcgaatgatgaactgcttgagattctcgcgcaaacccggaatccccaagctgtgcaaccccacctgcggaagtgcttcgactcaattagcaagttggagttcgctctcatgcctccggcagagggcaaaatccctggaatagacggagaacctgagaaggtctacaccaatgacatcctggcgatgctaagcccggagggagagcgcgtgtccttaggcaagggactcaaagctcggggcaatgtggaagaatggctaggcaaagtggaagaagctatgttcacctcactgcgcagactctgcaaagcggctattgctgattaccagggcaagctgaggaccgactgggtggtcgctggtcaccccagccaagttatccttacagtctcccagattatgtggtgtagggatttgaccgagtgtctggagactgaacattctaaccacattcaggcactgaaaaatttcgaaaaggtgaatttcgaaagattaaacgctcttgccgccatcgttcagggaagtcttcctaagctacatcgtaatatcctgaccgcactgatcactatcgacgttcacgccagggacatcgttaccgaacttgttcaatcaaaagtggaaacagtggagtctttcgactggcaacggcagctgcggtattattgggacattgatctggataactgtgtggccaggatggcgctttctcaatacacttatggatacgagtaccttggcgcatgtcccagactcgtcatcacacccctgacggaccgatgctacctgtgcctgatgggggcattacaactggacctgggtggcgcccctgctggccctgcagggaccgggaagaccgagacgacaaaggacctggccaaggccctagctatacaatgcgtcgtctttaattgctcagatggcctggattacaagatgatgggtagatttttctccgggctggctcagtccggtgcttggtgttgctttgacgaattcaaccggattgacatcgaagtgctcagtgttatagcacagcagctcatcacaattcgtaatgctaaggccgcaaagctctcacggtttatgttcgagggcagggaaatcaaattggtaatgacttgcgccgcatttatcaccatgaatccaggttacgcagggcggacagagctgcccgataacctgaaagcgttgttcaggccgttcgcaatgatggtgccaaactatgctctgatcgctgaggtgattctgtattctgagggatttgaatcttcgaaaatccttgcaaggaagatgacacagatgtacaaactgtgctcagaacagctgtcacagcaggaccattacgacttcggcatgagggctgtgaaaagtgttttggttatggccggatctttgaagcgagagaaccctgaccttaacgaagatgttgttcttattcgcgcactccaggatagtaaccttccgaagttcctgacagatgacgccttattgttctctggaataatcagcgatctgtttccaggtgtgcagatccctgagcatgattacggcatcctgcagtctacaatcgtcgacgttatgaaccgccagaacctgcagcccgagatgtgtatggtgaggaaggtgatccagttttacgaaaccatgctggtgaggcatggagtcatgctggtgggacctaccggtggcggaaaaaccactgtgtacagaattctggctgagaccctgggaaacttacagaagttgggcattgagaatagcttttatcaggcagttaagacatacgttcttaacccaaaatccatcacaatgggggagctgtatggtgaggtgaacaatctcactcttgagtggaaggatggactcatggcactgagcgtcagggcggccgtaaatgatacctccgaggatcacaagtggataatctctgatggccctgtggacgctctctggattgaaaatatgaacactgtgttggacgacaacaagatgctttgcctggcaaattccgaacggatcaagctcacaccgcaaatacatatgctgtttgaggtccaagatctccgcgtggctagccctgccaccgtcagccgatgtgggatggtgttcgttgaccctgaagagcttaaatggatgccttacgtgaagacttggatgaaggggatcagcaaaaaactcaccgaagagacgcaggaatacatcctgaacctttttcagcgctatgtggatgaaggtctgcacttcattaataagaagtgctcacaggcgattccccaggtggatatcagcaaagtcacaacactttgttgcctcctggaatcactgatcttgggaaaagatggcgtgaatcttgccatggagcaaaccaaattgaatacaatcctttgccagacctttgtgttttgctatctttggtcactcggcggaaatctcacagagaactactatgattccttcgacacttttattcggacacagttcgatgataatccagacgcaaggctacctaatagtggcgacctgtggagtatacacatggactttgataccaagcggctggacccctgggaacggatcatccccacttttaagtacaatagggacgtccccttcttcgaaatgctggtccccaccactgatactgttcgctatggatacctgatggagaagctgctggccgtgaagcatagcgtgttgtttacggggataaccggagtggggaagagtgtcatcgctaaaggcctgcttaataagattcaagaatctgccggatatgtgccagtttacctgaacttcagcgcccagacctcctcagcaaggacacaggaaatcatagaaagcaaactggagcgaaaacgcaagaacatcctgggagcccccggaaacaaacgcatagttattttcgtggacgatttaaacatgccacggctcgaccgctatggtagtcagccaccgattgagctactccggcagtaccaggacttcgggggcttctacgacagaaacaagctgttttggaaagaaatccaggacgtcactattatctcggcctgcgcccctcctggagggggacgcaacccggtgacacctagatttataagacatttttcaatgctgtgtctccccatgccttcggaacacagtttgaaacagatttttcaggcaatcttaaacgggttcctctctgattttccacctgcagtcaaacaaacagcaagctcaatcgttgaggcatcagtggaaatatacaacaaaatgagtgtcgacctgctcccgacacccgccaaaagtcactatgtttttaatctgagggacctgagcaaatgcgttcaaggaatcttgcaatgcgaccctggtaccatccgcgaagagatacaaatcttccggctcttctgccatgagtgccagcgggtcttccacgatcgcctgattaataatgaggataaacactacttccacgtaatcctcaccgaaatggcaaataaacactttggcattgctattgatttagaatactttcttaataagcccatcatattcggggactttataaagttcggagccgataaggctgaccggatctatgacgatatgcctgacatcgagaagacggctaacgtgctacaggattatctggacgattataacctcaccaacccaaaggaggttaagcttgtattcttccaggacgctatcgagcacgtgagtcggatagccagaatgatcaggcaggagcgggggaacgctctgctagttggggtaggcgggactggcaagcaaagcctcacaagactcgcggcccacatctgcggctataagtgcttgcagatcgaactctctagggggtacaactacgactcatttcatgaagatctacgaaagctctataagatggctggcgtagaggataaaaacatggtgttcctattcactgatacccagatcgtcgtggaagagttcctcgaggacatcaataacatactgaattcaggagaagtgccgaatttgttcgagaaggatgaactcgagcaggtcctggccgcaacacgtccacgggcaaaagaggtgggaatttcagagggaaatagagacgaagtgttccaatacttcatttctaaggtgcgccagaagctgcacatcgtgctttgcatgtcccccgttggagaggcatttcgctcacggtgcaggatgtttcctagtctggtcaattgctgtacaattgattggttcgtccagtggccccgggaagcccttttgagcgtaagtaagacatttttttcccaggttgacgcaggaaacgaagagttgaaggagaagcttccactgatgtgcgttaacgtccatctaagtgttagtagtatggctgaaagatactacaacgagctgagacgccggtactatactactcccacttcgtatttagagttaatcaacctttatctgagcatgctctctgagaagcggaagcaaattatctctgcgagagatagagtgaagaacggactcaccaaactgttggagacaaatatcctggtggacaagatgaagttggacctatcagcactggaaccagttttgctggcgaagtctgaagacgtggaagcattgatggaaaaactagccgtggaccaagagtcggcagaccaggtaaggaacacagtccaggaggatgaagctaccgctaaggttaaagctgaagagacccaggccatcgcagacgacgcccagcgcgaccttgatgaggccctgcccgccctcgacgccgccaataaagctctggactcactcgataaggctgatatctcggagatccgcgtgtttactaaacctcctgacttggtcatgaccgtcatggaagctatctccatactgttaaacgcgaagcctgactggccctccgcaaagcagctgctgggcgactccaacttcctcaagcgactattggagtacgacaaggagaatattaagccccagattctcgccaagctccagaagtacataaacaaccctgattttgttccagagaaagtagaaaaggtaagtaaagcatgcaagtcaatgtgtatgtgggtgagggcaatggatttatacagccgggttgtgaaggtggtggagcccaaacgccagaagctgcgcgcggcccaggccgaactggacatcaccatggcaactctcagagagaagcaagccttgctgcggcaggtggaagatcagatacaagctcttcaggacgagtatgataagggggtaaacgaaaaggaaagcctggctaagaccatggcattaactaaggcaaggctcgttcgtgcaggcaagctgacggctgcgctggaggacgaacaggttaggtgggaggagtcaattcaaaaatttgaggaagagatctccaatatcactgggaatgtatttatcgcggccgcttgtgtagcctattatggtgcttttactgcccagtaccgacagtccctgatagagtgctggatacaggactgtcagtctttggagatcccaattgatccaagtttctcactgatcaatattttgggcgacccctacgaaattaggcagtggaacactgatggattgccccgggatctgatttctaccgaaaacggcatactggttactcagggccgtcgctggcccctgatgatcgaccctcaagatcaggccaaccggtggatccggaacaaggagtctaaaagcggcctgaaaatcataaaactgacagattccaactttctgagaatcctagagaattcaatacggctggggctgcctgtgctcctcgaagaactaaaagaaacccttgatccagcactggaacccatcttgcttaaacagatttttatcagcggcggccgcctactgattcggctaggcgactccgacatcgactatgacaaaaatttcaggttctacatgactacaaaaatgccaaatccccactatcttcccgaggtctgtataaaggttaccattattaactttactgtcaccaaatcagggttggaagatcaactgctctcggacgtagtccggctcgaaaagcctcgtctggaggagcaaaggatcaagctgatcgtaaggatcaatactgacaagaatcagctgaaaacgatagaagaaaaaatcctgcgcatgctcttcacctcggaaggtaatattctggacaatgaggagctgatcgacacactgcaggattccaaaattaccagcggagcaattaagacgaggctcgaagaggctgagagtactgaacagatgataaacgttgcaagggagaaataccggccagttgcgacccaaggcagtgtgatgtactttgtgatcgcctccttgtctgagatcgatccgatgtaccagtacagtcttaagtactttaaacagctgttcaacaccacaatcgaaacctccgtcaagacagagaatttacagcagcgccttgacgttttgctagagcaaactctgctcaccgcttacgtgaacgttagcagagggctgtttgagcagcacaaattaatatatagctttatgttgtgcgtagaaatgatgcgtcagcaggggaccttgtctgacgcagaatggaatttctttctccgtggatctgccggccttgagaaggaacggccccctaagcccgaggctccatggctacccaccgctacctggttcgcctgttgcgacctcgaggagagctttccagttttccacggtttaacccagaacatcctctctcatcccatttctattagactcggctctttcgaaacttatattaatccacagaaatgggagggttattccaagatgaagcacgaagacaaacacatgcgccaggagaaggaagcagcccaccaggatccctggagcgctggattgagcagcttccacaagctgattctgataaaatgttgcaaagaggaaaaagtcgtatttgctctcactgacttcgtcatcgaaaatttggggaaacagtttatcgaaacccctccagtggacctgccaaccctctaccaagacatgtcttgtaacactcccctcgttttcattctctctactggctctgatcccatgggcgcatttcagcgctttgcaagagaatccggctatagcgagcgagttcagagcatatctttgggccaaggtcaggggccaatcgctgagaagatggttaaagacgccatgaaatccggaaactgggtatttcttcagaattgccatctggccgtgtcctggatgctcgccatggaagagctgatcaagaccttcacagatcccgatagcgcaatcaaggatacatttcgcctgtttctctcctctatgccaagtaacacatttcctgttaccgtactccagaatagcgtgaaggtgactaacgagcctcccaagggtttgagagccaacattagaagggcatttactgaaatgacaccatctttctttgaggagaacattctgggcaaaaaatggaggcagattatattcggcatctgctttttccacgcaattattcaggaacgtaaaaagtttggtccactgggatggaacatttgctatgagtttaatgatagtgacagggagtgtgcattgttaaatctgaagctctactgtaaggaagggaaaattccttgggatgcccttatttatatcacaggagagatcacttatgggggaagagtgactgactcctgggaccaaaggtgtctacgcaccatcctcaaaaggtttttcagccctgagacgcttgaggaggattataaatatagtgaaagcggcatctactttgcgccaatggccgattcgttgcaggaattcaaagattacatcgagaatcttcccttgatcgacgatcccgaaatcttcgggatgcatgaaaatgccaatcttgtgttccagtacaaggaaacctcgactctcatcaatactatcctggaggtgcagcctagatcgtccaccggaggagaggggaaatccaacgacgaaattgtgcaggaactagtggccagcgtgcagactcgcgttcccgaaaaactggagatggaaggagcaagtgagtccttgttcgttaaggacctgcagggtaggctcaactcactaactaccgtcctgggacaggaagtggaccgttttaataatttgttgaaactcatccacaccagtctggagaccctgaacaaagccatcgccggttttgttgtgatgtccgaggagatggaaaaagtctataattctttcctcaacaaccaagtccccgcgctctggtccaatacagcctatccgagcctcaaacccctcggctcctgggtcaaggacctgattctgcgaactagcttcgttgacctgtggctgaaaagaggtcagcccaagagttattggatctccgggttctttttcccacaagggttcctaaccggaactctgcaaaatcacgcccggaaatataatcttcctatcgacgagctctcttttaagtactccgtgatccctacctaccgagaccaggctgccgtgatcgaggcagctaagactgtgcagttcggtcaggagctacctatggatatggagctgcctagcccagaggacggagttttggtccacggaatgtttatggatgcaagccgttgggatgacaaggaaatggtgattgaagacgcactgcccgggcagatgaaccccgttttaccagtggtccacttcgagccacaacaaaattataaaccctcaccaaccctctaccactgccccctttataagactggagctagggccggaaccttgagcactacgggacacagcaccaacttcgtggtgactgtactgctgcccagcaagagatccaaagactattggatagcaaagggatccgctctgctttgtcagttatccgaatag

SEQ ID NO: 117300 - DNA, 12477 bp, Artificial Sequence
  derived and/or modified sequence
atgaccttccgggccacagacagcgagtttgacctgaccaacatcgaggagtatgcagagaacagcgccctgagccggctgaacaacatcaaggccaagcagagggtgtcctatgtgaccagcacagaaaatgaaagtgacacccagatcctgaccttccgccacatcaccaaggcccaggagaagaccaggaagaggcagcagcccatcaagctggagcccctgcctgtgctgaaggtgtaccaggaccacaagcagcctgagtacatccacgagcagaaccgcttccagctgatgacagctggcatcatcaagaggcctgtgtccatcgccaagaagagctttgccaccagcagcacccagttcctggagcaccaggatgctgtgaagaagatgcagatccaccggccctacgtggaggtgttcagccccagcccccccaagctgccccacacaggcatcggcaagaggggcctgtttggcaccaggagcagcgcctaccccaagtacaccttccatgaccgggaggaggtggtgaaggccaacatccgggaccccctgcagatcatcaagatcatcagagaaaatgagcacctgggcttcctgtacatgatcccagctgtgcccaggagcagcattgaatatgacacctacaacctgaaggtggtgtcctatgagaacatcaacaagaatgactactacaccatcagccagagagctgtgacccacatctacaatgaagatattgagttcatcgagattgaccgctgggagcaggagtacctgtaccaccgggagctgaccaagatccccatcttcagcctcttcaggaagtggaaggccttctctgtgtggaggaagaatgtgcgcagcaagaagatcaccggctgccagaagagcctgcagaagaacctcttcatcgtgaacccccacctgcggcctgccctgctgaagatcaatgagctgtgctaccacctgtccttcatgggcctgtgctacatcgagaagtgccacacctacaccctgcaggagttcaaggccgcccaggtgatccggctggccgaggtgacagagcggctgggggagttcagaaatgaggccaagtatgtggtgcggcgggcctgccgctttgccctgcgggccgccggctttgtgcctgatgactgtgccttcggcccctttgaggactaccacaaggtgcagagcagcggcagcttcatcaacacccctcatgagctgcccacctacggggacagcgagaagatgacctacacagagcaggccagcaagaggcactactgcatgaggctgacctgcttcatccggctgaatgactacctgattgagaacaccatgcacatcctgactgtgaatgctgtgaacagcctgctgaaccacctgacagacaagctgaagaggacccccagcgcagatgtgatccagaagtggatcacagaggagaagccagaggtgcctgacaagaagggcaccctgatggtggagaagcaggaggaggatgagagcctcatccccatgttcctgacagagctgatgctgactgtgcagagcctgctgtttgagcccagcctggaggacttcctggatggcatcctgggcgctgtgaaccactgccagaacacagtgctgtctgtgcccaacctggtgcctgacagctactttgatgccttcaccagcccctacatcaacaacaagctggagggcaagacctgtggcaccggccccagcctggccgctgtgtttgaagatgacaagaacttccacaccatcatcagccagatcaaggagaccatccaggccgcctttgagagcgcccgcatctatgctgccacctttgagaagttccagatcttcttcaaggaaaatgaaagcctggacctgcaggccctgaagctgcaggagccagacatcaacttcttcagcgagcagctggagaagtaccacaagcagcacaaggatgctgtggccctgcggcccaccagaaatgtgggcctgctgctgattgacacccggctgctgcgggagaagctgatccccagccccctgcgctgcctggaggtgctgaacttcatgctgccccggcagagcaagaagaaggtggatgccatcatctttgaggcccaggatgctgagtacaagctggagtttgtgcccaccaccaccacagaatatgtgcacagcctgctcttcctggatgagatccaggagcgcatcgagagcctggaggatgagggcaacatcgtgacccagatgtacaagctgatggagcagtaccaggtgcccaccccaccagaagattttgctgtgtttgccaccatgaagcccagcatcgtggccgtgagaaatgccatcgacaagtctgtgggggaccgggagagcagcatcaagcagttctgtgtgcacctgggcagtgacctggaggagctgaacaatgaggtgaatgaggtgaagctgcaggcccaggacccccagatcctggacatctctgctgaccaggacaagatccgcctcatcctgaacaacctgcagagcgtgctggccgacctgcagaagagggccttccagtacaagagctaccagaagaacttcaaggtggaggtgtccaagtttgaggccctggaggaggtgtctgctgagctgaagctgaagcagctgctgtgggacagcttcagcgagtgggacaagctgcagcaggagtggctgaagagcaagtttgactgcctggaccctgaggtgctgaatggccaggtgtccaaatatgccaagtttgtgacccagctggagaagggcctgccccccaacagcgtggtgccccagctgaagtacaaggtggagaagatgaaggagaagctgcccgtcatcatcgacctgaggaaccccaccctgaaggcccggcactgggccgccatcgagcagacagtggatgccaccctggtggatgctgagatccccctgaccctggagcggctgagccagctgcacgtgtttgattttggccaggagatccaggacatcagcggccaggccagcggggaggccgccctggaggccatcctgaagaaggtggaggacagctggaagaccacagaatttgtgatcctgccccaccgggacagcaaggatgtgttcatcctgggcggcacagatgacatccaggtgctgctggatgacagcaccatcaacgtggccaccctggccagcagccgctacctgggccccctgaagaccagggtggatgagtggcagaagcagctggccctcttcaaccagaccctggaggagtggctgacctgccagaggaactggctgtacctggagagcatcttcaatgccccagacatccagaggcagctgcctgctgaggccaagatgttcctgcaggtggacaagtcctggaaggagatcatgaggaaggtgaaccggctgcccaatgccctgcgggccgccacccagcccggcctgctggagaccttccagaacaacaatgccctgctggaccagatccagaagtgcctggaggcctacctggagagcaagagggtcatcttcccccgcttctacttcctgagcaatgatgagctgctggagatcctggcccagaccaggaacccccaggccgtgcagccccacctgaggaaatgttttgacagcatcagcaagctggagtttgccctgatgcctcctgctgagggcaagatccctggcattgatggagagcctgagaaggtgtacaccaatgacatcctggccatgctgagccctgagggggagcgggtgtccctgggcaagggcctgaaggcccggggaaatgtggaggagtggctgggcaaggtggaggaggccatgttcaccagcctgcggcggctgtgcaaggccgccatcgctgactaccagggcaagctgaggacagactgggtggtggccggccaccccagccaggtgatcctgactgtgtcccagatcatgtggtgccgggacctgacagaatgtctggagacagagcacagcaaccacatccaggccctgaagaactttgagaaggtgaactttgagcggctgaatgccctggccgccatcgtgcagggcagcctgcccaagctgcacaggaacatcctgacagccctgatcaccattgatgtgcacgcccgggacatcgtgacagagctggtgcagagcaaggtggagaccgtggagagctttgactggcagaggcagctgcgctactactgggacatcgacctggacaactgtgtggccaggatggccctgagccagtacacctacggctatgagtacctgggcgcctgcccccggctggtgatcacccccctgacagaccgctgctacctgtgcctgatgggcgccctgcagctggacctgggcggggccccagctggccctgctggcaccgggaagacagagaccaccaaggacctggccaaggccctggccatccagtgtgtggtgttcaactgcagtgatggcctggactacaagatgatgggccgcttcttcagcggcctggcccagagcggggcctggtgctgctttgatgagttcaacagaattgatattgaggtgctgtctgtgattgcccagcagctgatcaccatcagaaatgccaaggccgccaagctgagccgcttcatgtttgagggccgggagatcaagctggtgatgacctgtgccgccttcatcaccatgaaccctggctacgccggccgcacagagctgcctgacaacctgaaggccctcttccggccctttgccatgatggtgcccaactatgccctgattgctgaggtgatcctgtacagcgagggctttgagagcagcaagatcctggccaggaagatgacccagatgtacaagctgtgcagcgagcagctgagccagcaggaccactatgactttggcatgagagctgtgaagtctgtgctggtgatggccggcagcctgaagcgggagaacccagacctgaatgaagatgtggtgctgatccgggccctgcaggacagcaacctgcccaagttcctgacagatgatgccctgctcttcagcggcatcatcagtgacctcttccctggggtgcagatccctgagcatgactatggcatcctgcagagcaccatcgtggatgtgatgaaccggcagaacctgcagcctgagatgtgcatggtgaggaaggtgatccagttctatgagaccatgctggtgagacatggagtgatgctggtgggccccactggaggcggcaagaccaccgtgtaccgcatcctggccgagaccctgggcaacctgcagaagctgggcattgaaaattccttctaccaggccgtgaagacctacgtgctgaaccccaagagcatcaccatgggagagctgtatggagaggtgaacaacctgaccctggagtggaaggatggcctgatggccctgtctgtgcgggctgctgtgaatgacaccagcgaggaccacaagtggatcatcagtgatggccctgtggatgccctgtggattgagaacatgaacacagtgctggatgacaacaagatgctgtgcctggccaacagcgagcgcatcaagctgaccccccagatccacatgctgtttgaggtgcaggacctgcgggtggccagccctgccaccgtgagccgctgtggcatggtgtttgtggaccctgaggagctgaagtggatgccctacgtgaagacctggatgaagggcatcagcaagaagctgacagaggagacccaggagtacatcctgaacctcttccagagatatgtggatgagggcctgcacttcatcaacaagaagtgcagccaggccatcccccaggtggacatcagcaaggtgaccaccctgtgctgcctgctggagagcctcatcctgggcaaggatggagtgaacctggccatggagcagaccaagctgaacaccatcctgtgccagacctttgtgttctgctacctgtggagcctgggcggcaacctgacagagaactactatgacagctttgacaccttcatccgcacccagtttgatgacaacccagatgcccggctgcccaacagcggggacctgtggagcatccacatggactttgacaccaagaggctggacccctgggagcgcatcatccccaccttcaagtacaacagagatgtgcccttctttgagatgctggtgcccaccacagacacagtgcgctatggctacctgatggagaagctgctggccgtgaagcacagcgtgctcttcaccggcatcaccggggtgggcaagtctgtgattgccaagggcctgctgaacaagatccaggagagcgctggctacgtgcctgtgtacctgaacttcagcgcccagaccagcagcgcccggacccaggagatcatcgagagcaagctggagaggaagaggaagaacatcctgggcgcccctggcaacaagagaattgtcatctttgtggatgacctgaacatgccccggctggacagatatggcagccagccccccatcgagctgctgcggcagtaccaggactttggaggcttctatgacaggaacaagctgttctggaaggagatccaggatgtgaccatcatcagcgcctgtgcccctcctgggggcggcagaaatcctgtgaccccccgcttcatccgccacttctccatgctgtgcctgcccatgcccagcgagcacagcctgaagcagatcttccaggccatcctgaatggcttcctgagtgacttccccccagctgtgaagcagacagccagcagcatcgtggaggcctctgtggagatctacaacaagatgtctgtggacctgctgcccaccccagccaagagccactacgtgttcaacctgcgggacctgagcaaatgtgtgcagggcatcctgcagtgtgaccccggcaccatccgggaggagatccagatcttccgcctcttctgccacgagtgccagagggtcttccatgacaggctcatcaacaatgaagacaagcactacttccacgtgatcctgacagagatggccaacaagcacttcggcatcgccatcgacctggagtacttcctgaacaagcccatcatctttggagacttcatcaagtttggagctgacaaggctgaccgcatctatgatgacatgccagacatcgagaagacagccaacgtgctgcaggactacctggatgactacaacctgaccaaccccaaggaggtgaagctggtgttcttccaggatgccatcgagcacgtgagccgcatcgccaggatgatccggcaggagagaggaaatgccctgctggtgggcgtgggcggcaccgggaagcagagcctgacccggctggccgcccacatctgtggctacaagtgcctgcagatcgagctgagccggggctacaactatgacagcttccacgaggacctgaggaagctgtacaagatggccggcgtggaggacaagaacatggtgttcctgttcacagacacccagatcgtggtggaggagttcctggaggacatcaacaacatcctgaacagcggggaggtgcccaacctgtttgagaaggatgagctggagcaggtgctggccgccacccggccccgggccaaggaggtgggcatcagcgagggcaacagagatgaggtgttccagtacttcatcagcaaggtgcggcagaagctgcacatcgtgctgtgcatgagccctgtgggggaggccttccgcagccgctgcaggatgttccccagcctggtgaactgctgcaccatcgactggtttgtgcagtggccccgggaggccctgctgtctgtgtccaagaccttcttcagccaggtggatgctggaaatgaggagctgaaggagaagctgcccctgatgtgtgtgaatgtgcacctgtctgtgtcctccatggccgagcgctactacaatgagctgcggcggcgctactacaccacccccaccagctacctggagctgatcaacctgtacctgtccatgctgtctgagaagaggaagcagatcatcagcgcccgggacagagtgaagaatggcctgaccaagctgctggagaccaacatcctggtggacaagatgaagctggacctgagcgccctggagcctgtgctgctggccaagtcagaagatgtggaggccctgatggagaagctggccgtggaccaggagagcgctgaccaggtgaggaacacagtgcaggaggatgaggccacagccaaggtgaaggccgaggagacccaggccatcgcagatgatgcccagagggacctggatgaggccctgcctgccctggatgctgccaacaaggccctggacagcctggacaaggctgacatcagcgagatccgggtcttcaccaagcccccagacctggtgatgacagtgatggaggccatcagcatcctgctgaatgccaagccagactggcccagcgccaagcagctgctgggggacagcaacttcctgaagaggctgctggagtatgacaaggagaacatcaagccccagatcctggccaagctgcagaagtacatcaacaacccagactttgtgcctgagaaggtggagaaggtgtccaaggcctgcaagtccatgtgcatgtgggtgcgggccatggacctgtacagccgggtggtgaaggtggtggagcccaagaggcagaagctgcgggccgcccaggccgagctggacatcaccatggccaccctgcgggagaagcaggccctgctgcggcaggtggaggaccagatccaggccctgcaggatgaatatgacaagggcgtgaatgagaaggagagcctggccaagaccatggccctgaccaaggcccggctggtgcgggccggcaagctgacagctgccctggaggatgagcaggtgcgctgggaggagagcatccagaagtttgaggaggagatcagcaacatcactggaaatgtgttcatcgccgccgcctgtgtggcctactacggggccttcaccgcccagtaccggcagagcctgattgagtgctggatccaggactgccagagcctggagatccccatcgaccccagcttcagcctcatcaacatcctgggggacccctatgagatccggcagtggaacacagatggcctgccccgggacctgatcagcacagaaaatggcatcctggtgacccagggccgccgctggcccctgatgattgacccccaggaccaggccaaccgctggatccggaacaaggagagcaagagcggcctgaagatcatcaagctgacagacagcaacttcctgcgcatcctggagaacagcatccggctgggcctgcctgtgctgctggaggagctgaaggagaccctggaccctgccctggagcccatcctgctgaagcagatcttcatcagcggcggccgcctgctgatccggctgggggacagcgacattgattatgacaagaacttccgcttctacatgaccaccaagatgcccaacccccactacctgcctgaggtgtgcatcaaggtgaccatcatcaacttcaccgtgaccaagagcggcctggaggaccagctgctgagtgatgtggtgcggctggagaagccccggctggaggagcagaggatcaagctgattgtgcgcatcaacacagacaagaaccagctgaagaccatcgaggagaagatcctgaggatgctgttcaccagcgagggcaacatcctggacaatgaggagctgattgacaccctgcaggacagcaagatcaccagcggggccatcaagacccggctggaggaggccgagagcacagagcagatgatcaacgtggcccgggagaagtacagacctgtggccacccagggctctgtgatgtactttgtgattgccagcctgtctgaaattgaccccatgtaccagtacagcctgaagtacttcaagcagctgttcaacaccaccatcgagacctctgtgaagacagagaacctgcagcagaggctggatgtgctgctggagcagaccctgctgacagcctacgtgaatgtgtcccggggcctgtttgagcagcacaagctgatctacagcttcatgctgtgtgtggagatgatgaggcagcagggcaccctgagtgatgctgagtggaacttcttcctgcggggcagcgctggcctggagaaggagaggcctcccaagccagaggccccctggctgcccacagccacctggtttgcctgctgtgacctggaggagagcttccctgtgttccacggcctgacccagaacatcctgagccaccccatcagcatccggctgggcagctttgagacctacatcaacccccagaagtgggagggctacagcaagatgaagcatgaggacaagcacatgaggcaggagaaggaggccgcccaccaggacccctggagcgctggcctgagcagcttccacaagctgatcctgatcaagtgctgcaaggaggagaaggtggtgtttgccctgacagactttgtgattgagaacctgggcaagcagttcatcgagaccccacctgtggacctgcccaccctgtaccaggacatgagctgcaacacccccctggtgttcatcctgagcacaggcagtgaccccatgggcgccttccagagatttgcccgggagagcggctacagcgagcgggtgcagagcatcagcctgggccagggccagggccccatcgccgagaagatggtgaaggatgccatgaagagcggcaactgggtgttcctgcagaactgccacctggccgtgtcctggatgctggccatggaggagctgatcaagaccttcacagatcctgattctgccatcaaggacaccttccgcctcttcctgagctccatgcccagcaacaccttccctgtgacagtgctgcagaacagcgtgaaggtgaccaatgagccccccaagggcctgcgggccaacatcagaagagccttcacagagatgacccccagcttctttgaggagaacatcctgggcaagaagtggaggcagatcatcttcggcatctgcttcttccacgccatcatccaggagaggaagaagtttggccccctgggctggaacatctgctatgagttcaatgacagcgaccgggagtgtgccctgctgaacctgaagctgtactgcaaggagggcaagatcccctgggatgccctgatctacatcaccggggagatcacctatggaggccgggtgacagacagctgggaccagcgctgcctgcggaccatcctgaagcgcttcttcagccctgagaccctggaggaggactacaagtacagcgagagcggcatctactttgcccccatggctgacagcctgcaggagttcaaggactacatcgagaacctgcccctgattgatgatcctgagatcttcggcatgcatgaaaatgccaacctggtgttccagtacaaggagaccagcaccctcatcaacaccatcctggaggtgcagcccaggagcagcactggaggagagggcaagagcaatgatgaaattgtgcaggagctggtggcctctgtgcagaccagggtgcctgagaagctggagatggagggcgccagcgagagcctgtttgtgaaggacctgcagggccgcctgaacagcctgaccaccgtgctgggccaggaggtggaccgcttcaacaacctgctgaagctgatccacaccagcctggagaccctgaacaaggccatcgccggctttgtggtgatgtctgaggagatggagaaggtgtacaacagcttcctgaacaaccaggtgcctgccctgtggagcaacacagcctaccccagcctgaagcccctgggctcctgggtgaaggacctgatcctgcggaccagctttgtggacctgtggctgaagaggggccagcccaagagctactggatcagcggcttcttcttcccccagggcttcctgaccggcaccctgcagaaccacgccaggaagtacaacctgcccattgatgagctgtccttcaagtacagcgtcatccccacctacagagaccaggccgctgtgattgaagctgccaagacagtgcagtttggccaggagctgcccatggacatggagctgcccagcccagaagatggagtgctggtgcacggcatgttcatggatgccagccgctgggatgacaaggagatggtgattgaagatgccctgcccggccagatgaaccctgtgctgcctgtggtgcactttgagccccagcagaactacaagcccagccccaccctgtaccactgccccctgtacaagacaggagcccgggccggcaccctgagcaccaccggccacagcaccaactttgtggtgacagtgctgctgcccagcaagaggagcaaggactactggatcgccaagggcagcgccctgctgtgccagctgtctgagtag

SEQ ID NO: 117301 - DNA, 12477 bp, Artificial Sequence
  derived and/or modified sequence
atgaccttccgggccaccgacagcgagttcgacctgaccaacatcgaagagtacgcagaaaattcagcacttagtcggctgaataacatcaaggctaaacagagggttagttatgtcacctcaactgaaaatgagtcagacactcagatactgacctttagacacattaccaaagcccaggaaaaaacccgtaagcgtcaacagccaataaaactggaaccgctccccgtgctgaaggtgtatcaggaccataagcagcctgagtatatacatgagcagaatcgtttccagcttatgactgccgggattattaaaaggcctgtgagcatcgctaaaaagtcatttgccacttcctctacgcagttcctggaacaccaggatgcggtgaaaaaaatgcagattcacaggccgtacgttgaagtattctccccatcaccaccgaaattgccacacacgggcatcggaaagcgaggccttttcggtacccgcagcagcgcctacccgaagtacacctttcacgacagggaggaagtagtcaaagcgaatatcagggatccactgcagattatcaagataatcagagagaacgaacaccttggctttctttacatgatcccagccgtgccccgtagctcaatcgaatatgatacctataatctgaaggtggtgtcttacgagaacattaacaaaaacgactattatacaatctctcagcgcgcagtcacccacatctacaacgaggatatcgaattcatcgaaatcgatcgatgggaacaggaatatctgtaccatagggaattaacaaaaattccaattttcagtctgttcagaaagtggaaggcattttccgtatggaggaaaaatgtacggagcaagaagatcacaggatgtcaaaaatctctacaaaagaatctttttatcgtcaatcctcacctccggccagcactgctgaagatcaatgaattgtgttaccacctgtcgtttatggggctgtgctacattgagaagtgccacacctatacacttcaagaattcaaagcggcccaggtgatccggctagccgaggtcaccgagcggcttggggagttcaggaatgaagctaaatacgtggtgagaagggcctgtaggttcgccttacgcgcagccgggttcgtccccgacgattgcgcatttggtccttttgaggactaccataaggtccagtcatccggaagtttcataaacaccccccacgagcttcccacctatggagatagcgaaaagatgacctacacagaacaggcgagcaagcggcactactgtatgcgactgacatgttttatccgtttaaatgattacctgatcgagaataccatgcatatcctgacagttaatgcagttaattctttactgaaccacttgacagacaagttgaaacgaacacctagtgctgacgtcatccagaaatggatcactgaagagaaacctgaagtgcctgacaagaaaggcacattgatggtcgagaagcaggaagaagatgagtctttaatccccatgtttcttacggagttgatgctgaccgtccagtccctactgttcgagccgtcgctggaagacttcttggatggcattttaggtgcagttaaccattgccaaaacaccgtgctgtctgtcccaaaccttgtgcctgactcctacttcgacgcattcacctcaccatacatcaacaataagctggaagggaagacgtgtggcaccggaccatccttagcagctgtgttcgaagacgacaaaaatttccacacgatcatctctcagatcaaagaaaccatccaagccgcatttgaatccgccagaatctacgcagcaacattcgagaagtttcagatcttctttaaagaaaacgaatccttggacctccaggcgctgaaactgcaggagccagacatcaactttttctccgaacagctggaaaaatatcataagcagcacaaggatgcggtggcgctccgacccacgagaaacgttggccttctcttgatcgatacccgactcctgcgcgagaaactcattccctcccccctccgatgtctcgaggtcctgaattttatgcttccgaggcagagcaaaaagaaggtggacgctattatctttgaggcacaggacgctgagtataaattagagtttgtgccaacaacaaccacggaatacgtacattctctgctgttcctggacgagattcaagagaggattgagtccttggaagatgagggtaatattgtcacccagatgtataaactgatggagcagtaccaggtccccacaccccccgaagatttcgctgtgtttgccacaatgaaaccctccattgtggcagtccggaacgccattgacaagtccgtaggcgatagagaatcttctattaagcagttttgcgttcatctgggttctgacctggaagagctaaataatgaggtcaacgaggttaagctgcaggcgcaggacccacagatcctggacatatccgccgaccaagataagattcgcctgattctgaataatctgcagtccgtgctggctgacttgcaaaaacgcgcatttcagtacaaaagctaccagaagaattttaaggttgaggtgagcaaattcgaagcgttggaggaagtgtcggcagaacttaaattgaaacaactgctctgggattcattttccgagtgggataagctccaacaggagtggctgaagtcaaagttcgactgcctagacccagaggttcttaatgggcaggtgagcaaatacgccaaatttgtgacccagttggagaaggggctgcctccaaacagcgtcgtcccccagttaaagtataaagttgagaagatgaaggagaagttgcccgtaattatagacctgcggaacccaactttgaaggctcgacattgggccgctattgagcaaactgtagatgctacactggtggatgcagagatcccactcactctggaacgtctaagccagctccacgtcttcgatttcggtcaggagattcaggatatctcaggtcaggcctcaggcgaggccgcactggaggccatattaaagaaggttgaggacagctggaagacaacagagttcgtgatattacctcatcgcgattccaaggacgtgttcatcctggggggaaccgatgacatccaggtgctgttggatgacagtaccattaatgtagctacactcgcatcctcacgctatctggggcccctcaagacccgggtagacgagtggcagaagcagctcgctctatttaatcagaccctcgaggagtggctgacctgtcagcgcaattggctatatctcgagtctatattcaatgcgcctgacattcaaaggcagctgcccgccgaggcgaagatgtttctccaagttgacaaatcctggaaggagattatgaggaaagttaaccgtctgcctaatgcattacgcgccgccacgcagccgggtctgctggaaacctttcaaaataataacgccctgttggatcagatacagaaatgtttagaagcatacctggagtctaagcgtgttatctttcctagattttattttctgtccaatgacgaactgctggaaatattagctcagactagaaacccacaggccgtgcagccccatctccgaaaatgttttgattctatttctaagttggagtttgccttgatgcctcccgcggagggaaaaatcccaggaatagatggcgagcccgaaaaggtttacaccaatgatattctggctatgctcagccccgagggcgagcgggtctctctgggcaaaggcctgaaggcccgaggaaatgtagaagaatggctggggaaggtggaggaggctatgtttacttccctccgtcggttatgcaaagccgctatagctgattaccagggcaaactgagaactgattgggttgtcgctggtcatccatctcaagtgatcctcacggtatcccagattatgtggtgcagagatctgactgagtgcttggagactgaacactccaaccatattcaagcactgaagaacttcgagaaggtaaactttgaacggctgaacgctcttgctgccatcgtgcagggatcgctcccaaaattacataggaacatattaactgccttgataactatcgacgtgcatgcaagagatattgtcacagaacttgtccagtcaaaggttgaaactgtggaatcttttgattggcagcggcagttgcgatattattgggatatcgatttagataattgtgtcgcccgtatggcgctgagccagtatacttatggatatgaataccttggagcatgccccaggcttgtcatcacccctctgactgaccgctgttacttgtgtttgatgggcgctctccagctcgatctgggcggcgctcctgcaggccctgccggaacaggtaaaaccgaaactaccaaagacctggccaaggccttggcaatccaatgcgtagtctttaactgcagtgatggactcgactacaagatgatgggtagatttttttcaggactagctcagtccggagcatggtgctgcttcgacgaattcaacaggattgacatagaagtgctttccgtaatcgctcaacagctcataacaatccggaatgccaaggcggctaagctcagtagattcatgttcgaaggacgagaaattaagttggtcatgacatgcgcagcctttatcactatgaacccaggctatgcggggaggacagaactgccagacaacttaaaggcattattccggccttttgctatgatggtgccaaattacgctttgatagccgaggtaatactgtacagcgaaggcttcgagtctagcaagatcctggcacgaaaaatgactcagatgtacaagctttgtagcgaacagctgagtcagcaagatcactatgatttcggtatgcgggcagttaaaagcgtgttggtcatggccggtagcttgaagagagagaatcctgatctcaatgaggatgttgttctgattagggccttacaggattcaaacctaccaaagttcctcaccgatgacgcgttactgttcagcggtattatcagtgacctgtttcccggggtccaaatccctgaacacgactatggcatccttcagtctacaatcgtggatgtgatgaatcgccagaacttgcagcccgagatgtgtatggtgcggaaggtgatccagttctatgagacaatgctggtgagacacggtgtcatgctagtcggccctacgggcggcggcaagacgactgtgtaccgcatcctggcagagacactcggaaatttacagaaactcgggatagaaaactcattctaccaggcagtgaagacatacgtccttaatccaaagagcattaccatgggggagctgtacggcgaagtgaacaatctgacacttgagtggaaggacgggctaatggcgctctctgttcgggcagctgtcaatgatacctccgaggatcacaaatggattatcagcgatgggcctgtggatgctttgtggatcgagaatatgaatactgtgctggacgacaacaagatgctgtgcctggctaatagtgaacgcataaaactgaccccacagatccacatgctgttcgaagtacaggatttaagagtagcttctcccgctaccgtatctaggtgtggcatggtcttcgtcgatcccgaagaactgaaatggatgccatacgtcaagacttggatgaaggggatcagcaaaaagttgacagaggagactcaggaatatatactcaatcttttccagagatacgtggacgagggcctgcactttattaacaagaaatgttctcaggccattcctcaagtcgatatttctaaagtcacaacgctctgttgcctgttagaaagccttatactcggaaaggacggagtgaacctcgccatggaacagaccaaactgaacactatattgtgtcagacatttgtgttctgctatctgtggagcctaggagggaatctgacagagaactactacgatagctttgatacattcattcgaacacagtttgatgacaatccagatgcaaggctgcctaattccggggacctatggagcatccacatggacttcgatacaaagcgacttgatccgtgggagcgcatcattccgactttcaaatacaaccgtgatgtgcctttcttcgagatgctggtgccgactactgacaccgtccggtacggctacttgatggagaagctgctagcagtgaagcacagcgttctttttactgggattaccggggttggcaaatctgtgatagccaagggcctgctaaacaagattcaagagagcgcagggtacgtccccgtgtaccttaatttcagcgcacagacgtcctctgccagaacacaagagataatcgaatctaagttggagcgaaaaaggaaaaacatcctgggagcgcccggtaacaagagaatcgtcatattcgttgacgacctcaatatgccccgattggaccgctatggatcacagcctccaatcgagctgcttcgacaataccaagactttggagggttctacgaccgcaataaactgttctggaaggagatccaggatgtgactataatcagtgcctgcgcacctcccgggggcggcaggaaccctgttacccccaggttcataagacacttctctatgctctgtctgcccatgccatccgagcattccttgaaacagatcttccaggctatcctcaacgggttcctgagtgatttccctccggctgtcaagcaaacagcgagttctattgttgaagcaagcgttgagatctacaataaaatgagcgtggacctgttgcctactcccgctaagagccactacgtgttcaacctccgagacctgagcaagtgcgtccagggcatcctccagtgcgaccctggcactattcgcgaagagatccagatattccggcttttttgtcacgagtgtcagcgagtcttccacgacagacttattaataacgaggacaaacattactttcacgtgatacttaccgaaatggccaataagcatttcgggatcgcaatcgacctagagtacttcctgaacaagcctattatcttcggcgattttatcaagttcggggcagacaaagcagacaggatatacgatgatatgccggatattgaaaaaacagcgaatgttttgcaggactacctggatgattataatctgactaatccaaaggaggtaaagctcgtgttcttccaggacgccatagagcacgtttcaagaatcgctagaatgatcaggcaggagaggggcaacgcactgctcgtcggagtcggaggcaccggcaaacagtcactgacccgacttgctgctcacatctgcgggtacaaatgcctccagatcgagttgtcccggggctacaattacgattcctttcacgaagacctgaggaagttatataagatggctggcgttgaggacaaaaatatggtctttctatttacagatacgcagatcgtagttgaagaattcttagaggacatcaataacattctaaattctggagaggtaccaaacctattcgagaaagacgaacttgagcaagtgctggccgcaacccgccctcgtgccaaggaggtaggcatctcagaaggcaacagggacgaagtttttcagtatttcatttcaaaagtcagacaaaagctgcatatcgtcctgtgcatgtccccagtgggtgaggccttcaggtccaggtgtaggatgtttcctagcttagtgaattgttgcaccatagattggttcgtgcagtggcctagagaagcactactgtccgttagtaagacttttttcagtcaggtcgacgccggcaatgaagagcttaaagaaaagctgccattaatgtgcgtgaacgtacatctgagcgtgtcttctatggccgagagatactataatgagctcaggagacgttactataccacacccacaagctaccttgagctgattaacctgtatctctccatgttatccgagaaaaggaagcaaataatctctgcccgagatagagtgaaaaacggcctcacaaagctgctcgagaccaatatcctggtggataagatgaagctggatctgtcagcactcgagcctgtgctgctagctaagtccgaggatgtggaggcactgatggagaagcttgctgtcgaccaagaatccgctgatcaagtccgcaacaccgtgcaggaagatgaggctaccgcgaaggtaaaagctgaagagacccaagcgatagccgacgacgcgcagcgcgatctcgacgaggctttgcctgccctggacgctgccaacaaagcgctggatagccttgacaaggcagacatatcggaaattcgcgtattcactaagccaccagacctggtgatgactgttatggaggctatctccatcctactgaatgctaagcctgattggccatccgcaaagcagctgctgggcgattcaaacttcttaaagcgcctgcttgaatacgacaaggaaaacatcaaaccccagattctggctaagcttcagaaatatattaacaaccctgattttgtcccggagaaggtggaaaaggtctctaaagcttgtaagagcatgtgcatgtgggtcagggccatggatctgtactctcgcgtcgttaaggttgtcgagcccaaacggcagaagcttcgtgcagcgcaggcggaactcgacattaccatggccacgttacgtgaaaaacaggctctgctgcggcaggtagaggaccagatccaggctctccaagatgagtacgataagggtgtaaatgagaaggagagcctcgccaaaactatggccctgaccaaagcacgattggtgcgcgctggtaagctaaccgcggcactggaagatgaacaagtgagatgggaggaatccattcagaagtttgaggaggagatctccaacatcaccggaaatgtgttcattgctgcagcctgtgttgcctattatggtgctttcactgctcagtatcgccaatctcttatcgaatgttggattcaggattgtcagagtctagagatacctattgatcctagtttcagcttgattaatatcctgggcgacccttacgaaatcagacagtggaacaccgacggcctgccaagggatctgatttcaaccgaaaacggcatactcgtcacccaggggaggcggtggccgctgatgattgatccgcaggatcaggccaatcggtggataaggaacaaagaatccaaatctggcttgaagatcattaaattgaccgacagtaatttcctgcggatcttggagaactccatcaggttgggccttccggtcttgcttgaggagttgaaagaaactttggaccccgccttggagcctattcttctgaaacaaatctttatatcaggaggaagacttttgattcgactgggcgattccgatatcgattacgataagaactttcgattctacatgacaacgaaaatgcccaacccacattatctgcccgaagtctgcattaaggttacaatcatcaacttcaccgtcacaaagtcagggctagaggatcagctgttgtcggatgtggtgcgccttgaaaaaccccgtctagaggaacagcgtatcaagctaattgtccgcatcaatactgataagaatcaactcaagacgatcgaagaaaagatactgcgaatgctgttcacgagcgaagggaatatccttgacaatgaggaactgattgacacgctgcaagactcgaagataacaagcggggcgattaaaactcggctagaagaggctgaatctaccgagcagatgattaatgtggccagggagaaataccggcctgtagccacgcagggatccgtcatgtatttcgtgatcgcaagcctctccgaaatcgacccaatgtaccagtacagtctgaagtacttcaagcagctgtttaatacaaccatagaaacatccgtgaaaactgagaatctgcaacagaggttggacgttcttctggagcagacgctgctcaccgcatatgtcaacgtctctagagggctcttcgagcagcataagcttatatacagcttcatgctgtgcgtagaaatgatgcgccagcaggggactctatcggacgctgaatggaatttctttctcaggggcagcgccggcctggagaaagagaggccaccaaagccagaagcaccttggctgcccactgccacctggttcgcgtgctgcgaccttgaggagagcttcccagtattccatgggttaacacaaaacattctgtcgcatcccataagcatccggttgggctctttcgagacttacattaacccacagaaatgggagggttattcaaagatgaagcacgaggataagcatatgcgacaggagaaagaggccgcccatcaggacccgtggagcgcaggactgtcatcctttcacaaactgatcctgattaagtgttgtaaggaagaaaaagtcgtgtttgccctcactgactttgtcattgaaaatctaggcaaacaattcattgagacgccacctgtcgacctgcccacattgtaccaagacatgtcctgtaatacaccactagtgttcattttatctacaggatccgatccaatgggagcgttccaacggttcgctagagagtccggatacagcgaaagggtacagagtatctctctgggccagggacagggaccaatcgcagaaaagatggtgaaagatgctatgaagtcgggcaattgggtgtttctgcaaaattgtcatctggccgtgagctggatgctcgcaatggaggagctcatcaaaactttcactgacccggattctgccatcaaggatacattccggctgtttttgagctctatgccttctaatacttttccagtgacagtgctacagaacagtgtcaaagtgaccaatgaaccgcctaagggactgcgtgcaaacatccgacgtgcttttaccgagatgacaccatcttttttcgaggaaaatatcttgggtaagaagtggcggcagatcattttcggcatttgctttttccatgctattattcaagagagaaaaaaatttggacccctaggttggaatatctgttatgagtttaacgacagtgatagagagtgcgccttgctgaatctgaagctctattgtaaagaaggaaagataccatgggacgcactaatttatattaccggcgaaattacttatgggggcagagtcaccgacagttgggaccagcggtgtctgaggactattctcaagaggttcttctcccctgagacccttgaggaagactacaagtattcagagtcaggcatttattttgcccccatggcggactctctgcaggagtttaaggattacatcgaaaacctgcccctgattgacgaccctgagattttcgggatgcacgaaaacgcgaacctggtctttcagtataaagaaaccagcacgctgatcaacaccatacttgaggtgcagcccaggtccagtactgggggagagggtaagtccaatgacgaaatagtgcaggagttggtggccagcgtccagacacgagtccccgaaaagctcgagatggagggagcaagcgaaagccttttcgtcaaagacctgcagggtagattaaactcactgacaacagtactcggccaagaagtggaccgattcaataaccttctcaaactcatacacacttctctggagaccctgaataaggccatcgcaggctttgtagtaatgagcgaagaaatggaaaaggtgtataactctttcctaaataatcaggtacccgccctgtggagcaacaccgcatatcccagcttaaagcctctggggtcttgggtaaaggacctcatacttcggacatcctttgtggatctgtggctcaaaagaggacagccgaagagctactggatttctggatttttcttcccacagggatttctgaccggcacgcttcagaaccacgcgcgtaagtacaacctgcccattgatgagctgagcttcaaatacagtgtgatcccaacctatcgagatcaggctgctgtgatcgaggccgcaaaaacagtgcagtttggccaggagctgcctatggatatggagttgccaagccctgaagacggggtgctagtgcatgggatgttcatggatgcgagcagatgggacgataaggagatggtcattgaggatgccttgccaggtcagatgaaccccgtgctgcctgtggtgcatttcgagccacagcaaaactacaaaccgtcccctacgctataccactgtcccttgtataaaacaggagctagagcaggaactctcagcacaacgggacactctaccaactttgtggtgactgttctgctcccttctaaaagatctaaggactattggattgccaaggggagcgcattgctatgtcaactcagcgagtag

SEQ ID NO: 117302 - DNA, 12477 bp, Artificial Sequence
  derived and/or modified sequence
atgaccttccgggccaccgacagcgagttcgacctgaccaacatcgaagagtacgcagagaacagcgcattgagcaggctgaataatattaaggccaaacagcgggtctcttatgtaaccagtactgaaaacgagagcgacactcagatccttactttcagacacatcacaaaggctcaggaaaaaacacgaaagcgacagcagcccatcaaactcgagcctctccccgtcttgaaggtttatcaagaccataaacaacctgagtatattcatgagcagaatcggtttcagctgatgactgccggtatcattaagcgcccagtcagcatcgccaaaaagagctttgccacctcttccacacagttcctggagcaccaggatgctgtgaagaaaatgcagatccatcgcccctacgttgaggtcttcagtcccagccctccaaagttgcctcatacaggtataggaaagcggggcctttttggcaccaggtcgtctgcctatcctaagtataccttccatgaccgcgaggaagtcgtgaaggctaatatccgagatccactgcagatcattaaaattattcgtgagaacgaacacctgggattcctctatatgataccagctgtgcctcgatcaagcatcgagtacgatacgtataacctgaaggtggtgtcctatgagaacattaataagaacgattattacacaattagtcaaagggcggtaacccatatttacaatgaggacattgaattcatcgaaatcgaccgatgggaacaggaatacctgtatcatagagagctgactaagatccccatcttctccctgtttcgcaagtggaaagccttttcagtctggcggaagaacgtgagaagtaaaaagatcaccgggtgtcagaagtccctgcagaagaatttattcatcgttaatccccatttgcgtcccgcccttctgaagatcaatgaactgtgctaccatctctcttttatggggctctgctatatcgagaagtgccatacatacacacttcaggagttcaaggccgcacaagtgattcggcttgccgaagtgacagaaagactgggggagttccgaaatgaagccaagtacgtggttcggcgcgcttgcaggtttgcactgagggccgccggctttgtgccggacgactgcgcattcgggccattcgaggactaccacaaggttcagagcagcggatcctttatcaataccccccacgagttgcccacttatggcgactctgagaagatgacttacactgagcaggccagtaaaagacactattgtatgcgcctgacatgcttcattaggctgaacgattaccttattgaaaacactatgcacatcctgaccgttaatgcagtgaactctctgctgaaccacttgacggacaagctcaaaaggaccccatcggccgatgttatccagaagtggattaccgaagagaaacctgaggtgcctgacaagaagggtactctgatggtggagaaacaagaggaggacgaaagcctgatccccatgttcctgacggagctcatgcttacagttcagagtctgctcttcgaaccctcgctggaggacttcctggacgggatactgggcgccgtgaaccattgccagaacactgtcctcagtgttcctaaccttgtgccagattcctacttcgacgcctttacgtcaccttatatcaataacaagctagagggaaaaacctgcggaacaggcccctcgttggcagcagtgttcgaggacgataagaacttccatacaatcatatcacagattaaagagacaatacaggcagcgtttgagagcgcaaggatatacgccgcgacttttgaaaagtttcagatcttctttaaggagaatgagtctctggacttgcaggccctaaaactccaggaaccagacatcaacttcttttctgaacagctcgagaagtaccacaaacagcataaagatgcagtcgccctgcgaccaaccaggaacgtaggcctgctccttatcgatacacgcttgcttcgcgagaagctgatcccaagcccactgaggtgtctcgaggtcctaaactttatgcttcctaggcagtctaaaaagaaagtggatgccattatctttgaggcccaggacgcagagtataagctagagttcgtcccaacaaccaccacggaatacgtgcacagcctgctgtttctggacgaaattcaggaaaggattgaatcccttgaagacgaaggcaatatcgtcacccagatgtataagctgatggaacagtaccaagtgccgacgccccccgaagattttgccgtgtttgccacaatgaaaccttccatcgtggcagtgagaaacgcaatcgataagtccgtcggagacagggaatcttctataaagcagttttgcgttcacctaggatcagacctggaggaactgaataatgaggtcaatgaagtgaagctgcaggcccaggacccccagatccttgatatcagtgcagaccaggataaaatccgcttgatattgaacaatctgcagtctgtcttggctgatctgcagaagagggctttccagtacaaaagctaccaaaagaatttcaaagtggaggtgagtaaattcgaagccctggaggaggtttctgcggagctgaaacttaaacaactcctctgggattcctttagcgagtgggacaaactgcagcaagagtggctgaaatctaaattcgactgcctcgaccccgaagtactgaatggccaggttagcaagtacgccaagtttgtcactcagctggaaaagggattgccgcctaactctgtcgtgccccaactgaaatataaggttgaaaaaatgaaagagaagctccccgttatcatcgacttgcgaaatccaacactgaaggcccgccactgggccgccatagagcagacagtggacgctaccctggtggacgctgagattccactgacactggaaagattgagccagctgcatgtgtttgattttggtcaggaaattcaagatatatctggccaagcctctggggaagcagcattggaggccattctgaaaaaggtggaggatagttggaagactactgagtttgtgatcctgcctcacagggacagtaaggatgtgttcatcctcggtggtacagacgatatacaagttctgcttgacgactctaccattaatgtggcaacacttgcctcctctcggtacctgggccctctgaagaccagagtcgatgaatggcagaagcaactagctctgtttaatcagacacttgaggagtggctgacttgtcagagaaattggctttacctggaatcaatattcaatgctcccgacatccagcgtcagctccctgccgaggccaagatgttcctgcaggttgataaaagctggaaagaaataatgcggaaggttaatcggctgccgaacgccctgcgagcagctacacagcctgggcttctcgagactttccagaacaataacgcgctgttggatcagatccagaaatgtctagaggcctatctcgagtctaagagagtaatattcccgcgtttctactttctctccaatgatgagttgctcgaaatcctggctcagacaagaaatcctcaggcggttcaacctcatctgcgcaaatgcttcgattctatatcaaaactggagtttgcattgatgcccccagcagaggggaagattcctggaatcgacggggagcccgaaaaagtgtacacgaatgacattttagccatgttatcccctgagggagaacgcgtgtcactgggaaagggactgaaggctcgtggaaacgttgaggagtggctgggaaaggtggaagaagccatgttcacttctctgcggaggctttgtaaagccgccatcgctgactaccagggcaagttgaggactgactgggtggtggcgggtcatccctctcaggtgatattgacagtttctcagattatgtggtgcagagacttgaccgaatgtctggagaccgaacatagcaaccacattcaggcccttaaaaactttgagaaggtgaatttcgaacgactgaacgcactagctgcaatcgttcagggcagcctgccaaagctccatagaaacatcctgaccgccctcattactattgatgtgcatgcaagggacattgtgactgagctggtgcagtctaaggtggagaccgtcgagtccttcgattggcagcgacagctcagatactattgggatatcgacctcgacaactgtgttgcaaggatggccttgtctcagtatacctacggctatgagtatctgggggcgtgcccacgcctcgtgatcacccctctgaccgacagatgctacctgtgtctgatgggtgcactccaactcgacctggggggtgcacctgctggccctgcagggacagggaagactgaaacaaccaaggacttggcaaaggcgttagccattcagtgtgtcgtctttaattgttccgacgggcttgattacaagatgatgggtcgattctttagcggtctggcccagtcaggggcttggtgctgttttgacgagtttaatcggatcgacatcgaggtcctgagtgtgatcgcccagcagctgataaccatccgcaacgcgaaggccgctaagctctccagattcatgttcgagggccgagagatcaagctggtgatgacgtgtgcagcattcataactatgaaccctggttacgccgggagaaccgagctgccggataatctcaaagcgctgtttaggccgtttgccatgatggtacctaattacgccctgattgcagaagtgattctgtatagcgagggattcgagtcaagcaagatattggcacgcaaaatgactcagatgtataagctgtgcagcgaacaactgagccagcaggaccactacgattttggaatgagagctgtcaaatcagttctggtcatggcgggatcactgaagcgtgagaacccagacttaaacgaggacgtggttctcatcagggctttacaagactctaatctccctaagtttttgacggatgatgccctgttgttttcaggaataatctccgacctgttccccggcgttcagatacctgagcacgactacggaattctacaatcaaccattgtggatgtgatgaacaggcagaatttgcagcccgagatgtgcatggtccggaaagtgatccaattttatgaaactatgctggtgcgccatggcgttatgctggtgggacccacaggcggcggcaagacaacagtgtacaggattctggcagagacgctggggaacctgcagaaactcggaatcgaaaatagtttctaccaagccgtaaagacttacgtgctgaacccaaagagcattaccatgggagaactatacggcgaagtgaataaccttaccctggagtggaaagacggcctgatggcactgagcgttagagcagccgtgaacgacacatccgaggatcataagtggattatctccgacggtccagtggatgccctttggattgaaaacatgaataccgtgcttgacgacaataaaatgctgtgccttgctaactcagaacgcatcaagctcacgccccagatccatatgctgttcgaggtacaggatcttcgtgttgcgtcccctgcaaccgtatcccgttgtggaatggtgttcgttgatccggaggaactgaagtggatgccatacgtgaaaacatggatgaagggaatcagcaagaaactgactgaggagacacaggaatatattttaaacctcttccagagatacgtggacgaaggattacattttattaacaaaaagtgtagtcaggcgatccctcaggtggatatatccaaagtgacaaccctttgctgcctcctcgaatccttaatcttgggaaaagacggtgtcaacctggcaatggaacaaacaaaactcaatacgattctgtgtcagacttttgtattctgttacttgtggagtctcgggggaaacctgacagagaactactacgacagcttcgatacttttattcgcactcagtttgatgataaccccgacgcgaggctcccgaattccggagacctgtggagcatccacatggactttgacacgaaacgcttagatccctgggagaggatcattccgaccttcaagtacaaccgggacgttcccttttttgaaatgctcgtgcccactacagatactgtcaggtatggatatttgatggagaaattgctagctgtgaagcacagtgtactattcacaggcatcaccggcgtcggcaaatcagtgattgcaaaagggttgctcaacaaaatccaagaatcagccggatacgtgcctgtttacctgaattttagcgcccaaacctcatccgccaggacccaggaaataatagaatccaagctcgaaagaaaacggaagaatattttgggcgctccgggcaacaaacggattgttatctttgtagacgacctgaacatgccgcgcctggaccggtatgggtcccagccacctattgagctgctgcggcagtaccaagacttcggtggattctacgatcgaaataaactcttttggaaggaaatacaagacgtgaccattatctctgcatgcgcccctcccggaggcggccgaaatccggtgaccccacgattcattaggcatttcagtatgctatgtctcccgatgccttccgagcactctttaaaacagatattccaggccattcttaacgggtttctctcggactttccccctgcagtcaaacagaccgcttccagcattgtggaagcgtccgttgagatttacaataagatgtccgtggacttacttcccacccccgccaaatctcactatgtgttcaacctccgcgatcttagcaaatgtgtacaaggcattctgcagtgcgaccctggaaccatcagggaggagatccaaatctttagactcttttgccacgaatgtcagcgtgtctttcatgatcgtctgattaataatgaagacaagcactattttcatgtgatactaacagagatggctaataagcattttggaatcgcaattgaccttgagtactttctgaataaacccataatctttggagacttcatcaagtttggtgccgataaggccgaccgaatttatgatgacatgccagacatagaaaaaacagccaatgtgctgcaggactacctcgatgactacaatctcactaatcccaaggaggttaagcttgttttcttccaggacgccatcgagcacgtgagtagaatcgctcggatgattcggcaggagagggggaacgctctgttggtgggagtgggaggtaccgggaaacagagtctcacgcgtctagccgctcatatctgcgggtacaaatgcctgcagattgagctttcacgcggctacaactatgatagctttcacgaagatctgcgcaaactttacaagatggctggggtagaagacaaaaacatggtcttcctgttcaccgatacccagattgttgtcgaggagttcctcgaggacataaataatatcctgaacagcggcgaagtgccgaacctgttcgagaaggacgagctggaacaggtgctggcggccacgaggcccagggcgaaggaggtaggcatttcggagggtaacagggatgaggttttccagtacttcatcagcaaagtgcgccaaaagttacacattgtgctatgcatgtcgcccgtcggtgaagcttttcgctccagatgtcgaatgtttccctccttggttaattgttgcactattgactggtttgtacagtggcctcgggaagccctgctgagcgtcagcaaaactttcttctcccaggtggacgccggcaatgaggagttgaaggagaaactgcctttaatgtgcgtcaacgttcatctttccgtgtcctcaatggcagagcggtactacaatgagctccgccgaaggtactatactacacccacctcctatctggaactcatcaacctgtatctttccatgctatccgaaaaacgcaaacagatcatctctgcacgtgatcgagtgaaaaacggcttgacaaagctcctggagacaaatatcctagtcgacaagatgaaactggacctgagcgctttggagcccgtgctgttagccaagagcgaggacgttgaagcactgatggaaaagttagcagtggatcaggaatccgctgaccaggtgcgtaatacagtccaagaagacgaggccacagccaaggtgaaagccgaggagacgcaggccattgcagacgacgcccaaagggatctggatgaagcgctgccggccctcgatgctgccaacaaagctcttgacagcctggataaagccgatatcagcgagattcgcgtttttactaagcctccagatctggtgatgacggtcatggaagcaatttcgatcttattgaacgctaagccagattggccttctgcaaagcagcttcttggcgacagcaatttcctcaagagactgctggaatatgacaaagaaaacatcaagcctcagatcctggcaaagttgcaaaagtatatcaacaaccccgactttgtgccggagaaagtggagaaagtaagtaaagcttgcaagagcatgtgtatgtgggtgagagctatggatctgtacagcagagtggtgaaggtggtggagccaaagaggcagaaactgagagctgcccaggccgaactggacattactatggccaccctcagggagaagcaggctcttctccgccaggtcgaagaccaaattcaggctttacaggacgagtacgataaaggagttaacgagaaagaatccctggctaagactatggcattaacgaaagctaggttggtgcgggccggtaaactgactgccgctctggaagacgagcaagttagatgggaagagagcattcaaaaattcgaggaggagatctcaaatataacaggcaatgtattcatcgctgctgcgtgcgttgcatattacggggctttcacagcccaataccggcagtcccttatcgagtgctggatacaggactgccagagcttggagatcccaatcgatccaagcttttctctgataaatatcttgggggacccttacgagatacgccagtggaacacggacggactgcctcgcgaccttatttctacagagaacggcatcttggtcacccaaggccggcggtggcccctcatgatcgatcctcaagaccaggccaaccgatggattcggaacaaagagtcaaagtccggcctgaagattatcaaactgactgacagcaacttcctgcgtattctcgagaactctatccgcctgggtttgcccgttcttctggaagaactgaaagagaccctggaccccgctctcgagcctatattgcttaaacagatttttatttccgggggacgtttactgattcgtctgggcgatagcgatatcgactatgataagaacttcagattctacatgaccactaagatgccaaaccctcactacctacctgaggtatgcataaaggtgacgattattaatttcactgtgactaagtctggcctggaggatcagctgctgtcagacgtagtgagactcgagaagccccggctagaagagcagcggattaagctcatagtgcgcataaatacggacaaaaaccaattgaaaaccattgaggaaaagatcttgagaatgttatttacctcagaagggaatatcctggataatgaggaacttatcgacaccctccaggacagtaagataacgtctggggccatcaaaacacgccttgaagaggccgaatccactgaacagatgatcaatgttgcaagggaaaaatatcgtccagtcgctacccaggggtcggtcatgtacttcgtcattgccagtctgtccgagattgatccgatgtaccagtacagcttgaagtattttaaacagctgttcaacaccacaatcgaaacctctgtaaagaccgagaatttacaacagcggcttgatgtgctcctagagcagaccctgctaaccgcctatgttaatgtgtctaggggcttatttgagcagcataagctgatttacagcttcatgctctgcgttgagatgatgagacaacagggcacacttagcgacgccgaatggaatttttttctgaggggctctgccggtcttgaaaaggagcggccgcctaagccagaggccccctggctgcccactgcaacgtggtttgcatgttgtgacttggaggagagcttccccgtattccacgggctgacccagaatattctttcccacccaatcagtatccggctgggtagctttgagacatacatcaatccgcagaagtgggagggatatagcaagatgaaacacgaggacaagcatatgcggcaagaaaaggaggcagctcaccaggatccttggtctgccggcttgagcagttttcataagttgatcctgatcaagtgctgtaaagaagaaaaagttgtgttcgctctgacggactttgtcatcgagaacttggggaaacaatttatcgaaactccaccggtggacctgccaacgctataccaggatatgtcttgcaacacacccttagttttcatactaagcacggggagcgacccaatgggcgcgtttcaaagattcgcacgggaaagcgggtatagcgagcgggtccagagtatcagcctgggtcagggacagggtccgatcgctgagaaaatggttaaggacgcaatgaaaagtggtaactgggttttcctgcagaactgtcaccttgccgtgagttggatgctcgccatggaggagctgataaaaaccttcaccgacccagacagcgctattaaggacactttccgactgtttttgagcagtatgccttcaaatactttccccgtgacagtgttgcagaattccgttaaggtgaccaacgagccccccaagggattgcgggccaacattcgtcgcgcctttacagagatgaccccctcatttttcgaggaaaacattcttgggaaaaagtggcgccagatcatatttggcatctgctttttccatgcaatcattcaggagcgaaagaagttcggtcctttaggctggaatatttgttatgaattcaacgacagcgaccgggagtgtgctctccttaatctgaagctttattgtaaagaaggaaagattccctgggatgctcttatttacatcaccggggagattacgtatggggggagggttacagactcctgggaccaaaggtgcctgaggactatccttaagcgctttttttctccagagactctggaagaagattataaatactccgagagcggaatctattttgcacccatggccgatagcctccaggaattcaaagactatattgaaaatttgcccttaatcgatgaccctgagattttcgggatgcacgagaacgctaacctcgtctttcagtataaagagacgagcacgcttatcaacaccatattagaagtccaaccccgtagttctaccgggggggaagggaaatctaatgatgagattgtgcaggaattggtggccagcgtgcagacgagggtgccagaaaagctggagatggagggagcgagtgagagcctcttcgtgaaagacctccaggggcgtctgaattcgttaacaacagtgctagggcaggaggtggacagatttaacaacctcctgaagcttatacatacgagcctcgagacactgaacaaggcaatcgcgggctttgttgtgatgagtgaagagatggaaaaggtgtacaatagtttcctgaacaaccaggtgcctgcactctggtctaatactgcataccccagcttaaagcccctcggctcctgggtcaaagatctgatactgcggacatccttcgtggacctctggctgaaaagaggacagcccaaatcatactggattagcggttttttttttcctcaaggatttctgactggcactttacaaaatcacgccagaaagtacaatctacctattgacgaactgagctttaagtattccgtgatccctacctatcgggaccaggcggccgtcattgaggctgcaaagactgtgcagtttggccaggagcttcctatggacatggagctgccatccccagaggatggcgtgctggtgcacggtatgtttatggatgcgtcacggtgggacgataaggagatggtgattgaagatgccttacccggccagatgaaccctgtactcccggtggtgcatttcgaaccacagcagaactacaagcctagccccacactgtaccactgtcctctgtacaagacgggagctcgcgctggaacacttagcaccaccggacatagcacaaacttcgtcgtaaccgtgttactccccagcaaacggagtaaagattattggatcgctaaaggcagcgccctgctctgccagctgtccgaatag

SEQ ID NO: 117303 - DNA, 12477 bp, Artificial Sequence
  derived and/or modified sequence
atgacctttcgagccacagactccgagttcgatctcactaacatagaggaatatgccgaaaattccgcactaagcagattgaacaatatcaaggccaagcagcgtgtgtcctatgtcacatcaaccgagaacgaatcggatacacaaattctgactttcaggcacatcactaaagcacaggaaaagactaggaagcggcagcagcctataaagttggaacctctccccgtgttaaaggtatatcaggaccataaacagccagagtatattcacgaacaaaacaggtttcagcttatgaccgcgggaatcattaaacgccctgtgtccattgccaagaagagctttgctacttcctctactcagtttctggagcaccaggatgctgtcaagaagatgcagatccatcggccatatgtggaggtattttccccaagtccgccaaagctgccccataccggtattggtaaaaggggcctgttcggcacaagaagctcggcgtacccgaagtacacattccacgatcgcgaagaggtggtgaaggccaatatacgcgacccacttcaaatcataaaaataataagagaaaacgagcatttaggctttctttatatgattcctgccgtgccacggtcttctatagaatacgatacatacaatttgaaagtggtctcctatgaaaacatcaacaagaatgattattacaccatctctcagagggccgtcacccatatttacaatgaggatatcgagttcatcgagattgacagatgggaacaggaatacttatatcatcgggaacttactaaaatccctatctttagtctgtttcgaaaatggaaggccttctctgtctggcgaaagaacgttcggtcaaagaaaattactggctgccagaagagtttacaaaaaaatctcttcatagtcaacccacacctgaggcccgctcttcttaaaattaatgagctttgttaccacttgagctttatgggactctgctatattgaaaagtgtcatacctacactctccaggaatttaaggcagcccaggtgatcaggttggccgaagtaactgaacgcctgggcgaatttcgcaacgaggccaagtacgtggtgcggagggcttgccgctttgcactccgggctgctggattcgtccctgatgactgtgcatttggacccttcgaggactatcataaggtgcagagttccggtagcttcattaatacaccacatgagttgccgacttatggcgattccgaaaagatgacctacacagagcaagccagtaagcggcactactgcatgcgcctgacatgctttatccgactgaacgactatctgatcgagaacacgatgcatatcttaacagtaaacgctgtgaacagcctactcaaccaccttaccgacaaactgaaaagaaccccatccgccgatgtgattcagaaatggatcacagaggagaaacccgaggtgcctgataaaaaaggcactctgatggtcgagaaacaggaggaagacgagtcactaatcccaatgttcctgaccgaactgatgctcactgttcagtcactcctgtttgagccttctctagaagatttcctggatggtatccttggggcagtaaaccactgtcaaaatactgttctctcagtgccaaacctggtgccggacagttatttcgacgcatttaccagcccatatatcaataataagcttgagggaaagacctgcggcaccggtcccagtctcgctgcagtgttcgaggacgacaaaaattttcacaccataatctcccagattaaggagacaatccaggccgcttttgagtcagccaggatctatgccgcaacatttgagaaattccagatcttttttaaggagaatgagagcctggatctccaggctctaaagttgcaggagcctgacataaatttttttagtgagcagcttgaaaagtaccacaaacaacacaaagacgcggtcgctctcaggccaactagaaacgtgggactcctgctgatcgacaccaggctcctgagggaaaaactgattccaagcccactgcgatgtctagaggtgctaaattttatgctgcctcggcagtctaagaaaaaggtggatgctattatttttgaagcacaggatgccgagtacaaactggaatttgtgcccaccaccactaccgagtacgtgcattctcttctcttcttggatgaaattcaagagaggattgaatccctggaagacgaaggtaacatcgtgacccagatgtataagctgatggagcaatatcaggtacccaccccaccggaagacttcgccgtcttcgccaccatgaagccgagcatcgtggctgtgcggaatgctatagataagagcgtcggcgatcgcgaaagtagtattaagcagttttgtgtgcatctggggtctgacctggaggagcttaacaacgaagtgaacgaagtgaaactccaagcccaggatccccaaatactggacatcagcgcggatcaggataaaattcgcttaattctgaataacctgcagagcgtgctcgccgacctccaaaaacgcgcattccagtacaaaagctatcagaagaacttcaaggttgaggtgagcaagttcgaggcgctagaggaggtatccgccgagctcaaactcaaacagctgttatgggattcctttagcgagtgggataaactgcaacaggaatggctgaagtctaagtttgattgtcttgatcccgaagtgctgaacggacaggtctctaagtacgcgaaattcgtgacccaattggagaaggggctgccgcctaacagtgtcgtgccacagttaaaatacaaggtcgagaagatgaaggagaagctgccagtaatcattgacctacgaaatccaactctgaaggctagacattgggctgccattgaacagacggtcgacgccacattggtcgacgccgagatccctctgacactggaaaggttgtcccagctgcacgtgttcgatttcgggcaagaaatccaggacatctcgggccaggccagtggagaggccgcattggaggctattcttaaaaaggtggaggactcatggaagaccacggagtttgtgattctaccgcaccgcgatagcaaggacgtgttcatcctcggcggtactgacgatatccaagtgctgctggatgactccacgatcaatgtggctaccctggctagctccaggtaccttggacccctgaaaacacgggtcgacgaatggcaaaagcagctggccttatttaatcagactctggaagagtggttaacatgccagcgcaattggttatacctggagagcatatttaacgcacctgacatccagagacagctgcctgctgaagctaaaatgtttcttcaagtggataagtcttggaaagaaattatgagaaaggtgaatagactgcccaacgctctcagggctgctacccagccaggtctgctcgagacctttcaaaacaataacgccttgttggaccagatccagaagtgtctcgaggcctacctggagagcaagcgggtcatctttcctcggttctacttcctaagcaacgatgaactgctggagatcctggcccaaacacgcaacccacaggcagttcagcctcacttgcgaaagtgcttcgattcaatctccaagctggagttcgctttgatgcctccggctgagggaaaaattccaggaatcgatggagaaccagagaaagtatatactaatgacatcctggcgatgcttagtcctgagggcgaacgtgtttcactcgggaaggggttgaaggctcggggtaatgtcgaagagtggttagggaaggttgaagaagccatgttcacatcactcaggaggttgtgcaaggctgctattgccgactaccaaggcaagctcagaaccgactgggtggttgccggtcaccctagccaagtgattctcactgtttcccagataatgtggtgtagggatttaacagagtgtctggagacagagcatagtaatcatatccaagctctaaaaaatttcgaaaaagtgaactttgagaggctcaacgctcttgcagccattgttcaggggtccctgcctaaacttcataggaacattctgactgccctgatcactattgacgtacatgcccgagatatcgtaaccgagttggtacagagcaaggtggagaccgttgaatccttcgactggcagaggcaactgcggtactactgggatatagatctcgataattgcgttgccagaatggcactgagccagtacacatatgggtacgagtaccttggcgcatgcccccgtctggtgatcacccccctgacggatcggtgttacctttgtttgatgggcgcactccagctggatcttggcggtgcgccagcaggacctgccggtactgggaaaacggaaacgactaaagacctggccaaagctctcgccattcagtgtgtggtgtttaattgctctgatggactagattataaaatgatgggacgattcttttcaggtttggcgcagtccggcgcttggtgctgcttcgatgaatttaatcggatcgatatcgaggtgttaagtgtaatcgcgcagcagcttattaccattaggaacgccaaggctgctaaactgagcagatttatgtttgagggacgcgagatcaagttggttatgacatgtgcagcctttatcacaatgaatcctggttatgcgggtaggacagagctacctgataacctcaaagccctattcaggccattcgcaatgatggtgccaaactacgcccttatcgctgaagtcatactgtacagcgaggggttcgaatcctccaagattctcgcccgaaagatgactcagatgtataaactttgctctgagcagctaagccagcaagaccactatgatttcggcatgcgcgcagtgaaatccgttctggtgatggccggttctttgaaacgcgagaatccagacctcaatgaagatgtggtcctgattagggctctgcaggatagtaacctgcctaagttcttgactgatgacgctctgctgtttagcggcatcatttctgatttattcccgggagtacagattcccgagcacgactacggcatcctgcaaagcaccatagtcgacgtcatgaatcgacagaacctgcagcccgaaatgtgtatggttaggaaggttattcagttctatgagaccatgctcgtccgccatggcgtaatgctggttggcccaaccggcggaggaaaaactacggtttaccggatcttagccgagaccttgggcaatctgcagaagttgggtatcgagaacagtttctatcaggccgtgaagacgtacgtgttaaatcctaagtcaattaccatgggtgaactctacggcgaagtaaataacctcaccctcgaatggaaagatggtctcatggcgctgtccgtgagggccgcagtgaatgatacatccgaggatcacaagtggatcattagcgatggcccagtggacgccctgtggattgaaaatatgaatactgtactcgacgataacaaaatgctgtgcctcgccaactcagaaaggatcaagctgacacctcagattcatatgctgttcgaggtgcaggatctcagggtcgctagtccagccacagtgagcaggtgcgggatggtatttgtggacccagaggagctgaaatggatgccttacgtgaaaacatggatgaaggggatcagcaagaaactgacagaagagacccaggagtacatcctcaatctttttcagaggtatgtggacgaaggccttcacttcattaacaaaaaatgctctcaggcgataccacaggtagacatttctaaagtgacgacgctgtgttgcctactagagtccctgattctggggaaggacggggtcaatctcgccatggagcaaacaaagctaaacacaattctctgtcagacattcgtgttctgttatctgtggtccctggggggaaacctgactgagaactattacgattccttcgacacgtttatcaggacccagttcgacgataatccagacgcgcgactaccaaatagtggagacctgtggagcatccatatggactttgacaccaagaggctggacccatgggagcgcatcatccctactttcaagtataatcgcgacgtgccattctttgagatgctggtccctaccacggacaccgttaggtacggttacttaatggaaaagctactggccgtcaaacattctgtgctttttaccggcataactggggtgggcaaatctgttatcgccaaggggctgctcaataaaattcaggagagtgctggctacgtccctgtctacttgaatttcagcgcccagactagtagcgcccgtacgcaggagatcatcgagagcaaacttgagaggaaaagaaagaacattctgggggctccaggaaacaaaaggatcgtgatcttcgtcgacgacctcaacatgccccgactggatcgctacggcagtcagcctcccatcgagctactccgccagtaccaggacttcggagggttttatgaccggaataagttgttttggaaggagattcaggacgtcacaataatctccgcctgcgctcccccaggcggaggcaggaacccagtgacccctcgcttcatccggcacttctctatgctctgcctacccatgccatcagaacactccctgaagcagatttttcaggctatcttgaatgggttcttatcagacttccctcccgcagttaaacagacagcaagctccatcgtggaagcctcagttgagatttacaacaaaatgagcgtggatctgctgcctacaccagctaagagccattacgtgtttaacttaagggatctgtctaaatgtgtgcagggcatactgcagtgtgatcccggaacgatcagggaggagatccagatattccgcctgttttgtcatgagtgccaaagggtatttcatgatcggctcattaataacgaagacaaacactatttccacgtgatcctgacagagatggccaacaagcattttggcattgccatcgatctggagtacttcttgaacaaaccaatcatttttggtgattttattaagttcggagcagacaaggcagataggatctatgatgacatgccggatattgagaagaccgccaacgtcctacaggactatttggatgattataacttgacaaaccctaaggaggtgaagctggtgttctttcaggacgcgatagagcatgtgtccagaattgcccgaatgattcgacaggagagaggtaatgctctgctggttggcgtcggcggaactggtaaacagtccttaacacgtctggccgctcacatctgtggttacaaatgcctgcagattgaactttccagaggatacaactatgactctttccacgaggatctgagaaagctttataaaatggccggagttgaggacaaaaacatggtgtttctgttcaccgacactcagatagtggtggaggaatttctggaggacatcaataacatcctcaactcaggcgaagtaccgaatctgtttgaaaaggacgaactggaacaggtgcttgccgctacaaggccacgcgcaaaagaggttggtatttcggagggaaatcgtgatgaggtctttcagtattttattagcaaggtccggcagaaactgcatatcgtcttatgtatgtctccagttggggaggcgtttcgatctcgctgtaggatgttccctagccttgttaattgctgcacaatagactggttcgtgcagtggcctagggaagcgctgctcagcgtctcaaaaactttcttttcccaggtggacgccggtaacgaagagctcaaagagaagctgcctttaatgtgcgtgaacgtgcacctcagcgttagcagcatggctgagagatattacaatgagctcagaagaaggtactataccactccaacctcataccttgagctcatcaacctgtatttgagcatgctgtccgagaaacgtaagcaaataatcagtgcaagagaccgcgtgaagaacggtctgacaaaactgcttgagactaatatcctcgtcgacaagatgaaactagacttgtctgcacttgagcccgttctactggccaagagtgaagacgtggaggcactgatggaaaagctggccgtcgatcaggaaagcgctgatcaagtgcgcaacaccgtgcaagaggacgaggctaccgcgaaagtgaaggctgaggaaacacaagcaatcgctgacgacgctcagagagacctagacgaagccctgcctgcgctcgatgcggctaacaaggcattagactctctagataaggcagacatcagcgaaatccgggtgttcacaaagcctccagatttggtgatgacagttatggaggccatcagtatcttgctgaatgcaaaaccagattggccttctgccaaacagctgttgggtgactccaactttctgaaaaggctactggagtacgacaaagaaaacattaagccacagattctcgccaagctgcagaaatatatcaataaccctgatttcgtgcctgaaaaggtggagaaggtgtccaaggcatgtaaaagtatgtgtatgtgggtgagggcgatggatctttattccagagtagtcaaggtggtcgagccaaaacggcaaaagctgcgggcagcccaggctgaattggacattaccatggccacacttcgcgaaaagcaggccctactgcggcaggtcgaagaccagatacaggcccttcaagatgagtacgataaaggagtcaatgaaaaagagagtctagctaagactatggcacttactaaggcccgactggtgagagccggaaagttaacagcggctctggaggacgagcaagttcgctgggaggagtcgatccaaaaatttgaagaagagattagcaacattacaggaaatgtatttatcgctgccgcttgtgtggcttactacggggctttcacagcccaatatagacaatccctcatcgagtgctggatccaagattgccagagtctggaaatccccatcgacccttcgtttagcctgattaatatcctgggagacccctacgagattcgacagtggaacaccgacgggctacctcgcgatcttatctccacagaaaacggcatcctggtgactcagggcagacggtggccgttaatgatagaccctcaggaccaagctaacagatggatccgaaacaaggaatcaaaaagtgggctaaagattatcaaactgaccgactcaaatttcttacgcatcctcgaaaattcaatccgacttggtttgcctgtgctacttgaagaattgaaagaaacattagaccctgccttagagcccatccttctaaaacagattttcatttctgggggtcgtctactcattagactgggggactcagatatcgactacgacaaaaattttcgattttacatgacaaccaaaatgcccaacccccactacctgcctgaggtctgcatcaaggtgactataatcaactttactgtgactaagtctggactggaagatcagctgctgagcgatgtggtgagactggagaagcccagactggaagagcagagaatcaaacttattgtgcggatcaataccgataagaaccagttaaaaaccatagaggagaagatcctgaggatgctttttacatccgaggggaatatcttggacaacgaagagctgatcgatacattgcaggactctaagattacatctggcgcaattaaaaccaggttggaagaggcagaaagcactgagcagatgatcaacgtggcacgcgaaaaatatcgacctgtcgccacccagggatctgtgatgtacttcgtgattgctagccttagcgaaattgaccctatgtaccagtattctttgaaatactttaaacagctcttcaacactaccattgagacaagtgtaaagactgagaatcttcagcagcggctagatgttcttctggagcaaacactcttgacagcctacgtcaacgtttctcgtgggttattcgagcagcataagttgatttattcttttatgctttgtgtggaaatgatgcgtcaacagggtactctgagcgacgccgagtggaacttctttctgagagggtcggccggactcgagaaagagaggccacccaagcctgaagccccatggctgcctacagcaacctggtttgcctgctgtgacctcgaggagagtttccccgtcttccacggactgacacagaacattcttagtcaccctatttctatccgcctcggcagtttcgagacgtacattaatccacagaaatgggaagggtacagcaagatgaagcacgaggacaaacacatgcggcaagagaaagaagcggcacaccaggatccatggtccgcaggcctttcttcctttcacaaactgatcctgattaaatgctgcaaagaagaaaaagtggtgttcgctcttacggactttgtgatcgaaaacctgggcaagcagtttatcgaaacacctcctgttgaccttcctaccctgtaccaagatatgagctgtaacacaccgttggtattcatcttgtccaccggaagcgaccccatgggcgcatttcagagatttgccagagaaagcggctacagtgaacgcgtgcaatcaatttcacttgggcagggccagggcccaatcgctgagaagatggtgaaagatgcgatgaaaagtggaaactgggtttttctgcagaattgtcatttggcggtttcatggatgttagccatggaggaactaatcaaaacatttaccgatccggattcagccatcaaggatacattcaggttgtttctttcctcaatgccctctaatacattcccggtgaccgtcctgcaaaacagcgtgaaagtgactaacgaaccacccaaggggctgcgcgctaacatcaggagagcctttacggaaatgactcctagttttttcgaagagaacatccttggcaaaaagtggcggcagatcatcttcgggatttgcttcttccatgctattattcaggagcgcaaaaaattcggacccttaggttggaacatctgctatgagttcaatgactcggatcgggaatgcgccctcctgaacttgaagctgtactgtaaggaaggcaagatcccatgggacgctttgatttacatcaccggggaaattacttatgggggacgcgtgaccgatagctgggatcagaggtgcctgagaaccatactgaagcggttcttttcaccagagacactggaggaggattataagtattcagagagtggtatttattttgcaccgatggccgactcactgcaggaatttaaagattacattgaaaaccttccactcattgatgacccagaaatttttggcatgcacgagaatgccaacctagtgtttcagtacaaagagacctccactcttatcaacacaatcctcgaagtccagcctaggtcgagcacgggaggcgaagggaagtccaatgacgagattgtacaggagctggtggcctctgtacagacccgggtgcccgagaaactggagatggagggggcatctgaatccctcttcgtgaaagacttgcagggcaggctgaactcactcacaaccgtcttaggccaggaggtagaccggtttaataacctattaaaactaattcatacatctctggagacactgaacaaggcaatcgccggtttcgtcgtcatgagcgaggaaatggaaaaggtctacaactctttcctaaacaatcaggtacccgctctgtggagcaacacagcatacccttcactcaaacctctgggatcctgggtcaaggatcttatcctgcggacttctttcgtggatttgtggttgaaacggggtcagcctaagtcatactggatatccggctttttcttcccacagggcttcctgaccggaacccttcaaaatcatgccaggaaatataacctcccaatcgatgagctgtccttcaagtacagtgtgatcccaacctatcgagaccaggcggctgtgatagaggccgctaaaacggtccagtttgggcaggaactgccaatggacatggagttgcccagccccgaagatggggtgctagttcatgggatgttcatggatgcatcaagatgggacgataaagaaatggtaatagaggacgccctcccgggtcagatgaaccctgtactgccggtagtgcattttgaaccacagcaaaactataaaccgagccctaccctatatcattgtccactatacaaaactggtgcccgagctggtaccctatctacaacaggccattctaccaacttcgtggtcaccgtcctactcccctctaaacgatctaaggattactggatagcaaaggggtccgcacttttgtgtcagctgagcgagtac

SEQ ID NO: 117304 - DNA, 12477 bp, Artificial Sequence
  derived and/or modified sequence
atgactttcagagccacagacagcgagttcgatcttaccaatatcgaagagtatgcagagaactctgctttgtcacggctgaacaacatcaaggccaagcagagagtctcctatgtcacatccactgagaacgagtctgacacacaaatcttaacattccggcacatcaccaaggctcaagagaagaccagaaagagacagcagccaatcaagctcgagcctttaccggtgctgaaggtgtatcaggaccataagcagcctgaatatatccacgaacagaaccgctttcagttgatgaccgccggaattattaaacgccctgtttcgattgctaagaaatcatttgccaccagctcgacccagttccttgagcaccaagacgctgtcaagaagatgcagattcatcgtccctacgttgaggtgttttcaccatctccccctaagctgccccataccgggattggaaagaggggtctgttcggtacccgcagttcggcgtatccgaagtataccttccacgatagagaggaggtggtgaaagcaaacattagagaccctcttcagatcattaagatcatcagagaaaacgaacacctcggattcctgtatatgatacctgctgttcccaggagcagcatcgagtacgacacctataacctcaaggtcgtctcttatgaaaatataaataagaatgactattacaccataagccaaagagccgtaacccacatctataatgaagatatcgagttcatcgagatcgacaggtgggaacaggagtatctctaccaccgcgaactaaccaaaatcccaatcttttccctgtttaggaaatggaaggctttctctgtgtggcgcaagaatgtgcgtagcaagaagatcactggatgccaaaagtctttgcagaagaatctcttcatcgtcaatccgcatctgcgacctgctctgttaaaaatcaacgagctgtgttatcacttgagtttcatgggcctgtgctacatcgagaaatgtcacacatacaccctccaagaattcaaagccgctcaggtgatccgattggcggaagtgactgagcgtctcggggagttcagaaatgaagccaaatacgttgttagacgagcctgccgttttgcgcttagggccgctggtttcgtgcccgatgactgcgcttttggaccctttgaggattaccataaggtacagtccagtggcagcttcattaacactccacacgagttaccaacctacggggacagtgagaaaatgacgtacacagagcaggcttcaaaacgccactactgtatgcgtctcacttgttttatccgattgaacgactatctgattgagaacacgatgcacattctgacagtcaatgcggtaaattctcttctcaatcacttgacggataaacttaagcgaaccccatctgccgacgttattcaaaaatggattactgaagaaaagccggaggtcccggataagaagggcacgctgatggttgagaagcaggaagaagatgaatctcttatacccatgtttttaactgaactaatgttaaccgtgcagtcgctgctcttcgagcctagcctggaggattttctagatggaattttgggagccgtgaaccattgtcagaatactgtgctgtccgttcctaacctagtcccggatagttacttcgacgcattcacgtctccctacattaataataagctggaaggaaagacctgtggaaccgggccaagcctagccgctgttttcgaagatgataagaacttccatacaataatcagtcagatcaaggaaaccattcaggctgcatttgagagcgcccgaatctatgccgctaccttcgagaagttccaaatctttttcaaagagaacgagtctttggatctgcaggcccttaaacttcaagaaccagacatcaatttcttctcggaacagctggagaaatatcataagcaacacaaggatgcagttgctctgaggccgactcggaatgtcggcctgctgctcatcgatactagactcctgagggaaaaactcatcccttcgccgctgagatgtcttgaggtgcttaattttatgctgccaagacagtccaaaaagaaggtagatgccattatctttgaggcccaagacgcagagtataaacttgagtttgtccctaccacgaccaccgagtacgtacattctctgctctttctggatgaaatccaggagcggattgagtcactggaagacgaggggaatattgtgacgcagatgtataaattgatggagcagtatcaagttccaactcctcctgaggacttcgcagtattcgccactatgaagcccagcatcgttgctgtgcgtaatgcaattgataagtctgtgggagatagagagtcctctataaaacaattctgtgtccacttgggatctgacctcgaagagcttaacaacgaagttaatgaagtaaagttacaagcacaggacccacaaattctagacatttccgctgaccaggataagatccggctcatcctgaataacctacaatccgtgttggctgacttgcaaaaacgggcattccagtataaatcctatcagaagaatttcaaggtggaagtttcaaagtttgaggcattagaggaggtcagcgcagaactaaaactcaagcaactcctatgggattccttctctgagtgggacaaactgcaacaagagtggttgaaatcaaagtttgactgcctggacccggaggtactgaacggccaggtgtctaagtacgcgaagttcgttacccagctcgagaagggcctccccccaaacagcgtggtcccgcagctgaaatataaggtagagaaaatgaaggagaagctgccagtcatcatcgacttgcggaatcccactctaaaggctcgccactgggccgctattgagcagaccgttgatgcgactctggtagacgcagagatccccctgacactcgagcggctgagccagctgcatgtgtttgatttcggacaggagattcaggatatctctggccaggccagtggcgaagctgcgctagaggcgatcctgaagaaggttgaggacagttggaagacgactgaatttgtgattctgcctcaccgtgatagtaaagacgtattcattctggggggaaccgacgacatccaggtgctattggatgatagcaccataaatgtcgccaccctggcaagctcaagatacctcggcccattaaagacccgagtggatgagtggcagaagcaactcgctctattcaaccagaccctggaggagtggctgacttgccagagaaactggctgtacctggaatcaatattcaacgcacctgacatccaacgacagcttccggcagaagctaagatgtttctgcaggttgacaagtcttggaaggagatcatgaggaaggtcaaccggctgcccaatgctctccgggcagctacacaaccagggctgcttgaaactttccagaacaataacgctttactggatcaaatccaaaaatgcctcgaagcatatctggagtccaagagggtgatctttcccagattttacttcctttcgaacgacgagctacttgagattctcgcccaaacccgcaatccccaggccgtacagccacacttgagaaagtgtttcgacagcatctccaagctggagttcgctttaatgcccccagccgaaggtaaaatcccaggcatcgatggcgagcctgaaaaagtgtacacaaatgacatccttgccatgctctccccggagggagagcgtgtgtcgctgggaaagggtctgaaagcacggggtaacgtcgaggagtggctcgggaaagtggaggaagccatgttcactagcctgcggcgtctctgcaaggcagctatcgctgactaccagggtaaactgaggacagactgggtagttgctggccatccttcccaggtcattctgactgttagccagataatgtggtgtagagatcttacagagtgcctggagactgaacacagcaatcacattcaggccctaaaaaacttcgagaaagtgaactttgagaggctgaatgcattggccgcaatcgttcagggtagcctgcctaaattgcaccgcaacattcttacggccctgatcaccatcgacgtgcacgccagagacatagtgacagagttagttcagtctaaggtggaaaccgttgaaagtttcgattggcagcgtcaactcaggtattactgggacattgaccttgataattgtgtggctcggatggccctctcacaatacacttacgggtacgaatatttgggggcttgtccgagactggtgattacacctctcacagaccgatgctacctgtgcctaatgggcgcactgcagctcgacctggggggagccccagccggacccgctggcacaggcaaaactgagaccactaaagacctggccaaggcgcttgctatacagtgcgttgtgtttaattgctctgatggactcgactataagatgatgggacgatttttctctggcttagctcagtctggcgcttggtgctgttttgatgaattcaacagaattgacatcgaggtccttagcgtcatcgcccaacagctaatcacaatccgtaacgcaaaggccgcaaaactgagcagattcatgttcgagggtcgcgagatcaagctcgtgatgacttgtgcagcgttcataacaatgaaccccggatacgccggacgcaccgaactgcccgataacctaaaagctctcttcaggccctttgccatgatggtgccaaattatgctctgatcgcagaagtgatactgtacagcgaaggctttgagagctcgaaaatactggcgagaaagatgactcaaatgtacaagctgtgctccgaacagcttagtcagcaggaccactatgatttcggtatgcgcgcagtgaagtccgtgctggtgatggccggatctctcaagagggagaatcccgacttaaatgaagatgtcgttctgatcagggcactgcaagattctaacttacctaagttcctgaccgacgacgccctcttattttccgggatcatcagtgatctttttcccggtgtccagatcccagagcacgactacggtattttgcaatctactattgtggacgtgatgaaccgccaaaatcttcagccagagatgtgtatggtacgtaaagtcatacaattctatgaaaccatgctggtgagacatggtgttatgctggtcggcccaactggcggtggtaagaccaccgtgtacagaattttggcagagacactaggcaatcttcagaaactgggaatcgagaattccttctatcaagccgtgaagacttacgtcctaaacccgaagtcaatcaccatgggcgaactgtacggcgaagtaaacaatctgaccctggaatggaaagacggactaatggccctgtctgtgagagctgctgtcaatgacacatctgaggatcataagtggataattagtgatggccctgtagatgccctctggattgaaaacatgaacaccgttctcgacgacaataaaatgctgtgcctagccaattccgaaagaataaaactcacaccacagattcatatgctttttgaagtgcaagaccttcgcgtcgcctccccagccaccgtgagccgatgtggtatggtctttgtcgatcctgaagaactgaagtggatgccgtacgtgaagacttggatgaagggcatctcgaagaaattaaccgaagagacccaggaatatattcttaatctgttccagcgatacgtggacgaaggacttcactttatcaacaaaaaatgttcacaagcgatcccacaggtggatatctccaaggttaccacactgtgctgtttgcttgagagcctcattctgggaaaagacggcgtcaacctggctatggagcagaccaaactgaatacaatactgtgtcaaacattcgtgttctgctacttatggagtctggggggtaatctgaccgagaactactatgacagctttgatacattcattcggacacaattcgacgataaccccgacgcccgactgcccaactcaggggacctgtggtcgattcacatggactttgacacgaagcgactggacccttgggaacggatcatcccaacctttaagtacaatcgtgacgtgcctttcttcgagatgctggttcccacaaccgataccgttcgctatggttatctcatggagaaactgctggccgttaaacactcggtgttgtttactgggattacgggggtgggaaagtctgtcatcgccaaaggactcctgaataaaattcaggagtctgccggatatgtccctgtatatctgaatttctcggcacagactagcagcgccaggacacaagaaattattgagtccaaactagaacggaaaagaaaaaacatcctcggagccccaggaaataaaaggatagtgatattcgtagacgatctgaatatgccccgtctcgataggtacgggagccagcctcctatcgaactactgcggcagtaccaggactttggtggcttttacgacaggaacaaactgttttggaaagaaatccaggatgtcaccatcatcagtgcctgtgccccacccggtggaggccgaaaccctgtgactccgagatttatcaggcacttctcaatgctgtgccttcctatgcccagcgagcactccctgaaacagatcttccaggcaatcctgaacgggttcttgtctgatttcccacctgcagtgaaacagaccgcctctagtattgtggaagcttccgtcgagatttacaacaagatgtctgttgatctcctccctaccccagccaagtcccattatgtgttcaatctccgagatctgtctaagtgtgtgcagggcatcctccaatgtgatccaggtaccatcagggaggaaatacagatctttaggctgttctgccacgaatgccaaagggtgttccacgacagactgattaataatgaagataagcactattttcatgttattctcacagagatggccaataagcacttcgggattgccattgatcttgagtattttctgaataaaccaattatattcggggacttcatcaagtttggcgcagacaaagccgaccgcatctacgacgatatgcccgacattgaaaaaaccgccaatgtgctacaagactacctcgacgactacaatctgaccaaccccaaggaggtgaagctcgtattttttcaagatgctatcgagcacgtgtctaggatagcacggatgattcggcaagaaaggggcaacgcactgctggtgggcgtgggaggcaccggcaagcaatccttaacccgtttggctgctcacatctgcggctacaagtgcctgcaaatcgaacttagtcgcggatacaactacgactcctttcatgaggacctacgcaagctgtataagatggcaggggtcgaggataagaatatggtatttctcttcactgacactcagatcgttgtggaagagtttctggaagatataaacaacatactgaactcaggagaagtacccaatttattcgagaaggacgaattggagcaggtgctggctgcgacacgcccacgcgctaaggaggtggggattagcgagggcaaccgcgatgaagtatttcaatactttatcagcaaagtgcgccagaagttgcatatcgtgttatgtatgagtcccgtgggcgaagcctttcgaagcaggtgcaggatgttcccctccctggtgaattgctgtactatcgattggtttgtacagtggccacgcgaagctcttctctctgtgagtaagacctttttcagccaggtggacgcgggaaatgaggaattgaaggagaaactaccgctgatgtgtgtgaatgtgcacctgtctgtgtcttccatggctgaacgatattacaatgaactgcggaggagatattacacaactcccacgagctaccttgaattgattaatctgtacctgagtatgctgagcgagaagagaaagcagatcattagtgcgagagaccgggtgaagaacggacttacaaagttactcgaaaccaacattctggtagacaaaatgaagctcgacctgtccgccctggagcccgtattgctcgcaaaaagtgaagacgtggaggctttgatggaaaagctggcagttgaccaggaaagtgccgatcaggtgcgaaataccgtgcaggaagatgaagcgacagccaaggtgaaggctgaggaaacgcaggctatagctgacgatgcccagagagatttagacgaggccctgccagctctcgatgcagcaaacaaagcactggactcccttgacaaggctgacatctcagagatccgagtctttacaaaacctcctgatctcgtaatgactgtcatggaagctatatctattctcttaaacgctaaaccagattggcccagcgcaaagcagctgctgggtgactccaactttttgaaacgcctgctcgagtacgataaagaaaacattaaaccacagatcctggccaagctgcaaaagtacatcaacaaccctgacttcgtgcccgaaaaagtggaaaaggtttccaaagcgtgcaagtccatgtgtatgtgggttagggcaatggacttatactctcgggttgtcaaagtggttgagcccaaaaggcagaaactcagggctgctcaagctgagctcgatatcaccatggccaccctccgggaaaaacaggcactgttgagacaggtcgaggaccagattcaggccctgcaggacgaatatgataagggggtgaatgaaaaggagtctcttgcaaaaacaatggctctcacaaaggcaagacttgtcagagccggtaagttaacagctgctttagaggatgagcaggtgcggtgggaagagtccatacagaagttcgaggaagagatttcgaacattacaggtaacgtattcatcgctgcagcctgcgtcgcctactacggagcttttaccgctcagtataggcagagtcttatagagtgttggatacaggattgccaatcgttggagatacctatcgaccccagtttctcattaattaacattctgggtgacccctacgagatccgccagtggaatactgatggcctgcctcgcgatctgatctctaccgagaatggcatactcgtgacccagggacgcagatggcccctgatgatagatcctcaggaccaggccaaccgttggatccgaaacaaggaaagcaagtccggtcttaaaattattaagctgacggatagtaactttcttcgtattctagaaaactctatccgactaggcctccctgttttgctggaagagctgaaggaaaccctggaccccgcattggaacctatactcctcaagcagatatttatcagcggcggacgattgttaatcagactgggcgacagcgatatcgactatgacaaaaactttaggttctacatgacaactaagatgcctaatccccactaccttcccgaagtgtgcatcaaagttactattatcaacttcaccgtgacaaaatcagggctcgaggaccagctattgtctgacgtggtgcggctcgaaaagcctaggctggaagaacagaggatcaaattaatcgtccggattaatactgataagaatcagttgaaaacgattgaagagaagattttgcggatgttgtttacgtctgagggcaatatcctcgacaatgaagaattaatcgacaccctccaggacagcaaaattactagtggggctatcaaaacccggctcgaagaagcggagagtacagaacagatgataaacgtcgcacgtgaaaagtaccggcctgtcgccacgcagggcagtgtgatgtactttgtgatcgcatcactctccgagatcgacccgatgtaccagtacagcttgaagtatttcaagcagctgttcaataccacgatcgaaacctcggtcaaaactgaaaatctgcaacagcggctggacgtccttctcgagcagacattattgactgcctacgttaatgtctctcgcggtttattcgagcagcataagctgatctacagctttatgctttgcgtagagatgatgaggcaacagggcactctctctgacgccgagtggaactttttcctgcggggatccgcaggcctcgagaaggaacggcctcctaagccagaagccccttggctgccaaccgcaacttggttcgcttgttgcgatctggaggaaagtttccctgtgttccacgggctgactcaaaacatcctgagccatcccatctccatccgccttgggagttttgaaacgtatatcaacccacagaaatgggaggggtatagcaagatgaagcacgaggacaaacacatgcggcaggagaaggaggccgctcaccaggatccatggtccgccggtttgtcctcgttccataaactcatcttgataaagtgctgtaaagaggaaaaagtggtgtttgcactaaccgattttgtgatcgaaaatctcgggaaacaatttattgagacaccgccagttgacctgcccacactgtaccaggacatgagttgtaacactcctttagttttcatcttgtcaacgggctctgatcccatgggtgcgttccagaggttcgcgagggaatccgggtatagcgagagagtgcagagcattagcctaggtcaaggacaggggccaattgccgagaaaatggttaaagacgccatgaagtctggtaactgggtctttctgcagaactgtcacctagcagtgagctggatgctagctatggaggaactgattaagaccttcacagatcctgattcggcgatcaaggacacctttagactgttcctttcctccatgccctccaacacgtttccagtgaccgttctacagaattctgtgaaggtcaccaacgaacctcccaaggggctgcgggcaaacatccgccgagctttcaccgaaatgacacccagcttctttgaggaaaatatattggggaagaagtggcggcagattatttttgggatttgcttcttccatgcgatcatccaggagaggaagaaatttggcccattgggctggaatatctgctatgaattcaatgactctgatcgcgagtgcgccctgctaaacctcaaactgtactgtaaagaaggaaagataccttgggacgctctcatctacataactggcgagattacttacggtgggcgtgttactgacagctgggaccagaggtgcctgcgcactatactgaagcgtttcttctcccctgagacacttgaggaggattacaagtacagcgagtcgggcatttacttcgctcccatggccgacagtctgcaggaatttaaagattatattgagaatctaccactcattgatgacccggagatttttgggatgcacgagaatgcgaacttagttttccaatataaggagacgtcaactctgataaacacgattcttgaagtacaaccacggagctcaacagggggtgaagggaagagcaacgacgagattgtacaagaacttgtggcatccgtgcagactagggtgcctgagaagttagagatggagggtgccagtgagtctctattcgtgaaagacctccagggcagactgaactcattgaccacagtgctcggccaggaggtagatcggttcaataacctgctcaagttgatccacaccagcctcgaaactttgaataaggccatcgctggcttcgtagtgatgtcagaagagatggaaaaggtgtataatagcttcctgaataaccaggttcccgctctgtggtcaaacacagcctaccccagcctgaagccgctgggatcgtgggtgaaggacttaattttaaggactagctttgtggacctgtggttaaaacggggacagcccaagtcctattggataagcggctttttttttccgcagggttttctaactgggactcttcagaaccacgctcggaaatataacctcccaattgacgagctcagtttcaagtattccgtcatccccacgtacagagatcaggctgctgtaatcgaagcagcgaagaccgtgcagtttggccaggagctaccaatggatatggaacttccaagcccggaggatggagtgctcgtgcatggcatgttcatggacgcaagcaggtgggatgataaggagatggtcatcgaggacgctcttccagggcagatgaatccggtcctgcctgtggtgcactttgagccgcagcagaactataagccttcccccacactctatcattgtcccctgtacaaaaccggagccagagcgggaaccctgtctaccaccggccacagtaccaacttcgtggtgactgtcctgctgccatctaagaggtctaaggattattggatagcgaagggctccgcactgctttgccagttgagcgagtaa

SEQ ID NO: 117305 - DNA, 12477 bp, Artificial Sequence
  derived and/or modified sequence
atgaccttcagagccaccgacagcgagttcgacctgaccaacatcgaggagtacgccgagaacagcgccctgagcagactgaacaacatcaaggccaagcagagagtgagctacgtgaccagcaccgagaacgagagcgacacccagatcctgaccttcagacacatcaccaaggcccaggagaagaccagaaagagacagcagcccatcaagctggagcccctgcccgtgctgaaggtgtaccaggaccacaagcagcccgagtacatccacgagcagaacagattccagctgatgaccgccggcatcatcaagagacccgtgagcatcgccaagaagagcttcgccaccagcagcacccagttcctggagcaccaggacgccgtgaagaagatgcagatccacagaccctacgtggaggtgttcagccccagcccccccaagctgccccacaccggcatcggcaagagaggcctgttcggcaccagaagcagcgcctaccccaagtacaccttccacgacagagaggaggtggtgaaggccaacatcagagaccccctgcagatcatcaagatcatcagagagaacgagcacctgggcttcctgtacatgatccccgccgtgcccagaagcagcatcgagtacgacacctacaacctgaaggtggtgagctacgagaacatcaacaagaacgactactacaccatcagccagagagccgtgacccacatctacaacgaggacatcgagttcatcgagatcgacagatgggagcaggagtacctgtaccacagagagctgaccaagatccccatcttcagcctgttcagaaagtggaaggccttcagcgtgtggagaaagaacgtgagaagcaagaagatcaccggctgccagaagagcctgcagaagaacctgttcatcgtgaacccccacctgagacccgccctgctgaagatcaacgagctgtgctaccacctgagcttcatgggcctgtgctacatcgagaagtgccacacctacaccctgcaggagttcaaggccgcccaggtgatcagactggccgaggtgaccgagagactgggcgagttcagaaacgaggccaagtacgtggtgagaagagcctgcagattcgccctgagagccgccggcttcgtgcccgacgactgcgccttcggccccttcgaggactaccacaaggtgcagagcagcggcagcttcatcaacaccccccacgagctgcccacctacggcgacagcgagaagatgacctacaccgagcaggccagcaagagacactactgcatgagactgacctgcttcatcagactgaacgactacctgatcgagaacaccatgcacatcctgaccgtgaacgccgtgaacagcctgctgaaccacctgaccgacaagctgaagagaacccccagcgccgacgtgatccagaagtggatcaccgaggagaagcccgaggtgcccgacaagaagggcaccctgatggtggagaagcaggaggaggacgagagcctgatccccatgttcctgaccgagctgatgctgaccgtgcagagcctgctgttcgagcccagcctggaggacttcctggacggcatcctgggcgccgtgaaccactgccagaacaccgtgctgagcgtgcccaacctggtgcccgacagctacttcgacgccttcaccagcccctacatcaacaacaagctggagggcaagacctgcggcaccggccccagcctggccgccgtgttcgaggacgacaagaacttccacaccatcatcagccagatcaaggagaccatccaggccgccttcgagagcgccagaatctacgccgccaccttcgagaagttccagatcttcttcaaggagaacgagagcctggacctgcaggccctgaagctgcaggagcccgacatcaacttcttcagcgagcagctggagaagtaccacaagcagcacaaggacgccgtggccctgagacccaccagaaacgtgggcctgctgctgatcgacaccagactgctgagagagaagctgatccccagccccctgagatgcctggaggtgctgaacttcatgctgcccagacagagcaagaagaaggtggacgccatcatcttcgaggcccaggacgccgagtacaagctggagttcgtgcccaccaccaccaccgagtacgtgcacagcctgctgttcctggacgagatccaggagagaatcgagagcctggaggacgagggcaacatcgtgacccagatgtacaagctgatggagcagtaccaggtgcccaccccccccgaggacttcgccgtgttcgccaccatgaagcccagcatcgtggccgtgagaaacgccatcgacaagagcgtgggcgacagagagagcagcatcaagcagttctgcgtgcacctgggcagcgacctggaggagctgaacaacgaggtgaacgaggtgaagctgcaggcccaggacccccagatcctggacatcagcgccgaccaggacaagatcagactgatcctgaacaacctgcagagcgtgctggccgacctgcagaagagagccttccagtacaagagctaccagaagaacttcaaggtggaggtgagcaagttcgaggccctggaggaggtgagcgccgagctgaagctgaagcagctgctgtgggacagcttcagcgagtgggacaagctgcagcaggagtggctgaagagcaagttcgactgcctggaccccgaggtgctgaacggccaggtgagcaagtacgccaagttcgtgacccagctggagaagggcctgccccccaacagcgtggtgccccagctgaagtacaaggtggagaagatgaaggagaagctgcccgtgatcatcgacctgagaaaccccaccctgaaggccagacactgggccgccatcgagcagaccgtggacgccaccctggtggacgccgagatccccctgaccctggagagactgagccagctgcacgtgttcgacttcggccaggagatccaggacatcagcggccaggccagcggcgaggccgccctggaggccatcctgaagaaggtggaggacagctggaagaccaccgagttcgtgatcctgccccacagagacagcaaggacgtgttcatcctgggcggcaccgacgacatccaggtgctgctggacgacagcaccatcaacgtggccaccctggccagcagcagatacctgggccccctgaagaccagagtggacgagtggcagaagcagctggccctgttcaaccagaccctggaggagtggctgacctgccagagaaactggctgtacctggagagcatcttcaacgcccccgacatccagagacagctgcccgccgaggccaagatgttcctgcaggtggacaagagctggaaggagatcatgagaaaggtgaacagactgcccaacgccctgagagccgccacccagcccggcctgctggagaccttccagaacaacaacgccctgctggaccagatccagaagtgcctggaggcctacctggagagcaagagagtgatcttccccagattctacttcctgagcaacgacgagctgctggagatcctggcccagaccagaaacccccaggccgtgcagccccacctgagaaagtgcttcgacagcatcagcaagctggagttcgccctgatgccccccgccgagggcaagatccccggcatcgacggcgagcccgagaaggtgtacaccaacgacatcctggccatgctgagccccgagggcgagagagtgagcctgggcaagggcctgaaggccagaggcaacgtggaggagtggctgggcaaggtggaggaggccatgttcaccagcctgagaagactgtgcaaggccgccatcgccgactaccagggcaagctgagaaccgactgggtggtggccggccaccccagccaggtgatcctgaccgtgagccagatcatgtggtgcagagacctgaccgagtgcctggagaccgagcacagcaaccacatccaggccctgaagaacttcgagaaggtgaacttcgagagactgaacgccctggccgccatcgtgcagggcagcctgcccaagctgcacagaaacatcctgaccgccctgatcaccatcgacgtgcacgccagagacatcgtgaccgagctggtgcagagcaaggtggagaccgtggagagcttcgactggcagagacagctgagatactactgggacatcgacctggacaactgcgtggccagaatggccctgagccagtacacctacggctacgagtacctgggcgcctgccccagactggtgatcacccccctgaccgacagatgctacctgtgcctgatgggcgccctgcagctggacctgggcggcgcccccgccggccccgccggcaccggcaagaccgagaccaccaaggacctggccaaggccctggccatccagtgcgtggtgttcaactgcagcgacggcctggactacaagatgatgggcagattcttcagcggcctggcccagagcggcgcctggtgctgcttcgacgagttcaacagaatcgacatcgaggtgctgagcgtgatcgcccagcagctgatcaccatcagaaacgccaaggccgccaagctgagcagattcatgttcgagggcagagagatcaagctggtgatgacctgcgccgccttcatcaccatgaaccccggctacgccggcagaaccgagctgcccgacaacctgaaggccctgttcagacccttcgccatgatggtgcccaactacgccctgatcgccgaggtgatcctgtacagcgagggcttcgagagcagcaagatcctggccagaaagatgacccagatgtacaagctgtgcagcgagcagctgagccagcaggaccactacgacttcggcatgagagccgtgaagagcgtgctggtgatggccggcagcctgaagagagagaaccccgacctgaacgaggacgtggtgctgatcagagccctgcaggacagcaacctgcccaagttcctgaccgacgacgccctgctgttcagcggcatcatcagcgacctgttccccggcgtgcagatccccgagcacgactacggcatcctgcagagcaccatcgtggacgtgatgaacagacagaacctgcagcccgagatgtgcatggtgagaaaggtgatccagttctacgagaccatgctggtgagacacggcgtgatgctggtgggccccaccggcggcggcaagaccaccgtgtacagaatcctggccgagaccctgggcaacctgcagaagctgggcatcgagaacagcttctaccaggccgtgaagacctacgtgctgaaccccaagagcatcaccatgggcgagctgtacggcgaggtgaacaacctgaccctggagtggaaggacggcctgatggccctgagcgtgagagccgccgtgaacgacaccagcgaggaccacaagtggatcatcagcgacggccccgtggacgccctgtggatcgagaacatgaacaccgtgctggacgacaacaagatgctgtgcctggccaacagcgagagaatcaagctgaccccccagatccacatgctgttcgaggtgcaggacctgagagtggccagccccgccaccgtgagcagatgcggcatggtgttcgtggaccccgaggagctgaagtggatgccctacgtgaagacctggatgaagggcatcagcaagaagctgaccgaggagacccaggagtacatcctgaacctgttccagagatacgtggacgagggcctgcacttcatcaacaagaagtgcagccaggccatcccccaggtggacatcagcaaggtgaccaccctgtgctgcctgctggagagcctgatcctgggcaaggacggcgtgaacctggccatggagcagaccaagctgaacaccatcctgtgccagaccttcgtgttctgctacctgtggagcctgggcggcaacctgaccgagaactactacgacagcttcgacaccttcatcagaacccagttcgacgacaaccccgacgccagactgcccaacagcggcgacctgtggagcatccacatggacttcgacaccaagagactggacccctgggagagaatcatccccaccttcaagtacaacagagacgtgcccttcttcgagatgctggtgcccaccaccgacaccgtgagatacggctacctgatggagaagctgctggccgtgaagcacagcgtgctgttcaccggcatcaccggcgtgggcaagagcgtgatcgccaagggcctgctgaacaagatccaggagagcgccggctacgtgcccgtgtacctgaacttcagcgcccagaccagcagcgccagaacccaggagatcatcgagagcaagctggagagaaagagaaagaacatcctgggcgcccccggcaacaagagaatcgtgatcttcgtggacgacctgaacatgcccagactggacagatacggcagccagccccccatcgagctgctgagacagtaccaggacttcggcggcttctacgacagaaacaagctgttctggaaggagatccaggacgtgaccatcatcagcgcctgcgccccccccggcggcggcagaaaccccgtgacccccagattcatcagacacttcagcatgctgtgcctgcccatgcccagcgagcacagcctgaagcagatcttccaggccatcctgaacggcttcctgagcgacttcccccccgccgtgaagcagaccgccagcagcatcgtggaggccagcgtggagatctacaacaagatgagcgtggacctgctgcccacccccgccaagagccactacgtgttcaacctgagagacctgagcaagtgcgtgcagggcatcctgcagtgcgaccccggcaccatcagagaggagatccagatcttcagactgttctgccacgagtgccagagagtgttccacgacagactgatcaacaacgaggacaagcactacttccacgtgatcctgaccgagatggccaacaagcacttcggcatcgccatcgacctggagtacttcctgaacaagcccatcatcttcggcgacttcatcaagttcggcgccgacaaggccgacagaatctacgacgacatgcccgacatcgagaagaccgccaacgtgctgcaggactacctggacgactacaacctgaccaaccccaaggaggtgaagctggtgttcttccaggacgccatcgagcacgtgagcagaatcgccagaatgatcagacaggagagaggcaacgccctgctggtgggcgtgggcggcaccggcaagcagagcctgaccagactggccgcccacatctgcggctacaagtgcctgcagatcgagctgagcagaggctacaactacgacagcttccacgaggacctgagaaagctgtacaagatggccggcgtggaggacaagaacatggtgttcctgttcaccgacacccagatcgtggtggaggagttcctggaggacatcaacaacatcctgaacagcggcgaggtgcccaacctgttcgagaaggacgagctggagcaggtgctggccgccaccagacccagagccaaggaggtgggcatcagcgagggcaacagagacgaggtgttccagtacttcatcagcaaggtgagacagaagctgcacatcgtgctgtgcatgagccccgtgggcgaggccttcagaagcagatgcagaatgttccccagcctggtgaactgctgcaccatcgactggttcgtgcagtggcccagagaggccctgctgagcgtgagcaagaccttcttcagccaggtggacgccggcaacgaggagctgaaggagaagctgcccctgatgtgcgtgaacgtgcacctgagcgtgagcagcatggccgagagatactacaacgagctgagaagaagatactacaccacccccaccagctacctggagctgatcaacctgtacctgagcatgctgagcgagaagagaaagcagatcatcagcgccagagacagagtgaagaacggcctgaccaagctgctggagaccaacatcctggtggacaagatgaagctggacctgagcgccctggagcccgtgctgctggccaagagcgaggacgtggaggccctgatggagaagctggccgtggaccaggagagcgccgaccaggtgagaaacaccgtgcaggaggacgaggccaccgccaaggtgaaggccgaggagacccaggccatcgccgacgacgcccagagagacctggacgaggccctgcccgccctggacgccgccaacaaggccctggacagcctggacaaggccgacatcagcgagatcagagtgttcaccaagccccccgacctggtgatgaccgtgatggaggccatcagcatcctgctgaacgccaagcccgactggcccagcgccaagcagctgctgggcgacagcaacttcctgaagagactgctggagtacgacaaggagaacatcaagccccagatcctggccaagctgcagaagtacatcaacaaccccgacttcgtgcccgagaaggtggagaaggtgagcaaggcctgcaagagcatgtgcatgtgggtgagagccatggacctgtacagcagagtggtgaaggtggtggagcccaagagacagaagctgagagccgcccaggccgagctggacatcaccatggccaccctgagagagaagcaggccctgctgagacaggtggaggaccagatccaggccctgcaggacgagtacgacaagggcgtgaacgagaaggagagcctggccaagaccatggccctgaccaaggccagactggtgagagccggcaagctgaccgccgccctggaggacgagcaggtgagatgggaggagagcatccagaagttcgaggaggagatcagcaacatcaccggcaacgtgttcatcgccgccgcctgcgtggcctactacggcgccttcaccgcccagtacagacagagcctgatcgagtgctggatccaggactgccagagcctggagatccccatcgaccccagcttcagcctgatcaacatcctgggcgacccctacgagatcagacagtggaacaccgacggcctgcccagagacctgatcagcaccgagaacggcatcctggtgacccagggcagaagatggcccctgatgatcgacccccaggaccaggccaacagatggatcagaaacaaggagagcaagagcggcctgaagatcatcaagctgaccgacagcaacttcctgagaatcctggagaacagcatcagactgggcctgcccgtgctgctggaggagctgaaggagaccctggaccccgccctggagcccatcctgctgaagcagatcttcatcagcggcggcagactgctgatcagactgggcgacagcgacatcgactacgacaagaacttcagattctacatgaccaccaagatgcccaacccccactacctgcccgaggtgtgcatcaaggtgaccatcatcaacttcaccgtgaccaagagcggcctggaggaccagctgctgagcgacgtggtgagactggagaagcccagactggaggagcagagaatcaagctgatcgtgagaatcaacaccgacaagaaccagctgaagaccatcgaggagaagatcctgagaatgctgttcaccagcgagggcaacatcctggacaacgaggagctgatcgacaccctgcaggacagcaagatcaccagcggcgccatcaagaccagactggaggaggccgagagcaccgagcagatgatcaacgtggccagagagaagtacagacccgtggccacccagggcagcgtgatgtacttcgtgatcgccagcctgagcgagatcgaccccatgtaccagtacagcctgaagtacttcaagcagctgttcaacaccaccatcgagaccagcgtgaagaccgagaacctgcagcagagactggacgtgctgctggagcagaccctgctgaccgcctacgtgaacgtgagcagaggcctgttcgagcagcacaagctgatctacagcttcatgctgtgcgtggagatgatgagacagcagggcaccctgagcgacgccgagtggaacttcttcctgagaggcagcgccggcctggagaaggagagaccccccaagcccgaggccccctggctgcccaccgccacctggttcgcctgctgcgacctggaggagagcttccccgtgttccacggcctgacccagaacatcctgagccaccccatcagcatcagactgggcagcttcgagacctacatcaacccccagaagtgggagggctacagcaagatgaagcacgaggacaagcacatgagacaggagaaggaggccgcccaccaggacccctggagcgccggcctgagcagcttccacaagctgatcctgatcaagtgctgcaaggaggagaaggtggtgttcgccctgaccgacttcgtgatcgagaacctgggcaagcagttcatcgagaccccccccgtggacctgcccaccctgtaccaggacatgagctgcaacacccccctggtgttcatcctgagcaccggcagcgaccccatgggcgccttccagagattcgccagagagagcggctacagcgagagagtgcagagcatcagcctgggccagggccagggccccatcgccgagaagatggtgaaggacgccatgaagagcggcaactgggtgttcctgcagaactgccacctggccgtgagctggatgctggccatggaggagctgatcaagaccttcaccgaccccgacagcgccatcaaggacaccttcagactgttcctgagcagcatgcccagcaacaccttccccgtgaccgtgctgcagaacagcgtgaaggtgaccaacgagccccccaagggcctgagagccaacatcagaagagccttcaccgagatgacccccagcttcttcgaggagaacatcctgggcaagaagtggagacagatcatcttcggcatctgcttcttccacgccatcatccaggagagaaagaagttcggccccctgggctggaacatctgctacgagttcaacgacagcgacagagagtgcgccctgctgaacctgaagctgtactgcaaggagggcaagatcccctgggacgccctgatctacatcaccggcgagatcacctacggcggcagagtgaccgacagctgggaccagagatgcctgagaaccatcctgaagagattcttcagccccgagaccctggaggaggactacaagtacagcgagagcggcatctacttcgcccccatggccgacagcctgcaggagttcaaggactacatcgagaacctgcccctgatcgacgaccccgagatcttcggcatgcacgagaacgccaacctggtgttccagtacaaggagaccagcaccctgatcaacaccatcctggaggtgcagcccagaagcagcaccggcggcgagggcaagagcaacgacgagatcgtgcaggagctggtggccagcgtgcagaccagagtgcccgagaagctggagatggagggcgccagcgagagcctgttcgtgaaggacctgcagggcagactgaacagcctgaccaccgtgctgggccaggaggtggacagattcaacaacctgctgaagctgatccacaccagcctggagaccctgaacaaggccatcgccggcttcgtggtgatgagcgaggagatggagaaggtgtacaacagcttcctgaacaaccaggtgcccgccctgtggagcaacaccgcctaccccagcctgaagcccctgggcagctgggtgaaggacctgatcctgagaaccagcttcgtggacctgtggctgaagagaggccagcccaagagctactggatcagcggcttcttcttcccccagggcttcctgaccggcaccctgcagaaccacgccagaaagtacaacctgcccatcgacgagctgagcttcaagtacagcgtgatccccacctacagagaccaggccgccgtgatcgaggccgccaagaccgtgcagttcggccaggagctgcccatggacatggagctgcccagccccgaggacggcgtgctggtgcacggcatgttcatggacgccagcagatgggacgacaaggagatggtgatcgaggacgccctgcccggccagatgaaccccgtgctgcccgtggtgcacttcgagccccagcagaactacaagcccagccccaccctgtaccactgccccctgtacaagaccggcgccagagccggcaccctgagcaccaccggccacagcaccaacttcgtggtgaccgtgctgctgcccagcaagagaagcaaggactactggatcgccaagggcagcgccctgctgtgccagctgagcgagtag

SEQ ID NO: 117306 - DNA, 12666 bp, Artificial Sequence
  derived and/or modified sequence
gagtaaggatgacttttcgggccacagatagtgaatttgacctgacaaatattgaagagtatgccgaaaattctgcactttcaagactgaataatataaaagccaaacaaagagtgagttatgtgacatccacagaaaatgaatctgatacacaaatcctaacgtttaggcacattacaaaagctcaggagaagacaagaaaacgacagcagcctataaaactagagcctttgccagtgctaaaagtctaccaagatcataagcagccagaatacatacatgaacagaaccgatttcagttaatgactgcaggaatcattaaacgtccagtaagcatagcaaaaaaaagttttgccacatcatctactcagtttcttgagcatcaagatgctgtgaaaaaaatgcagattcatcggccctatgttgaggtgttctctccctctcctcctaaactgccacatactggtattggaaaaagaggtctctttgggactagatcttcagcttaccctaagtacacttttcacgaccgagaagaagttgttaaagccaacattcgtgatcccttgcaaatcattaaaataatacgtgaaaatgaacatcttggatttctttatatgatccctgcagtgccaagatcatccattgaatatgatacatataatctaaaagttgtaagttatgagaacatcaataaaaatgactactatactattagccaaagggcagtaacacacatttataatgaagacattgaatttatcgaaattgatcgatgggaacaggaatatctgtatcacagagaactcactaagattcccatattttcactgttccggaaatggaaggcttttagtgtatggaggaagaatgtccgctccaagaaaatcactggatgtcaaaaatctctacaaaaaaatttgttcattgttaatcctcatttgcgaccagctcttcttaaaataaatgaattgtgttatcatttgagttttatgggactttgttatattgaaaagtgtcacacctacaccctgcaggaatttaaggccgcacaagtcatacggctagcagaggtgacagaacgcctaggagaatttcgaaatgaggcaaaatatgtagtcaggagggcttgtcgatttgctttgcgtgctgcaggatttgttcctgatgactgtgcatttggaccttttgaggattatcataaagtgcagagcagtggaagtttcattaatacaccacatgagttgcccacttatggagactctgagaaaatgacatatacagaacaggccagcaaaaggcattattgcatgaggctgacgtgctttattcgtctaaacgactatctaattgagaacacaatgcacatcttaacggtaaatgctgttaattcgcttttgaaccatctcactgacaagctaaaacgaacaccttcagcagatgtcattcagaaatggattactgaagagaagcctgaagtccctgataaaaaggggacccttatggtggaaaagcaagaagaagatgaatctctcatccccatgtttctcacagaactaatgttgacagtccagtcactgctctttgagccttctctggaagactttctggatggtattttgggtgcagttaatcactgtcaaaacactgtgttatcagttcctaatctcgtgcctgattcgtattttgatgctttcaccagcccttatattaacaacaaacttgaaggaaaaacctgtggaactgggccaagtttagcagcagtatttgaggatgataagaattttcacacaattatttctcaaataaaggaaaccattcaggccgcatttgaatcagcccgcatctatgcagctacctttgaaaagttccagatattcttcaaggaaaatgaaagtcttgatttacaagctcttaaacttcaggaacctgatattaacttttttagtgaacaactggaaaaatatcacaaacagcacaaggacgcagtagcgctcagacccaccagaaatgtaggattgctgctcattgatactaggcttctaagagaaaaattaattccatcacctttgcgatgcttagaggtgctaaattttatgcttcctcgtcaaagcaagaaaaaagtggatgccattatctttgaggcacaagatgcagagtataaacttgagtttgttccaactactaccacagaatatgttcatagcttattatttcttgatgaaattcaggaacggattgaaagccttgaagatgaggggaatatagtgactcaaatgtacaagcttatggaacaatatcaggtgcccacacctcctgaagactttgctgtttttgcaactatgaagccatccattgttgctgttcggaatgccattgataaatcagtgggtgatagagaatcaagcattaagcaattttgtgtgcatttgggtagtgatcttgaagaattaaacaacgaagtgaatgaagtaaaactgcaagcacaggatccacagattttagatatctctgctgaccaagacaaaataaggctcatattgaataatctgcaatctgttctggctgatcttcagaaacgtgcatttcagtataagtcctatcagaagaattttaaggtagaagtgtccaagtttgaagctttggaagaagtcagtgctgaactgaagctcaaacaattgctctgggattctttctctgaatgggataaactccaacaagaatggttaaagtccaaatttgattgcctggatccagaagtcctaaacggtcaagtttctaaatatgctaaatttgtgactcaactggaaaaaggcttgccacccaacagtgtagtgccccagctcaaatacaaggtggaaaaaatgaaagaaaagcttccagttatcattgacttgaggaacccgactttgaaggcaagacattgggcagctattgaacaaacagttgatgccactctagtggatgctgaaattccattaaccttggagaggctctcccagttgcatgtttttgactttggtcaagaaatccaggacatatctggacaggcttctggagaagctgccttagaagcaattcttaaaaaggtggaggactcttggaaaacaactgaatttgtcattctgcctcaccgtgactccaaagatgtgtttatactgggcggcacagatgacatacaggtccttcttgatgatagcaccatcaatgttgcaactcttgcctcatcacgttaccttggtccactgaaaactcgagtggatgaatggcaaaaacaacttgctttatttaatcaaacactggaagagtggctgacctgccagagaaactggctctacctagaaagtattttcaatgctccagacattcagaggcaattgcctgcagaggccaagatgttccttcaggtggataagtcatggaaagaaatcatgagaaaggtgaatcggctgcctaatgctcttcgagccgctactcagccaggacttctggaaacttttcaaaacaataatgcattacttgaccaaattcagaagtgcctagaggcatacttagaatcaaaaagagttatctttccaaggttttacttcttgtcaaatgatgaacttctggagattttggcccagacacgaaatccacaggccgtgcagccacacttaaggaaatgcttcgactccatttcaaagctcgaatttgctctcatgcctcctgccgaaggaaagattcctggtattgatggagaaccagaaaaggtttatactaatgatattttagcaatgctgtcaccagagggagaaagggttagcttggggaaaggcctcaaggcccgaggcaatgtagaggaatggcttggtaaagtggaagaagccatgttcacatctctgcgtcgcctgtgcaaagctgccatcgctgactatcaggggaaactgaggacagactgggtggttgctggccacccttctcaagttatcctgactgtttctcaaattatgtggtgccgtgatttgactgaatgtctggaaacagaacacagtaatcatatacaggccctgaagaattttgaaaaagtaaattttgagagattaaatgccctagctgcaatagttcaaggcagtcttcctaaattacacagaaacatcctaactgcattgattactattgatgtgcatgcaagagatatagtcactgaacttgttcaatccaaggtggagacagttgaatcttttgactggcagagacaactgcgctattactgggatatagacctggataattgtgtggctagaatggcgctctctcagtacacttatggctatgaatatttgggtgcatgcccaagattggttattactccactcacagatcgctgctatctttgcctcatgggagctttgcagcttgaccttgggggtgcaccagctggtcctgctggcactgggaaaacagagactaccaaagatctggcaaaagctcttgccatccagtgtgtggtctttaactgttcagatggtttggactacaagatgatggggcgcttcttcagtggcttggcacagtcaggggcctggtgctgctttgatgaatttaatcgaattgacatagaagttctgtccgtcatcgcgcagcaactcattaccattaggaacgccaaagcggcaaagctctctagattcatgtttgaggggcgggaaataaagttggtgatgacttgtgcagccttcatcacaatgaatcctggctatgcagggagaactgaattgccagataatttgaaagccctgtttagaccatttgcgatgatggttccaaattatgccttgattgcagaggtaattctatattctgaaggatttgaatccagtaaaatattagcaagaaaaatgactcagatgtataagctttgcagtgagcagctgtctcagcaggatcactacgactttggcatgagagctgtgaagtctgtcctggtcatggctggatctttaaaaagagaaaacccagacctaaatgaagatgtggtgttgataagagctttacaagactccaatttgccaaaatttctaacagatgatgctcttctgttcagtggaatcatatctgacctttttcctggagtccaaattccagaacatgattatggtattttacaatcaacaattgtggatgtcatgaatagacaaaatcttcagcctgagatgtgtatggttagaaaggtgatacagttttatgaaactatgctagtaaggcatggtgttatgttagtcgggccaacaggaggcggcaagaccacagtttaccgaatactagcagaaactttagggaatttacaaaaacttgggatagaaaattccttttaccaagcagttaaaacatatgttctcaaccctaaatcaattaccatgggtgaattatatggagaggttaataacttaaccttggaatggaaagatggtttgatggcactaagtgtccgagcagctgtgaatgatacttcagaagaccataaatggatcatcagtgatgggccagtagatgctctttggattgaaaacatgaatacagtgctggatgataacaagatgctttgcctggctaacagtgagaggattaaactcacacctcaaattcacatgctttttgaggtgcaagatctgcgggttgcctcccctgcaacagtcagtcgatgtggaatggtgtttgtggatcctgaagaactgaaatggatgccttatgttaaaacttggatgaagggtatttctaaaaaactgactgaggaaacccaagaatatatattgaatcttttccaacgttatgttgatgaaggtttacattttatcaataaaaagtgcagccaagcaattccacaagtggacatcagcaaagttactacactctgttgcttattggagtccttgatacttgggaaagatggagttaacttggcaatggaacaaacaaaattgaacactatactatgtcagacttttgtattctgttatttgtggtctttgggtggaaacctaactgaaaactactatgattcttttgatacatttattagaacacaatttgatgataatcctgatgccaggcttcccaattctggtgatctgtggagcattcatatggactttgacaccaaacggctggatccctgggaacgaatcatacctactttcaaatacaaccgagatgttccattttttgaaatgcttgtccccacaactgacacagtgcgctatgggtatctaatggaaaaactactggcagtcaagcattccgtgttgtttactggaataactggagtgggcaagtctgtgattgcaaaaggattgctaaataaaattcaagaatcagctggctatgtccctgtttatctaaatttttctgctcaaacttcatctgcaaggacacaagagatcattgagtcaaaactggagagaaaaagaaaaaatattctaggagcaccgggaaacaaacgaattgtgatttttgttgatgatttaaacatgcccagactggatcgctatggctctcagcctccgattgaattacttcggcagtatcaagattttgggggattttatgacagaaacaaactgttttggaaagaaatacaggatgtaacaatcatatcggcatgtgcacctccaggcggtggccgcaaccctgtgactccccgcttcatcagacacttcagcatgctgtgcctcccaatgccctcagagcacagtctgaaacagatttttcaggccatcttaaatggtttcctgagtgactttccaccagctgtaaagcaaactgcatcaagcattgtagaagcctcagttgagatttataacaaaatgagtgttgacctcctgccaacacccgccaagtcccattatgtctttaacttgagggacttatccaaatgtgtgcaaggtatcctccaatgtgatccaggaacaataagagaagaaattcagatatttagactcttttgccatgagtgccaaagggtcttccatgatcgcttgattaataatgaagataagcactatttccatgttattctgacagaaatggccaacaaacattttggaattgcaattgacctggaatattttttgaataagcccatcatatttggagatttcattaagtttggagcagataaagctgatcggatttatgatgacatgcctgatatagagaaaactgcaaatgttctacaggactatcttgatgattataatctcacaaatcccaaagaagtaaagttggtgttcttccaggatgctatagaacatgtttcaaggattgctcggatgatacgtcaagaaagaggcaatgccctgcttgttggagtaggaggcacaggaaagcagtcactcacgagacttgcagctcatatatgcggttacaaatgtttgcagattgaactcagccggggatataattatgatagttttcatgaagacctgaggaagttgtacaaaatggctggtgtagaagacaagaatatggttttccttttcactgacacccagattgtagtggaggagttcctagaagatataaataacatcctgaactcaggtgaagtgcctaatttatttgaaaaggatgaactggagcaggttttagcggccaccagaccaagagcaaaagaagtaggaatttctgaggggaacagagacgaggtgtttcaatactttatcagcaaagtgcgtcagaagctgcacattgttctctgcatgagcccagttggggaggcctttcggtcccgatgcaggatgtttccatcccttgtgaattgctgcaccattgactggtttgtgcagtggcccagagaagcacttctttctgtgtcaaagacatttttctcacaagtcgatgctggaaatgaagaactgaaagaaaagcttcccttgatgtgcgtgaacgttcacttgagtgtctccagcatggcagagcgctattacaatgagctgcgcaggcggtactacacgacacccacctcctacctggagcttatcaatctttacctgtctatgctgtctgaaaaaaggaagcagattatttcagcacgagatcgggtgaagaatggtctcaccaagctactagaaacaaacatactagtagataaaatgaaactagatctttcagctttagagcctgtacttttagcaaaatcagaagatgttgaagccctgatggaaaaattggcagtggatcaagaaagtgccgatcaggtccgtaacactgtgcaggaggatgaagcaacagcaaaagtcaaagctgaagaaacccaagcaatagctgatgatgctcaaagagatcttgacgaggcactacctgcactagatgctgccaataaagcactggattccttagataaggcagatatatctgaaatcagagtttttacaaagcccccagatttggtcatgacagtaatggaagcaatctccattcttttgaatgccaagcctgattggccatcagcaaagcaacttcttggtgactctaactttctaaaaaggcttttagaatatgataaggagaacataaagcctcagatattggcaaagcttcaaaagtatattaataatcctgattttgtgcctgaaaaagtggagaaagtgtccaaagcatgtaaatctatgtgcatgtgggtaagagctatggatttgtactctcgagtggtcaaggtcgtcgaaccaaaaagacaaaagctccgcgccgcacaggctgaacttgacattaccatggctaccctgagagaaaagcaagcattactaagacaagtagaagatcaaatacaggccttacaagatgaatatgacaaaggtgtaaatgaaaaagaaagcctggcaaagaccatggccctgacaaaagcacgtctagtacgtgctggaaagctgacagcagcattagaagatgagcaggttcgatgggaagaaagcatacagaagtttgaggaagaaatatcaaatatcactgggaacgtgttcatagcagcagcttgtgtggcctactatggggctttcacagcccagtacaggcagtcacttatagagtgttggatccaggactgtcagtctctggagatcccaatcgatccttccttcagtctcattaacattcttggagatccctacgagatacggcagtggaacactgatgggctgccccgtgacttgatatcaacagaaaatggcattttggttactcaaggcagaagatggcctttgatgattgatccccaagatcaggcaaaccgttggataaggaacaaggaaagcaaaagtggtttaaagatcattaagcttacagatagtaatttcttacgaatactcgagaattcaatccgacttggtttacctgtcttactggaagagcttaaggaaaccttggatccagctctagaacccattcttttgaaacaaatttttatcagtggtggccgactactcatccgtcttggagactcagacattgattatgacaaaaactttaggttctatatgacaaccaaaatgccaaatccccactatctgcctgaggtatgcattaaagttaccattatcaatttcactgtaacaaaatcaggcctggaggatcagttgttaagtgatgtggtgcgacttgaaaaacccaggttggaagaacaaagaattaagctcatcgtgaggatcaacactgataaaaaccagttgaaaactatcgaagagaaaatcctgagaatgctctttacctctgaaggaaatattctggacaatgaagaacttattgacacactccaggattcaaagatcacttctggtgccattaaaaccaggctggaagaagcagagtccactgagcagatgatcaatgtggctcgtgagaagtatcgtccagtggccactcaaggctctgtaatgtactttgtcattgcaagcctctcagaaatagatcctatgtaccagtactcattaaaatactttaaacagttgttcaataccaccattgaaacttctgtaaagacagaaaatctacaacagcgcctggacgtactactagaacaaactctcctaactgcttatgtcaatgtttcaagaggactttttgagcaacataaactcatctacagctttatgctttgtgttgagatgatgcgtcagcaaggaaccctatctgatgctgaatggaatttctttctccgaggttctgcaggattggaaaaggaacgcccacctaagcctgaagctccctggctacctactgctacatggttcgcatgctgtgacttggaagaatcatttccagtttttcacggacttacccaaaatatattgtcacatcctatttccatacgcttaggatcttttgagacttatattaacccacagaaatgggaaggctattctaaaatgaaacacgaagataaacacatgagacaggaaaaggaggcagcacaccaagatccatggagtgcaggattgagttctttccataagctaattcttattaaatgttgtaaagaagaaaaggtggtttttgctcttacagactttgtgatagaaaatcttggaaaacagtttatagagacaccacctgtggacctgcctaccctgtatcaagacatgtcatgcaacactcccctggtattcatcctaagcacaggctcagatcccatgggtgcatttcagaggtttgccagggaaagtggatattcagaacgggtgcagtcaatttcactggggcaaggacaaggacctattgctgaaaaaatggtcaaggatgcaatgaaatcaggaaactgggtatttttgcaaaattgccatcttgctgtttcttggatgttggcaatggaagagctcattaaaaccttcacagatccagatagtgctatcaaggacacttttcgactttttttaagctccatgcctagtaatacatttcctgttacagttcttcaaaattctgtcaaggtgaccaatgagcctccaaaaggcttacgtgcaaatatcagacgagcatttactgaaatgacaccttcgttttttgaagaaaatatacttggaaaaaaatggagacaaataatatttggcatttgtttcttccatgcaattattcaggagagaaagaagtttggcccccttggttggaatatctgctatgaatttaatgacagtgacagggaatgtgctttactgaatctcaaactctattgtaaagaaggaaagattccctgggatgcactaatttacattactggtgaaattacttatggtggtagagtcacagacagctgggaccaaagatgccttcgtactatcttgaaaagatttttttctcctgaaacattagaagaagattataaatactctgaatcaggcatctattttgcacccatggctgacagcctacaagagtttaaggactacattgaaaatctgcctttgatcgatgacccagaaatttttggaatgcatgaaaatgctaatctagtcttccagtacaaagagaccagcactttaatcaacaccatacttgaggttcagccaaggtcatctactggtggagagggaaaaagcaatgacgaaattgttcaagaacttgttgcttctgtccagaccagagttccagaaaaactggaaatggagggtgcttctgagagcctttttgtcaaggatcttcaaggacgtctgaactccttgaccaccgttcttggacaggaagtggaccggtttaacaacctgctgaagttaattcatacttctctggaaacactcaacaaagccatcgctggatttgtggtgatgtctgaagaaatggaaaaagtgtataacagtttcctcaacaaccaggttcccgctctgtggtccaacacagcctacccatccctgaagccactaggatcatgggtcaaagaccttatcctgaggacctcatttgtggatctgtggctcaaaagaggacagcctaagtcctactggatctctggtttcttctttcctcaaggatttctaacaggaactcttcaaaatcatgctcgaaaatacaatttgcctatagatgagctgagtttcaaatacagcgtaattcccacctatcgggatcaagctgcagtgatagaagctgccaagacagtgcaatttggacaagaactgcccatggacatggagttgccctctcctgaggatggtgttcttgttcatgggatgttcatggatgcttctcgatgggatgataaggagatggtgatagaagatgcattgcccggacagatgaatccagtgctgcctgtggtgcattttgaaccacaacaaaactataagccaagcccaacactttaccactgcccactttataaaacaggagcccgggcaggaacactctcaaccacaggacattcaaccaattttgtggtaaccgtcctgttaccctccaagcggtccaaagactactggattgccaagggatcagctttgctctgccagctgagcgaatgaaaaggtgccacctcagccctgaaaaagaaccaggccagagatctttcctaatgggagcaaaaggtttgaataatttatatgtgagcaaaacggtgttaattctgatttgacttaaacgtattgtgacttttatttctcttatgaccttaaaataaagtgtttgagttctttctgttggcaa

SEQ ID NO: 117307 - DNA, 12795 bp, Artificial Sequence
  derived and/or modified sequence
gcttccgtagaggccagctggttgctacgcagcaacaggaaacattccgcgctaccgagtactttctactcccgaccaggcattgctctctctggagaccctcggcggtggttgctgtattttgacttggagtaaggatgacttttcgggccacagatagtgaatttgacctgacaaatattgaagagtatgccgaaaattctgcactttcaagactgaataatataaaagccaaacaaagagtgagttatgtgacatccacagaaaatgaatctgatacacaaatcctaacgtttaggcacattacaaaagctcaggagaagacaagaaaacgacagcagcctataaaactagagcctttgccagtgctaaaagtctaccaagatcataagcagccagaatacatacatgaacagaaccgatttcagttaatgactgcaggaatcattaaacgtccagtaagcatagcaaaaaaaagttttgccacatcatctactcagtttcttgagcatcaagatgctgtgaaaaaaatgcagattcatcggccctatgttgaggtgttctctccctctcctcctaaactgccacatactggtattggaaaaagaggtctctttgggactagatcttcagcttaccctaagtacacttttcacgaccgagaagaagttgttaaagccaacattcgtgatcccttgcaaatcattaaaataatacgtgaaaatgaacatcttggatttctttatatgatccctgcagtgccaagatcatccattgaatatgatacatataatctaaaagttgtaagttatgagaacatcaataaaaatgactactatactattagccaaagggcagtaacacacatttataatgaagacattgaatttatcgaaattgatcgatgggaacaggaatatctgtatcacagagaactcactaagattcccatattttcactgttccggaaatggaaggcttttagtgtatggaggaagaatgtccgctccaagaaaatcactggatgtcaaaaatctctacaaaaaaatttgttcattgttaatcctcatttgcgaccagctcttcttaaaataaatgaattgtgttatcatttgagttttatgggactttgttatattgaaaagtgtcacacctacaccctgcaggaatttaaggccgcacaagtcatacggctagcagaggtgacagaacgcctaggagaatttcgaaatgaggcaaaatatgtagtcaggagggcttgtcgatttgctttgcgtgctgcaggatttgttcctgatgactgtgcatttggaccttttgaggattatcataaagtgcagagcagtggaagtttcattaatacaccacatgagttgcccacttatggagactctgagaaaatgacatatacagaacaggccagcaaaaggcattattgcatgaggctgacgtgctttattcgtctaaacgactatctaattgagaacacaatgcacatcttaacggtaaatgctgttaattcgcttttgaaccatctcactgacaagctaaaacgaacaccttcagcagatgtcattcagaaatggattactgaagagaagcctgaagtccctgataaaaaggggacccttatggtggaaaagcaagaagaagatgaatctctcatccccatgtttctcacagaactaatgttgacagtccagtcactgctctttgagccttctctggaagactttctggatggtattttgggtgcagttaatcactgtcaaaacactgtgttatcagttcctaatctcgtgcctgattcgtattttgatgctttcaccagcccttatattaacaacaaacttgaaggaaaaacctgtggaactgggccaagtttagcagcagtatttgaggatgataagaattttcacacaattatttctcaaataaaggaaaccattcaggccgcatttgaatcagcccgcatctatgcagctacctttgaaaagttccagatattcttcaaggaaaatgaaagtcttgatttacaagctcttaaacttcaggaacctgatattaacttttttagtgaacaactggaaaaatatcacaaacagcacaaggacgcagtagcgctcagacccaccagaaatgtaggattgctgctcattgatactaggcttctaagagaaaaattaattccatcacctttgcgatgcttagaggtgctaaattttatgcttcctcgtcaaagcaagaaaaaagtggatgccattatctttgaggcacaagatgcagagtataaacttgagtttgttccaactactaccacagaatatgttcatagcttattatttcttgatgaaattcaggaacggattgaaagccttgaagatgaggggaatatagtgactcaaatgtacaagcttatggaacaatatcaggtgcccacacctcctgaagactttgctgtttttgcaactatgaagccatccattgttgctgttcggaatgccattgataaatcagtgggtgatagagaatcaagcattaagcaattttgtgtgcatttgggtagtgatcttgaagaattaaacaacgaagtgaatgaagtaaaactgcaagcacaggatccacagattttagatatctctgctgaccaagacaaaataaggctcatattgaataatctgcaatctgttctggctgatcttcagaaacgtgcatttcagtataagtcctatcagaagaattttaaggtagaagtgtccaagtttgaagctttggaagaagtcagtgctgaactgaagctcaaacaattgctctgggattctttctctgaatgggataaactccaacaagaatggttaaagtccaaatttgattgcctggatccagaagtcctaaacggtcaagtttctaaatatgctaaatttgtgactcaactggaaaaaggcttgccacccaacagtgtagtgccccagctcaaatacaaggtggaaaaaatgaaagaaaagcttccagttatcattgacttgaggaacccgactttgaaggcaagacattgggcagctattgaacaaacagttgatgccactctagtggatgctgaaattccattaaccttggagaggctctcccagttgcatgtttttgactttggtcaagaaatccaggacatatctggacaggcttctggagaagctgccttagaagcaattcttaaaaaggtggaggactcttggaaaacaactgaatttgtcattctgcctcaccgtgactccaaagatgtgtttatactgggcggcacagatgacatacaggtccttcttgatgatagcaccatcaatgttgcaactcttgcctcatcacgttaccttggtccactgaaaactcgagtggatgaatggcaaaaacaacttgctttatttaatcaaacactggaagagtggctgacctgccagagaaactggctctacctagaaagtattttcaatgctccagacattcagaggcaattgcctgcagaggccaagatgttccttcaggtggataagtcatggaaagaaatcatgagaaaggtgaatcggctgcctaatgctcttcgagccgctactcagccaggacttctggaaacttttcaaaacaataatgcattacttgaccaaattcagaagtgcctagaggcatacttagaatcaaaaagagttatctttccaaggttttacttcttgtcaaatgatgaacttctggagattttggcccagacacgaaatccacaggccgtgcagccacacttaaggaaatgcttcgactccatttcaaagctcgaatttgctctcatgcctcctgccgaaggaaagattcctggtattgatggagaaccagaaaaggtttatactaatgatattttagcaatgctgtcaccagagggagaaagggttagcttggggaaaggcctcaaggcccgaggcaatgtagaggaatggcttggtaaagtggaagaagccatgttcacatctctgcgtcgcctgtgcaaagctgccatcgctgactatcaggggaaactgaggacagactgggtggttgctggccacccttctcaagttatcctgactgtttctcaaattatgtggtgccgtgatttgactgaatgtctggaaacagaacacagtaatcatatacaggccctgaagaattttgaaaaagtaaattttgagagattaaatgccctagctgcaatagttcaaggcagtcttcctaaattacacagaaacatcctaactgcattgattactattgatgtgcatgcaagagatatagtcactgaacttgttcaatccaaggtggagacagttgaatcttttgactggcagagacaactgcgctattactgggatatagacctggataattgtgtggctagaatggcgctctctcagtacacttatggctatgaatatttgggtgcatgcccaagattggttattactccactcacagatcgctgctatctttgcctcatgggagctttgcagcttgaccttgggggtgcaccagctggtcctgctggcactgggaaaacagagactaccaaagatctggcaaaagctcttgccatccagtgtgtggtctttaactgttcagatggtttggactacaagatgatggggcgcttcttcagtggcttggcacagtcaggggcctggtgctgctttgatgaatttaatcgaattgacatagaagttctgtccgtcatcgcgcagcaactcattaccattaggaacgccaaagcggcaaagctctctagattcatgtttgaggggcgggaaataaagttggtgatgacttgtgcagccttcatcacaatgaatcctggctatgcagggagaactgaattgccagataatttgaaagccctgtttagaccatttgcgatgatggttccaaattatgccttgattgcagaggtaattctatattctgaaggatttgaatccagtaaaatattagcaagaaaaatgactcagatgtataagctttgcagtgagcagctgtctcagcaggatcactacgactttggcatgagagctgtgaagtctgtcctggtcatggctggatctttaaaaagagaaaacccagacctaaatgaagatgtggtgttgataagagctttacaagactccaatttgccaaaatttctaacagatgatgctcttctgttcagtggaatcatatctgacctttttcctggagtccaaattccagaacatgattatggtattttacaatcaacaattgtggatgtcatgaatagacaaaatcttcagcctgagatgtgtatggttagaaaggtgatacagttttatgaaactatgctagtaaggcatggtgttatgttagtcgggccaacaggaggcggcaagaccacagtttaccgaatactagcagaaactttagggaatttacaaaaacttgggatagaaaattccttttaccaagcagttaaaacatatgttctcaaccctaaatcaattaccatgggtgaattatatggagaggttaataacttaaccttggaatggaaagatggtttgatggcactaagtgtccgagcagctgtgaatgatacttcagaagaccataaatggatcatcagtgatgggccagtagatgctctttggattgaaaacatgaatacagtgctggatgataacaagatgctttgcctggctaacagtgagaggattaaactcacacctcaaattcacatgctttttgaggtgcaagatctgcgggttgcctcccctgcaacagtcagtcgatgtggaatggtgtttgtggatcctgaagaactgaaatggatgccttatgttaaaacttggatgaagggtatttctaaaaaactgactgaggaaacccaagaatatatattgaatcttttccaacgttatgttgatgaaggtttacattttatcaataaaaagtgcagccaagcaattccacaagtggacatcagcaaagttactacactctgttgcttattggagtccttgatacttgggaaagatggagttaacttggcaatggaacaaacaaaattgaacactatactatgtcagacttttgtattctgttatttgtggtctttgggtggaaacctaactgaaaactactatgattcttttgatacatttattagaacacaatttgatgataatcctgatgccaggcttcccaattctggtgatctgtggagcattcatatggactttgacaccaaacggctggatccctgggaacgaatcatacctactttcaaatacaaccgagatgttccattttttgaaatgcttgtccccacaactgacacagtgcgctatgggtatctaatggaaaaactactggcagtcaagcattccgtgttgtttactggaataactggagtgggcaagtctgtgattgcaaaaggattgctaaataaaattcaagaatcagctggctatgtccctgtttatctaaatttttctgctcaaacttcatctgcaaggacacaagagatcattgagtcaaaactggagagaaaaagaaaaaatattctaggagcaccgggaaacaaacgaattgtgatttttgttgatgatttaaacatgcccagactggatcgctatggctctcagcctccgattgaattacttcggcagtatcaagattttgggggattttatgacagaaacaaactgttttggaaagaaatacaggatgtaacaatcatatcggcatgtgcacctccaggcggtggccgcaaccctgtgactccccgcttcatcagacacttcagcatgctgtgcctcccaatgccctcagagcacagtctgaaacagatttttcaggccatcttaaatggtttcctgagtgactttccaccagctgtaaagcaaactgcatcaagcattgtagaagcctcagttgagatttataacaaaatgagtgttgacctcctgccaacacccgccaagtcccattatgtctttaacttgagggacttatccaaatgtgtgcaaggtatcctccaatgtgatccaggaacaataagagaagaaattcagatatttagactcttttgccatgagtgccaaagggtcttccatgatcgcttgattaataatgaagataagcactatttccatgttattctgacagaaatggccaacaaacattttggaattgcaattgacctggaatattttttgaataagcccatcatatttggagatttcattaagtttggagcagataaagctgatcggatttatgatgacatgcctgatatagagaaaactgcaaatgttctacaggactatcttgatgattataatctcacaaatcccaaagaagtaaagttggtgttcttccaggatgctatagaacatgtttcaaggattgctcggatgatacgtcaagaaagaggcaatgccctgcttgttggagtaggaggcacaggaaagcagtcactcacgagacttgcagctcatatatgcggttacaaatgtttgcagattgaactcagccggggatataattatgatagttttcatgaagacctgaggaagttgtacaaaatggctggtgtagaagacaagaatatggttttccttttcactgacacccagattgtagtggaggagttcctagaagatataaataacatcctgaactcaggtgaagtgcctaatttatttgaaaaggatgaactggagcaggttttagcggccaccagaccaagagcaaaagaagtaggaatttctgaggggaacagagacgaggtgtttcaatactttatcagcaaagtgcgtcagaagctgcacattgttctctgcatgagcccagttggggaggcctttcggtcccgatgcaggatgtttccatcccttgtgaattgctgcaccattgactggtttgtgcagtggcccagagaagcacttctttctgtgtcaaagacatttttctcacaagtcgatgctggaaatgaagaactgaaagaaaagcttcccttgatgtgcgtgaacgttcacttgagtgtctccagcatggcagagcgctattacaatgagctgcgcaggcggtactacacgacacccacctcctacctggagcttatcaatctttacctgtctatgctgtctgaaaaaaggaagcagattatttcagcacgagatcgggtgaagaatggtctcaccaagctactagaaacaaacatactagtagataaaatgaaactagatctttcagctttagagcctgtacttttagcaaaatcagaagatgttgaagccctgatggaaaaattggcagtggatcaagaaagtgccgatcaggtccgtaacactgtgcaggaggatgaagcaacagcaaaagtcaaagctgaagaaacccaagcaatagctgatgatgctcaaagagatcttgacgaggcactacctgcactagatgctgccaataaagcactggattccttagataaggcagatatatctgaaatcagagtttttacaaagcccccagatttggtcatgacagtaatggaagcaatctccattcttttgaatgccaagcctgattggccatcagcaaagcaacttcttggtgactctaactttctaaaaaggcttttagaatatgataaggagaacataaagcctcagatattggcaaagcttcaaaagtatattaataatcctgattttgtgcctgaaaaagtggagaaagtgtccaaagcatgtaaatctatgtgcatgtgggtaagagctatggatttgtactctcgagtggtcaaggtcgtcgaaccaaaaagacaaaagctccgcgccgcacaggctgaacttgacattaccatggctaccctgagagaaaagcaagcattactaagacaagtagaagatcaaatacaggccttacaagatgaatatgacaaaggtgtaaatgaaaaagaaagcctggcaaagaccatggccctgacaaaagcacgtctagtacgtgctggaaagctgacagcagcattagaagatgagcaggttcgatgggaagaaagcatacagaagtttgaggaagaaatatcaaatatcactgggaacgtgttcatagcagcagcttgtgtggcctactatggggctttcacagcccagtacaggcagtcacttatagagtgttggatccaggactgtcagtctctggagatcccaatcgatccttccttcagtctcattaacattcttggagatccctacgagatacggcagtggaacactgatgggctgccccgtgacttgatatcaacagaaaatggcattttggttactcaaggcagaagatggcctttgatgattgatccccaagatcaggcaaaccgttggataaggaacaaggaaagcaaaagtggtttaaagatcattaagcttacagatagtaatttcttacgaatactcgagaattcaatccgacttggtttacctgtcttactggaagagcttaaggaaaccttggatccagctctagaacccattcttttgaaacaaatttttatcagtggtggccgactactcatccgtcttggagactcagacattgattatgacaaaaactttaggttctatatgacaaccaaaatgccaaatccccactatctgcctgaggtatgcattaaagttaccattatcaatttcactgtaacaaaatcaggcctggaggatcagttgttaagtgatgtggtgcgacttgaaaaacccaggttggaagaacaaagaattaagctcatcgtgaggatcaacactgataaaaaccagttgaaaactatcgaagagaaaatcctgagaatgctctttacctctgaaggaaatattctggacaatgaagaacttattgacacactccaggattcaaagatcacttctggtgccattaaaaccaggctggaagaagcagagtccactgagcagatgatcaatgtggctcgtgagaagtatcgtccagtggccactcaaggctctgtaatgtactttgtcattgcaagcctctcagaaatagatcctatgtaccagtactcattaaaatactttaaacagttgttcaataccaccattgaaacttctgtaaagacagaaaatctacaacagcgcctggacgtactactagaacaaactctcctaactgcttatgtcaatgtttcaagaggactttttgagcaacataaactcatctacagctttatgctttgtgttgagatgatgcgtcagcaaggaaccctatctgatgctgaatggaatttctttctccgaggttctgcaggattggaaaaggaacgcccacctaagcctgaagctccctggctacctactgctacatggttcgcatgctgtgacttggaagaatcatttccagtttttcacggacttacccaaaatatattgtcacatcctatttccatacgcttaggatcttttgagacttatattaacccacagaaatgggaaggctattctaaaatgaaacacgaagataaacacatgagacaggaaaaggaggcagcacaccaagatccatggagtgcaggattgagttctttccataagctaattcttattaaatgttgtaaagaagaaaaggtggtttttgctcttacagactttgtgatagaaaatcttggaaaacagtttatagagacaccacctgtggacctgcctaccctgtatcaagacatgtcatgcaacactcccctggtattcatcctaagcacaggctcagatcccatgggtgcatttcagaggtttgccagggaaagtggatattcagaacgggtgcagtcaatttcactggggcaaggacaaggacctattgctgaaaaaatggtcaaggatgcaatgaaatcaggaaactgggtatttttgcaaaattgccatcttgctgtttcttggatgttggcaatggaagagctcattaaaaccttcacagatccagatagtgctatcaaggacacttttcgactttttttaagctccatgcctagtaatacatttcctgttacagttcttcaaaattctgtcaaggtgaccaatgagcctccaaaaggcttacgtgcaaatatcagacgagcatttactgaaatgacaccttcgttttttgaagaaaatatacttggaaaaaaatggagacaaataatatttggcatttgtttcttccatgcaattattcaggagagaaagaagtttggcccccttggttggaatatctgctatgaatttaatgacagtgacagggaatgtgctttactgaatctcaaactctattgtaaagaaggaaagattccctgggatgcactaatttacattactggtgaaattacttatggtggtagagtcacagacagctgggaccaaagatgccttcgtactatcttgaaaagatttttttctcctgaaacattagaagaagattataaatactctgaatcaggcatctattttgcacccatggctgacagcctacaagagtttaaggactacattgaaaatctgcctttgatcgatgacccagaaatttttggaatgcatgaaaatgctaatctagtcttccagtacaaagagaccagcactttaatcaacaccatacttgaggttcagccaaggtcatctactggtggagagggaaaaagcaatgacgaaattgttcaagaacttgttgcttctgtccagaccagagttccagaaaaactggaaatggagggtgcttctgagagcctttttgtcaaggatcttcaaggacgtctgaactccttgaccaccgttcttggacaggaagtggaccggtttaacaacctgctgaagttaattcatacttctctggaaacactcaacaaagccatcgctggatttgtggtgatgtctgaagaaatggaaaaagtgtataacagtttcctcaacaaccaggttcccgctctgtggtccaacacagcctacccatccctgaagccactaggatcatgggtcaaagaccttatcctgaggacctcatttgtggatctgtggctcaaaagaggacagcctaagtcctactggatctctggtttcttctttcctcaaggatttctaacaggaactcttcaaaatcatgctcgaaaatacaatttgcctatagatgagctgagtttcaaatacagcgtaattcccacctatcgggatcaagctgcagtgatagaagctgccaagacagtgcaatttggacaagaactgcccatggacatggagttgccctctcctgaggatggtgttcttgttcatgggatgttcatggatgcttctcgatgggatgataaggagatggtgatagaagatgcattgcccggacagatgaatccagtgctgcctgtggtgcattttgaaccacaacaaaactataagccaagcccaacactttaccactgcccactttataaaacaggagcccgggcaggaacactctcaaccacaggacattcaaccaattttgtggtaaccgtcctgttaccctccaagcggtccaaagactactggattgccaagggatcagctttgctctgccagctgagcgaatgaaaaggtgccacctcagccctgaaaaagaaccaggccagagatctttcctaatgggagcaaaaggtttgaataatttatatgtgagcaaaacggtgttaattctgatttgacttaaacgtattgtgacttttatttctcttatgaccttaaaataaagtgtttgagttctttctgttggcaa

SEQ ID NO: 117308 - protein, 4486 aa, Artificial Sequence
  derived and/or modified sequence
MRLAEERAALAAENADGEPGADRRLRLLGTYVAMSLRPAAGAWERCAGSAEAEQLLQAFLGRDAAEGPRPLLVVRPGPRGLAIRPGLEVGPESGLAGAKALFFLRTGPEPPGPDSFRGAVVCGDLPAAPLEHLAALFSEVVLPVLANEKNRLNWPHMICEDVRRHAHSLQCDLSVILEQVKGKTLLPLPAGSEKMEFADSKSETVLDSIDKSVIYAIESAVIKWSYQVQVVLKRESSQPLLQGENPTPKVELEFWKSRYEDLKYIYNQLRTITVRGMAKLLDKLQSSYFPAFKAMYRDVVAALAEAQDIHVHLIPLQRHLEALENAEFPEVKPQLRPLLHVVCLIWATCKSYRSPGRLTVLLQEICNLLIQQASNYLSPEDLLRSEVEESQRKLQVVSDTLSFFKQEFQDRRENLHTYFKENQEVKEWDFQSSLVFVRLDGFLGQLHVVEGLLKTALDFHKLGKVEFSGVRGNALSQQVQQMHEEFQEMYRLLSGSSSDCLYLQSTDFENDVSEFNQKVEDLDRRLGTIFIQAFDDAPGLEHAFKLLDIAGNLLERPLVARDTSDKYLVLIQMFNKDLDAVRMIYSQHVQEEAELGFSPVHKNMPTVAGGLRWAQELRQRIQGPFSNFGRITHPCMESAEGKRMQQKYEDMLSLLEKYETRLYEDWCRTVSEKSQYNLSQPLLKRDPETKEITINFNPQLISVLKEMSYLEPREMKHMPETAAAMFSSRDFYRQLVANLELMANWYNKVMKTLLEVEFPLVEEELQNIDLRLRAAEETLNWKTEGICDYVTEITSSIHDLEQRIQKTKDNVEEIQNIMKTWVTPIFKTKDGKRESLLSLDDRHDRMEKYYNLIKESGLKIHALVQENLGLFSADPTSNIWKTYVNSIDNLLLNGFFLAIECSLKYLLENTECKAGLTPIFEAQLSLAIPELVFYPSLESGVKGGFCDIVEGLITSIFRIPSLVPRLSPQNGSPHYQVDLDGIPDLANMRRTLMERVQRMMGLCCGYQSTFSQYSYLYVEDRKEVLGQFLLYGHILTPEEIEDHVEDGIPENPPLLSQFKVQIDSYETLYEEVCRLEPIKVFDGWMKIDIRPFKASLLNIIKRWSLLFKQHLVDHVTHSLANLDAFIKKSESGLLKKVEKGDFQGLVEIMGHLMAVKERQSNTDEMFEPLKQTIELLKTYEQELPETVFKQLEELPEKWNNIKKVAITVKQQVAPLQANEVTLLRQRCTAFDAEQQQFWEQFHKEAPFRFDSIHPHQMLDARHIEIQQMESTMASISESASLFEVNVPDYKQLRQCRKEVCQLKELWDTIGMVTSSIHAWETTPWRNINVEAMELECKQFARHIRNLDKEVRAWDAFTGLESTVWNTLSSLRAVAELQNPAIRERHWRQLMQATGVSFTMDQDTTLAHLLQLQLHHYEDEVRGIVDKAAKEMGMEKTLKELQTTWAGMEFQYEPHPRTNVPLLCSDEDLIEVLEDNQVQLQNLVMSKYVAFFLEEVSGWQKKLSTVDAVISIWFEVQRTWTHLESIFTGSEDIRAQLPQDSKRFEGIDIDFKELAYDAQKIPNVVQTTNKPGLYEKLEDIQGRLCLCEKALAEYLDTKRLAFPRFYFLSSSDLLDILSNGTAPQQVQRHLSKLFDNMAKMRFQLDASGEPTKTSLGMYSKEEEYVAFSEPCDCSGQVEIWLNHVLGHMKATVRHEMTEGVTAYEEKPREQWLFDHPAQVALTCTQIWWTTEVGMAFARLEEGYESAMKDYYKKQVAQLKTLITMLIGQLSKGDRQKIMTICTIDVHARDVVAKMIAQKVDNAQAFLWLSQLRHRWDDEVKHCFANICDAQFLYSYEYLGNTPRLVITPLTDRCYITLTQSLHLTMSGAPAGPAGTGKTETTKDLGRALGILVYVFNCSEQMDYKSCGNIYKGLAQTGAWGCFDEFNRISVEVLSVVAVQVKSIQDAIRDKKQWFSFLGEEISLNPSVGIFITMNPGYAGRTELPENLKSLFRPCAMVVPDFELICEIMLVAEGFIEAQSLARKFITLYQLCKELLSKQDHYDWGLRAIKSVLVVAGSLKRGDPDRPEDQVLMRSLRDFNIPKIVTDDMPIFMGLIGDLFPALDVPRRRDPNFEALVRKAIVDLKLQAEDNFVLKVVQLEELLAVRHSVFVVGGAGTGKSQVLRSLHKTYQIMKRRPVWTDLNPKAVTNDELFGIINPATGEWKDGLFSSIMRELANITHDGPKWILLDGDIDPMWIESLNTVMDDNKVLTLASNERIPLNPTMKLLFEISHLRTATPATVSRAGILYINPADLGWNPPVSSWIEKREIQTERANLTILFDKYLPTCLDTLRTRFKKIIPIPEQSMVQMVCHLLECLLTTEDIPADCPKEIYEHYFVFAAIWAFGGAMVQDQLVDYRAEFSKWWLTEFKTVKFPSQGTIFDYYIDPETKKFEPWSKLVPQFEFDPEMPLQACLVHTSETIRVCYFMERLMARQRPVMLVGTAGTGKSVLVGAKLASLDPEAYLVKNVPFNYYTTSAMLQAVLEKPLEKKAGRNYGPPGNKKLIYFIDDMNMPEVDAYGTVQPHTIIRQHLDYGHWYDRSKLSLKEITNVQYVSCMNPTAGSFTINPRLQRHFSVFVLSFPGADALSSIYSIILTQHLKLGNFPASLQKSIPPLIDLALAFHQKIATTFLPTGIKFHYIFNLRDFANIFQGILFSSVECVKSTWDLIRLYLHESNRVYRDKMVEEKDFDLFDKIQTEVLKKTFDDIEDPVEQTQSPNLYCHFANGIGEPKYMPVQSWELLTQTLVEALENHNEVNTVMDLVLFEDAMRHVCHINRILESPRGNALLVGVGGSGKQSLTRLAAFISSMDVFQITLRKGYQIQDFKMDLASLCLKAGVKNLNTVFLMTDAQVADERFLVLINDLLASGEIPDLYSDDEVENIISNVRNEVKSQGLVDNRENCWKFFIDRIRRQLKVTLCFSPVGNKLRVRSRKFPAIVNCTAIHWFHEWPQQALESVSLRFLQNTEGIEPTVKQSISKFMAFVHTSVNQTSQSYLSNEQRYNYTTPKSFLEFIRLYQSLLHRHRKELKCKTERLENGLLKLHSTSAQVDDLKAKLAAQEVELKQKNEDADKLIQVVGVETDKVSREKAMADEEEQKVAVIMLEVKQKQKDCEEDLAKAEPALTAAQAALNTLNKTNLTELKSFGSPPLAVSNVSAAVMVLMAPRGRVPKDRSWKAAKVTMAKVDGFLDSLINFNKENIHENCLKAIRPYLQDPEFNPEFVATKSYAAAGLCSWVINIVRFYEVFCDVEPKRQALNKATADLTAAQEKLAAIKAKIAHLNENLAKLTARFEKATADKLKCQQEAEVTAVTISLANRLVGGLASENVRWADAVQNFKQQERTLCGDILLITAFISYLGFFTKKYRQSLLDRTWRPYLSQLKTPIPVTPALDPLRMLMDDADVAAWQNEGLPADRMSVENATILINCERWPLMVDPQLQGIKWIKNKYGEDLRVTQIGQKGYLQIIEQALEAGAVVLIENLEESIDPVLGPLLGREVIKKGRFIKIGDKECEYNPKFRLILHTKLANPHYQPELQAQATLINFTVTRDGLEDQLLAAVVSMERPDLEQLKSDLTKQQNGFKITLKTLEDSLLSRLSSASGNFLGETVLVENLEITKQTAAEVEKKVQEAKVTEVKINEAREHYRPAAARASLLYFIMNDLSKIHPMYQFSLKAFSIVFQKAVERAAPDESLRERVANLIDSITFSVYQYTIRGLFECDKLTYLAQLTFQILLMNREVNAVELDFLLRSPVQTGTASPVEFLSHQAWGAVKVLSSMEEFSNLDRDIEGSAKSWKKFVESECPEKEKLPQEWKNKTALQRLCMLRAMRPDRMTYALRDFVEEKLGSKYVVGRALDFATSFEESGPATPMFFILSPGVDPLKDVESQGRKLGYTFNNQNFHNVSLGQGQEVVAEAALDLAAKKGHWVILQNIHLVAKWLSTLEKKLEEHSENSHPEFRVFMSAEPAPSPEGHIIPQGILENSIKITNEPPTGMHANLHKALDNFTQDTLEMCSRETEFKSILFALCYFHAVVAERRKFGPQGWNRSYPFNTGDLTISVNVLYNFLEANAKVPYDDLRYLFGEIMYGGHITDDWDRRLCRTYLGEFIRPEMLEGELSLAPGFPLPGNMDYNGYHQYIDAELPPESPYLYGLHPNAEIGFLTQTSEKLFRTVLELQPRDSQARDGAGATREEKVKALLEEILERVTDEFNIPELMAKVEERTPYIVVAFQECGRMNILTREIQRSLRELELGLKGELTMTSHMENLQNALYFDMVPESWARRAYPSTAGLAAWFPDLLNRIKELEAWTGDFTMPSTVWLTGFFNPQSFLTAIMQSTARKNEWPLDQMALQCDMTKKNREEFRSPPREGAYIHGLFMEGACWDTQAGIITEAKLKDLTPPMPVMFIKAIPADKQDCRSVYSCPVYKTSQRGPTYVWTFNLKTKENPSKWVLAGVALLLQI

SEQ ID NO: 117309 - protein, 798 aa, Artificial Sequence
  derived and/or modified sequence
MNDLSKIHPMYQFSLKAFSIVFQKAVERAAPDESLRERVANLIDSITFSVYQYTIRGLFECDKLTYLAQLTFQILLMNREVNAVELDFLLRSPVQTGTASPVEFLSHQAWGAVKVLSSMEEFSNLDRDIEGSAKSWKKFVESECPEKEKLPQEWKNKTALQRLCMLRAMRPDRMTYALRDFVEEKLGSKYVVGRALDFATSFEESGPATPMFFILSPGVDPLKDVESQGRKLGYTFNNQNFHNVSLGQGQEVVAEAALDLAAKKGHWVILQNIHLVAKWLSTLEKKLEEHSENSHPEFRVFMSAEPAPSPEGHIIPQGILENSIKITNEPPTGMHANLHKALDNFTQDTLEMCSRETEFKSILFALCYFHAVVAERRKFGPQGWNRSYPFNTGDLTISVNVLYNFLEANAKVPYDDLRYLFGEIMYGGHITDDWDRRLCRTYLGEFIRPEMLEGELSLAPGFPLPGNMDYNGYHQYIDAELPPESPYLYGLHPNAEIGFLTQTSEKLFRTVLELQPRDSQARDGAGATREEKVKALLEEILERVTDEFNIPELMAKVEERTPYIVVAFQECGRMNILTREIQRSLRELELGLKGELTMTSHMENLQNALYFDMVPESWARRAYPSTAGLAAWFPDLLNRIKELEAWTGDFTMPSTVWLTGFFNPQSFLTAIMQSTARKNEWPLDQMALQCDMTKKNREEFRSPPREGAYIHGLFMEGACWDTQAGIITEAKLKDLTPPMPVMFIKAIPADKQDCRSVYSCPVYKTSQRGPTYVWTFNLKTKENPSKWVLAGVALLLQI

SEQ ID NO: 117310 - protein, 2992 aa, Artificial Sequence
  derived and/or modified sequence
EVRGIVDKAAKEMGMEKTLKELQTTWAGMEFQYEPHPRTNVPLLCSDEDLIEVLEDNQVQLQNLVMSKYVAFFLEEVSGWQKKLSTVDAVISIWFEVQRTWTHLESIFTGSEDIRAQLPQDSKRFEGIDIDFKELAYDAQKIPNVVQTTNKPGLYEKLEDIQGRLCLCEKALAEYLDTKRLAFPRFYFLSSSDLLDILSNGTAPQQVQRHLSKLFDNMAKMRFQLDASGEPTKTSLGMYSKEEEYVAFSEPCDCSGQVEIWLNHVLGHMKATVRHEMTEGVTAYEEKPREQWLFDHPAQVALTCTQIWWTTEVGMAFARLEEGYESAMKDYYKKQVAQLKTLITMLIGQLSKGDRQKIMTICTIDVHARDVVAKMIAQKVDNAQAFLWLSQLRHRWDDEVKHCFANICDAQFLYSYEYLGNTPRLVITPLTDRCYITLTQSLHLTMSGAPAGPAGTGKTETTKDLGRALGILVYVFNCSEQMDYKSCGNIYKGLAQTGAWGCFDEFNRISVEVLSVVAVQVKSIQDAIRDKKQWFSFLGEEISLNPSVGIFITMNPGYAGRTELPENLKSLFRPCAMVVPDFELICEIMLVAEGFIEAQSLARKFITLYQLCKELLSKQDHYDWGLRAIKSVLVVAGSLKRGDPDRPEDQVLMRSLRDFNIPKIVTDDMPIFMGLIGDLFPALDVPRRRDPNFEALVRKAIVDLKLQAEDNFVLKVVQLEELLAVRHSVFVVGGAGTGKSQVLRSLHKTYQIMKRRPVWTDLNPKAVTNDELFGIINPATGEWKDGLFSSIMRELANITHDGPKWILLDGDIDPMWIESLNTVMDDNKVLTLASNERIPLNPTMKLLFEISHLRTATPATVSRAGILYINPADLGWNPPVSSWIEKREIQTERANLTILFDKYLPTCLDTLRTRFKKIIPIPEQSMVQMVCHLLECLLTTEDIPADCPKEIYEHYFVFAAIWAFGGAMVQDQLVDYRAEFSKWWLTEFKTVKFPSQGTIFDYYIDPETKKFEPWSKLVPQFEFDPEMPLQACLVHTSETIRVCYFMERLMARQRPVMLVGTAGTGKSVLVGAKLASLDPEAYLVKNVPFNYYTTSAMLQAVLEKPLEKKAGRNYGPPGNKKLIYFIDDMNMPEVDAYGTVQPHTIIRQHLDYGHWYDRSKLSLKEITNVQYVSCMNPTAGSFTINPRLQRHFSVFVLSFPGADALSSIYSIILTQHLKLGNFPASLQKSIPPLIDLALAFHQKIATTFLPTGIKFHYIFNLRDFANIFQGILFSSVECVKSTWDLIRLYLHESNRVYRDKMVEEKDFDLFDKIQTEVLKKTFDDIEDPVEQTQSPNLYCHFANGIGEPKYMPVQSWELLTQTLVEALENHNEVNTVMDLVLFEDAMRHVCHINRILESPRGNALLVGVGGSGKQSLTRLAAFISSMDVFQITLRKGYQIQDFKMDLASLCLKAGVKNLNTVFLMTDAQVADERFLVLINDLLASGEIPDLYSDDEVENIISNVRNEVKSQGLVDNRENCWKFFIDRIRRQLKVTLCFSPVGNKLRVRSRKFPAIVNCTAIHWFHEWPQQALESVSLRFLQNTEGIEPTVKQSISKFMAFVHTSVNQTSQSYLSNEQRYNYTTPKSFLEFIRLYQSLLHRHRKELKCKTERLENGLLKLHSTSAQVDDLKAKLAAQEVELKQKNEDADKLIQVVGVETDKVSREKAMADEEEQKVAVIMLEVKQKQKDCEEDLAKAEPALTAAQAALNTLNKTNLTELKSFGSPPLAVSNVSAAVMVLMAPRGRVPKDRSWKAAKVTMAKVDGFLDSLINFNKENIHENCLKAIRPYLQDPEFNPEFVATKSYAAAGLCSWVINIVRFYEVFCDVEPKRQALNKATADLTAAQEKLAAIKAKIAHLNENLAKLTARFEKATADKLKCQQEAEVTAVTISLANRLVGGLASENVRWADAVQNFKQQERTLCGDILLITAFISYLGFFTKKYRQSLLDRTWRPYLSQLKTPIPVTPALDPLRMLMDDADVAAWQNEGLPADRMSVENATILINCERWPLMVDPQLQGIKWIKNKYGEDLRVTQIGQKGYLQIIEQALEAGAVVLIENLEESIDPVLGPLLGREVIKKGRFIKIGDKECEYNPKFRLILHTKLANPHYQPELQAQATLINFTVTRDGLEDQLLAAVVSMERPDLEQLKSDLTKQQNGFKITLKTLEDSLLSRLSSASGNFLGETVLVENLEITKQTAAEVEKKVQEAKVTEVKINEAREHYRPAAARASLLYFIMNDLSKIHPMYQFSLKAFSIVFQKAVERAAPDESLRERVANLIDSITFSVYQYTIRGLFECDKLTYLAQLTFQILLMNREVNAVELDFLLRSPVQTGTASPVEFLSHQAWGAVKVLSSMEEFSNLDRDIEGSAKSWKKFVESECPEKEKLPQEWKNKTALQRLCMLRAMRPDRMTYALRDFVEEKLGSKYVVGRALDFATSFEESGPATPMFFILSPGVDPLKDVESQGRKLGYTFNNQNFHNVSLGQGQEVVAEAALDLAAKKGHWVILQDTLEMCSRETEFKSILFALCYFHAVVAERRKFGPQGWNRSYPFNTGDLTISVNVLYNFLEANAKVPYDDLRYLFGEIMYGGHITDDWDRRLCRTYLGEFIRPEMLEGELSLAPGFPLPGNMDYNGYHQYIDAELPPESPYLYGLHPNAEIGFLTQTSEKLFRTVLELQPRDSQARDGAGATREEKVKALLEEILERVTDEFNIPELMAKVEERTPYIVVAFQECGRMNILTREIQRSLRELELGLKGELTMTSHMENLQNALYFDMVPESWARRAYPSTAGLAAWFPDLLNRIKELEAWTGDFTMPSTVWLTGFFNPQSFLTAIMQSTARKNEWPLDQMALQCDMTKKNREEFRSPPREGAYIHGLFMEGACWDTQAGIITEAKLKDLTPPMPVMFIKAIPADKQDCRSVYSCPVYKTSQRGPTYVWTFNLKTKENPSKWVLAGVALLLQI

SEQ ID NO: 117311 - protein, 4410 aa, Artificial Sequence
  derived and/or modified sequence
MRLAEERAALAAENADGEPGADRRLRLLGTYVAMSLRPAAGAWERCAGSAEAEQLLQAFLGRDAAEGPRPLLVVRPGPRGLAIRPGLEVGPESGLAGAKALFFLRTGPEPPGPDSFRGAVVCGDLPAAPLEHLAALFSEVVLPVLANEKNRLNWPHMICEDVRRHAHSLQCDLSVILEQVKGKTLLPLPAGSEKMEFADSKSETVLDSIDKSVIYAIESAVIKWSYQVQVVLKRESSQPLLQGENPTPKVELEFWKSRYEDLKYIYNQLRTITVRGMAKLLDKLQSSYFPAFKAMYRDVVAALAEAQDIHVHLIPLQRHLEALENAEFPEVKPQLRPLLHVVCLIWATCKSYRSPGRLTVLLQEICNLLIQQASNYLSPEDLLRSEVEESQRKLQVVSDTLSFFKQEFQDRRENLHTYFKENQEVKEWDFQSSLVFVRLDGFLGQLHVVEGLLKTALDFHKLGKVEFSGVRGNALSQQVQQMHEEFQEMYRLLSGSSSDCLYLQSTDFENDVSEFNQKVEDLDRRLGTIFIQAFDDAPGLEHAFKLLDIAGNLLERPLVARDTSDKYLVLIQMFNKDLDAVRMIYSQHVQEEAELGFSPVHKNMPTVAGGLRWAQELRQRIQGPFSNFGRITHPCMESAEGKRMQQKYEDMLSLLEKYETRLYEDWCRTVSEKSQYNLSQPLLKRDPETKEITINFNPQLISVLKEMSYLEPREMKHMPETAAAMFSSRDFYRQLVANLELMANWYNKVMKTLLEVEFPLVEEELQNIDLRLRAAEETLNWKTEGICDYVTEITSSIHDLEQRIQKTKDNVEEIQNIMKTWVTPIFKTKDGKRESLLSLDDRHDRMEKYYNLIKESGLKIHALVQENLGLFSADPTSNIWKTYVNSIDNLLLNGFFLAIECSLKYLLENTECKAGLTPIFEAQLSLAIPELVFYPSLESGVKGGFCDIVEGLITSIFRIPSLVPRLSPQNGSPHYQVDLDGIPDLANMRRTLMERVQRMMGLCCGYQSTFSQYSYLYVEDRKEVLGQFLLYGHILTPEEIEDHVEDGIPENPPLLSQFKVQIDSYETLYEEVCRLEPIKVFDGWMKIDIRPFKASLLNIIKRWSLLFKQHLVDHVTHSLANLDAFIKKSESGLLKKVEKGDFQGLVEIMGHLMAVKERQSNTDEMFEPLKQTIELLKTYEQELPETVFKQLEELPEKWNNIKKVAITVKQQVAPLQANEVTLLRQRCTAFDAEQQQFWEQFHKEAPFRFDSIHPHQMLDARHIEIQQMESTMASISESASLFEVNVPDYKQLRQCRKEVCQLKELWDTIGMVTSSIHAWETTPWRNINVEAMELECKQFARHIRNLDKEVRAWDAFTGLESTVWNTLSSLRAVAELQNPAIRERHWRQLMQATGVSFTMDQDTTLAHLLQLQLHHYEDEVRGIVDKAAKEMGMEKTLKELQTTWAGMEFQYEPHPRTNVPLLCSDEDLIEVLEDNQVQLQNLVMSKYVAFFLEEVSGWQKKLSTVDAVISIWFEVQRTWTHLESIFTGSEDIRAQLPQDSKRFEGIDIDFKELAYDAQKIPNVVQTTNKPGLYEKLEDIQGRLCLCEKALAEYLDTKRLAFPRFYFLSSSDLLDILSNGTAPQQVQRHLSKLFDNMAKMRFQLDASGEPTKTSLGMYSKEEEYVAFSEPCDCSGQVEIWLNHVLGHMKATVRHEMTEGVTAYEEKPREQWLFDHPAQVALTCTQIWWTTEVGMAFARLEEGYESAMKDYYKKQVAQLKTLITMLIGQLSKGDRQKIMTICTIDVHARDVVAKMIAQKVDNAQAFLWLSQLRHRWDDEVKHCFANICDAQFLYSYEYLGNTPRLVITPLTDRCYITLTQSLHLTMSGAPAGPAGTGKTETTKDLGRALGILVYVFNCSEQMDYKSCGNIYKGLAQTGAWGCFDEFNRISVEVLSVVAVQVKSIQDAIRDKKQWFSFLGEEISLNPSVGIFITMNPGYAGRTELPENLKSLFRPCAMVVPDFELICEIMLVAEGFIEAQSLARKFITLYQLCKELLSKQDHYDWGLRAIKSVLVVAGSLKRGDPDRPEDQVLMRSLRDFNIPKIVTDDMPIFMGLIGDLFPALDVPRRRDPNFEALVRKAIVDLKLQAEDNFVLKVVQLEELLAVRHSVFVVGGAGTGKSQVLRSLHKTYQIMKRRPVWTDLNPKAVTNDELFGIINPATGEWKDGLFSSIMRELANITHDGPKWILLDGDIDPMWIESLNTVMDDNKVLTLASNERIPLNPTMKLLFEISHLRTATPATVSRAGILYINPADLGWNPPVSSWIEKREIQTERANLTILFDKYLPTCLDTLRTRFKKIIPIPEQSMVQMVCHLLECLLTTEDIPADCPKEIYEHYFVFAAIWAFGGAMVQDQLVDYRAEFSKWWLTEFKTVKFPSQGTIFDYYIDPETKKFEPWSKLVPQFEFDPEMPLQACLVHTSETIRVCYFMERLMARQRPVMLVGTAGTGKSVLVGAKLASLDPEAYLVKNVPFNYYTTSAMLQAVLEKPLEKKAGRNYGPPGNKKLIYFIDDMNMPEVDAYGTVQPHTIIRQHLDYGHWYDRSKLSLKEITNVQYVSCMNPTAGSFTINPRLQRHFSVFVLSFPGADALSSIYSIILTQHLKLGNFPASLQKSIPPLIDLALAFHQKIATTFLPTGIKFHYIFNLRDFANIFQGILFSSVECVKSTWDLIRLYLHESNRVYRDKMVEEKDFDLFDKIQTEVLKKTFDDIEDPVEQTQSPNLYCHFANGIGEPKYMPVQSWELLTQTLVEALENHNEVNTVMDLVLFEDAMRHVCHINRILESPRGNALLVGVGGSGKQSLTRLAAFISSMDVFQITLRKGYQIQDFKMDLASLCLKAGVKNLNTVFLMTDAQVADERFLVLINDLLASGEIPDLYSDDEVENIISNVRNEVKSQGLVDNRENCWKFFIDRIRRQLKVTLCFSPVGNKLRVRSRKFPAIVNCTAIHWFHEWPQQALESVSLRFLQNTEGIEPTVKQSISKFMAFVHTSVNQTSQSYLSNEQRYNYTTPKSFLEFIRLYQSLLHRHRKELKCKTERLENGLLKLHSTSAQVDDLKAKLAAQEVELKQKNEDADKLIQVVGVETDKVSREKAMADEEEQKVAVIMLEVKQKQKDCEEDLAKAEPALTAAQAALNTLNKTNLTELKSFGSPPLAVSNVSAAVMVLMAPRGRVPKDRSWKAAKVTMAKVDGFLDSLINFNKENIHENCLKAIRPYLQDPEFNPEFVATKSYAAAGLCSWVINIVRFYEVFCDVEPKRQALNKATADLTAAQEKLAAIKAKIAHLNENLAKLTARFEKATADKLKCQQEAEVTAVTISLANRLVGGLASENVRWADAVQNFKQQERTLCGDILLITAFISYLGFFTKKYRQSLLDRTWRPYLSQLKTPIPVTPALDPLRMLMDDADVAAWQNEGLPADRMSVENATILINCERWPLMVDPQLQGIKWIKNKYGEDLRVTQIGQKGYLQIIEQALEAGAVVLIENLEESIDPVLGPLLGREVIKKGRFIKIGDKECEYNPKFRLILHTKLANPHYQPELQAQATLINFTVTRDGLEDQLLAAVVSMERPDLEQLKSDLTKQQNGFKITLKTLEDSLLSRLSSASGNFLGETVLVENLEITKQTAAEVEKKVQEAKVTEVKINEAREHYRPAAARASLLYFIMNDLSKIHPMYQFSLKAFSIVFQKAVERAAPDESLRERVANLIDSITFSVYQYTIRGLFECDKLTYLAQLTFQILLMNREVNAVELDFLLRSPVQTGTASPVEFLSHQAWGAVKVLSSMEEFSNLDRDIEGSAKSWKKFVESECPEKEKLPQEWKNKTALQRLCMLRAMRPDRMTYALRDFVEEKLGSKYVVGRALDFATSFEESGPATPMFFILSPGVDPLKDVESQGRKLGYTFNNQNFHNVSLGQGQEVVAEAALDLAAKKGHWVILQDTLEMCSRETEFKSILFALCYFHAVVAERRKFGPQGWNRSYPFNTGDLTISVNVLYNFLEANAKVPYDDLRYLFGEIMYGGHITDDWDRRLCRTYLGEFIRPEMLEGELSLAPGFPLPGNMDYNGYHQYIDAELPPESPYLYGLHPNAEIGFLTQTSEKLFRTVLELQPRDSQARDGAGATREEKVKALLEEILERVTDEFNIPELMAKVEERTPYIVVAFQECGRMNILTREIQRSLRELELGLKGELTMTSHMENLQNALYFDMVPESWARRAYPSTAGLAAWFPDLLNRIKELEAWTGDFTMPSTVWLTGFFNPQSFLTAIMQSTARKNEWPLDQMALQCDMTKKNREEFRSPPREGAYIHGLFMEGACWDTQAGIITEAKLKDLTPPMPVMFIKAIPADKQDCRSVYSCPVYKTSQRGPTYVWTFNLKTKENPSKWVLAGVALLLQI

SEQ ID NO: 117312 - DNA, 13461 bp, Artificial Sequence
  derived and/or modified sequence
atgaggctggcagaagaacgcgcggcgctggcggccgagaatgctgacggagagcccggggccgaccgacgcctgcggctgcttggaacttatgtagctatgagcctgcggcccgctgcaggggcttgggaaagatgtgccggttcagccgaagccgagcagttactgcaggctttcctcggcagagacgccgcagaaggtccccgtccattacttgtcgttagaccgggccccagaggccttgctatccgacctggtttagaagtgggccctgaatcaggactcgctggtgccaaagccctgtttttcctccgcacagggccggaaccacctgggccggattcgttccgcggcgctgtggtgtgcggcgatcttcctgcagcgcccctcgagcacctggcagcgctgttctctgaggtggtgttgccagttttggccaacgagaagaatcgcctgaattggccccatatgatttgcgaagatgttagaagacatgcacattctctccaatgtgacctgagtgtaatcctcgaacaggtgaagggcaaaacgctacttcccctccctgctggcagcgagaagatggagttcgccgacagtaagtctgagaccgttctggactctatcgacaagtccgtgatttacgcgatcgaatctgccgtgatcaagtggagctaccaggtgcaggtggttctaaaaagggagtccagccagcctcttcttcaaggagagaatccaacgcccaaagtggagttggagttctggaagtctagatatgaggatctgaaatatatatacaatcagctaaggaccataaccgtccgagggatggccaagctgctcgataagctgcagtcctcctatttccctgctttcaaggctatgtacagagatgtagttgctgcattggctgaggctcaagacattcatgtgcacctgattccgctccagagacacctggaagccctggaaaatgccgagttccccgaggtcaaaccacagctcaggccattgctgcatgtggtgtgcctgatatgggccacttgcaagagttacaggtctcccgggcgactgaccgtcctgctgcaagaaatttgcaacttgctaatccagcaggccagcaactacctgtcacccgaggatctcctgaggtctgaagtcgaggaatcacagcgcaaactgcaggtcgtgagcgacactcttagtttcttcaaacaggagttccaggataggcgagaaaatctgcacacctatttcaaggaaaatcaggaggtaaaggaatgggattttcagagctcccttgtgtttgtcagactggacggctttctgggccagttgcatgtggtggagggcttgttaaaaaccgccctagactttcacaagctaggaaaggtggagttttccggcgtgcgcggcaacgcgctgtctcagcaggtgcagcagatgcacgaggagttccaggagatgtaccggctattatcggggtccagctccgactgcttgtacctgcagagtacagatttcgagaacgacgtgtcagagttcaatcaaaaggtggaagatcttgacagaagactggggactatctttattcaagcctttgacgatgcaccgggactggagcacgcctttaagttattggatatcgctggcaatctgctggagcggcctctggtggcacgcgacacaagtgataagtacctggtgttaattcaaatgttcaataaagatctcgatgcggtaaggatgatatactcacaacatgtgcaggaagaggcagagcttggcttctcaccggtccacaaaaacatgccgactgtggccggaggtctccgctgggctcaagaactgcgacagaggatccagggacctttctccaacttcggccgaatcacacacccctgtatggagtcagccgagggcaaacgaatgcaacagaagtacgaagacatgctttcactgctggaaaagtacgagactcgcttgtacgaagattggtgtagaacagtttctgagaaatcccagtataatctgtctcaacctctgctgaaacgcgatcccgagactaaggaaatcactatcaacttcaacccccaactcataagcgtgctgaaagagatgtcataccttgagccgagagaaatgaagcatatgcccgagaccgccgccgcaatgttcagcagtcgggatttttatagacaactggtagccaatctcgagcttatggcaaactggtacaataaagtgatgaagaccttgctcgaagttgaatttccacttgttgaggaagaattacaaaacattgatctcaggctgagggccgcagaagaaaccctcaattggaagactgaaggcatctgcgattacgtcacagagataacgagtagtatccacgatttagaacagaggatccagaagactaaggacaatgtcgaggaaatccagaacataatgaagacatgggtcacccctatctttaaaaccaaggatggcaagagagagtccctgttgtccctggacgaccggcatgacagaatggagaaatactacaacctcataaaagagtcaggccttaagatccacgcactcgtgcaggaaaatcttggtctgttcagcgccgaccctacttcaaatatatggaaaacgtacgtgaacagcatcgacaatctactgctaaacgggttctttttggctatcgagtgttccctgaagtacttgctggagaacactgaatgcaaggcaggactcaccccaatttttgaggcgcagctgtcactcgctattcccgaactggtgttttatccgtcgctggaatccggtgtgaaagggggtttctgtgacatcgtagaggggctcattacttcgatctttcgcataccttccctcgtgccccgactttctccccaaaatgggagcccacattatcaggtcgatctagacggcatacctgacttagcaaacatgcgtagaactctcatggagagggtgcagagaatgatgggactttgctgcggctaccagagcacgtttagtcagtacagctatctgtatgtggaggatagaaaagaagtattaggacaattccttctgtacggccatatcctgacccccgaggagatcgaggaccatgttgaggacggtatacctgaaaacccacctttgcttagtcagttcaaggtgcagatcgactcttacgaaacactctacgaggaggtttgtaggctggaaccgatcaaagtttttgatggctggatgaagattgatataaggcctttcaaagcttcccttctgaacattataaagaggtggagcctgctgttcaaacaacatctggtggatcatgtcacacactcgctcgccaacctggatgcatttattaaaaaatcggagtctgggctgctgaagaaggtcgaaaaaggagattttcaaggtcttgtggagatcatgggtcacctcatggcagttaaagagcgtcaatccaacaccgatgagatgtttgagcctctcaaacagaccattgagctgctcaagacgtacgagcaggaattgcctgagacggtctttaaacagctggaagagctcccagaaaaatggaacaatattaaaaaagttgctatcactgtaaagcagcaggtcgccccgcttcaggcaaacgaggtcaccttgctgcgacaacggtgtaccgcctttgacgccgaacagcaacagttttgggaacaattccacaaggaggccccatttcgttttgacagcatccacccacaccagatgttagatgcacgacacattgagatccagcaaatggaatccaccatggccagtatttcagagagcgcatctctttttgaggtcaacgtaccggactataaacagctacgacagtgccggaaagaggtgtgccagttaaaggaactctgggataccatcggcatggtcacgagcagcatccatgcatgggaaacgaccccctggcggaacatcaacgttgaggccatggagctggagtgcaagcagttcgctaggcacattcggaatttagacaaggaagtgcgcgcctgggacgcttttaccggcctggagtctaccgtatggaataccttgtcctccctgagggccgttgctgagttgcaaaacccagccatccgggagcgccactggcggcaattgatgcaggcgactggggtctcatttacaatggatcaagacaccactctggctcacctgttgcagttgcagctgcaccactacgaggatgaggtgcggggaatagttgataaagctgccaaagagatggggatggagaaaacgttaaaggagctccaaacaacgtgggcgggaatggagttccagtatgagccacatcctcgaaccaacgtgcccctgctgtgcagcgatgaggacctgatcgaggtcttagaggacaaccaggtgcagctgcagaatctggtcatgtccaaatacgtcgccttcttcctggaggaagtgtccggctggcagaaaaagctgagcacggtggacgctgtcattagtatctggttcgaggtgcagcgtacctggacacatctcgaatcaatctttaccggctcggaggatatccgtgcacagttgcctcaagattccaagaggttcgagggaatagatatcgacttcaaggaactcgcgtacgacgctcagaagataccaaatgtggtgcagacgaccaataagccgggcttgtatgagaaattggaggatatacagggtcgcctgtgcctatgcgagaaagcgctggccgaatacctcgacaccaaacgactcgcattccctcgcttttactttctctcgagttctgatctgttagacatcctgtcgaacggaaccgctccccagcaggtacagcgccacttgagtaagctgttcgataatatggcaaagatgaggtttcagcttgatgcgtcaggcgaaccaacaaagactagcctgggaatgtacagcaaagaggaggagtacgtcgctttctccgaaccttgtgactgttctgggcaggtcgagatctggctaaatcacgtgctgggtcacatgaaagccacggttcgtcatgaaatgactgaaggcgtcacggcatacgaagaaaagccgagagagcagtggctgtttgatcatcccgctcaagtggctctcacatgcacccagatctggtggacgacagaagttgggatggctttcgcgcgcttggaagagggatatgagtccgccatgaaggactactacaagaagcaggtggcccaacttaagaccttgattacaatgctgatcggacagctctctaaaggagacagacaaaagattatgactatttgtaccatcgacgtgcacgctagagatgtagttgctaagatgattgctcaaaaggttgataatgcgcaagcgttcctgtggctaagccagttgcggcatagatgggacgacgaggtgaaacactgttttgctaacatttgtgatgcacagttcctttattcatacgaatatctggggaacacgcccagactggtaataacccccctaacagaccgatgttatatcacgttgactcagtctctccatttaacgatgagcggcgcccctgcaggcccagctggaacaggcaaaaccgagacgactaaggacttagggcgtgcccttggcatcctagtctacgtgttcaactgctcagaacagatggactataaatcatgcgggaatatttataagggattggcccagactggcgcctggggatgctttgacgagtttaatagaatttccgtcgaagtcctgagtgtggttgctgtgcaggtgaagtccatccaggacgccatcagagacaagaagcagtggttttcatttttgggcgaggaaatctcattgaaccccagtgttgggatcttcattacaatgaatcctggatacgcaggcagaacagaactgcccgaaaacctgaaatccctgtttaggccctgtgcaatggtggtgccagacttcgagctgatctgcgagatcatgttggtggccgagggcttcatcgaagcccagagccttgctcggaagttcatcaccttgtaccagctgtgcaaagagttactgagtaaacaggaccactacgactggggactgagggcgataaagtcagtgctggttgtcgcgggatcccttaaaagaggggaccccgataggcctgaagatcaagtgctgatgagatccctgcgggatttcaatattccaaagatcgtgactgacgacatgcctatttttatgggacttataggggacctcttccctgccctcgacgtccctcggaggagggaccctaactttgaggcgttagtaaggaaggcaatcgttgatctaaaactgcaggccgaggacaactttgtactgaaggtcgtgcagcttgaagagcttctggctgtgcgccactccgtatttgtagtgggaggagcaggtaccggtaagtctcaggtcctccgttccctgcacaaaacatatcagatcatgaaaaggagacctgtttggactgatttgaatccaaaagcggtgacgaacgatgagctcttcgggatcatcaatcctgcaacgggcgaatggaaagatggcctgttcagtagcatcatgagggaactggctaacatcacacatgatggcccgaaatggatcctcttggacggtgacatagacccaatgtggattgaatccctgaatactgtgatggacgataataaagttctgacattagcttctaatgagagaatcccactcaaccccacgatgaaactcctcttcgagatctcccacctccgcaccgccacccccgctactgtgtcccgcgccggtatcttgtatatcaaccctgctgacctgggatggaacccacccgtctctagctggatagagaagcgtgaaatacaaaccgagcgggccaatctgaccattttgtttgacaaatacctcccgacatgcctcgatactctcaggacacggttcaaaaagattatacctataccagagcagtccatggtacagatggtgtgtcatctgctggagtgcttactcaccacggaagatatccccgccgattgcccaaaagagatatatgagcattactttgtgttcgccgccatatgggcgtttggtggtgctatggttcaggatcagctggtggactacagagcggagttttccaaatggtggctcacagaatttaaaactgtcaagttcccatcccagggtaccatctttgactactacatcgaccccgaaaccaagaagtttgaaccatggtctaaactggtgccccaatttgagttcgaccccgaaatgccactgcaggcctgcttagtgcacacaagcgagaccatcagagtctgctatttcatggagcgactgatggcgagacagcgccctgtgatgctcgtcggaactgcaggaacaggaaaatcggtgctggtgggagctaaactagcttcgttggatcccgaggcatatctggtcaaaaatgtcccatttaattactacaccacatccgccatgttgcaggccgtcttggagaaacctctggaaaaaaaagccggaagaaactacggacccccagggaataagaaactcatttactttattgatgatatgaacatgccggaggtggatgcttacggcacagtccagccccatactattatacgacagcatttggactatggccactggtatgacaggtcaaaactatcgttgaaagaaatcaccaatgtccaatacgtctcatgcatgaaccctacggcagggtcctttactatcaatcccagactgcagcggcatttctccgtgtttgtgctcagctttcccggcgctgacgcactctccagtatctatagtatcatcctgacgcaacatctgaagctcgggaatttcccggcgagccttcagaaatctattccacctctgatagatctggccctggccttccatcagaagatcgcgacaactttcctgccaacgggtatcaaattccactatatctttaacctccgcgattttgctaatattttccagggtatactgttctccagtgtggaatgtgtgaaatcgacatgggatttgatccgactatacctgcacgaatccaaccgggtctacagagacaagatggttgaagaaaaggacttcgatctctttgataaaattcagacggaagtgctgaagaaaacattcgacgacattgaagaccctgtggaacagacacagagcccaaatttatattgccattttgctaacgggatcggcgagccaaaatacatgccagtgcagagctgggagctgctaacacagaccctggtagaagctctggagaaccacaatgaggtcaacactgtaatggacctggtcttattcgaggatgctatgcgacacgtgtgccacatcaacagaattctagagagtccccgcggcaacgctttgttggtgggagtgggcgggtcgggcaagcagtcgttaacacggcttgctgctttcattagttccatggacgtatttcagatcacattaaggaagggctatcaaatccaggactttaagatggaccttgcgtcgctgtgtctaaaggctggagtgaagaatctcaatacggtctttttgatgaccgacgcccaggtagctgacgagagattcttggtcctcattaacgatctcctggcctctggcgaaattcccgatctctatagtgacgacgaagttgaaaacattatctcaaacgtgagaaacgaggtaaaatcacagggcttagtggacaaccgggagaattgctggaagttctttattgatcgcatccgcaggcaactgaaagtgactttgtgcttctcacctgttgggaataaactgcgcgtgagaagccgtaagtttcccgccattgttaattgtacggcaatccattggtttcacgaatggccccagcaagcgctggaatcagtgtctttgagatttttgcagaatacagaaggcatcgagccaaccgtcaaacagtctatctcgaagttcatggcttttgtccacacatccgtgaaccaaacaagccaaagttatctatccaatgagcagagatacaactataccacaccaaaatccttccttgaatttattcggctgtaccagtcactactacaccggcatcggaaagaactaaaatgtaagacagaaaggcttgaaaacgggctgctgaaacttcattcgacaagcgcgcaggtagacgacctgaaagccaaactggcagcacaggaggtcgagctaaagcagaagaacgaagacgccgacaagttaatacaggtggtgggcgtggaaacagacaaggtttctagagaaaaggctatggctgacgaggaggagcaaaaggtcgcagtcatcatgcttgaagtgaagcaaaagcagaaagactgtgaggaagacttggctaaggccgagcctgccctgaccgctgctcaagctgcccttaacacattaaacaagactaacttaactgagctgaaaagtttcggctcaccacctcttgctgtgtccaatgtatcagcagctgtcatggtattgatggccccacgaggccgagttccgaaagataggagctggaaggccgcaaaagtgaccatggcgaaggttgatggcttccttgactcacttatcaacttcaataaggagaatattcacgagaattgcttaaaggctattcggccatatctgcaggatcctgaatttaacccagagtttgtggccacaaagagctacgcagccgctggattatgctcttgggtcatcaatatcgtgagattctatgaagtcttctgtgatgtcgagcctaagcggcaggcccttaacaaggctactgccgacctaacggccgctcaggagaagctcgccgctatcaaggcaaagattgcacatcttaatgagaacctcgccaagcttacagccagattcgaaaaggcaaccgccgataagctcaaatgccagcaggaggcagaagtgacagctgtgacgatctcactggctaatcgcctggtggggggcttagccagtgagaatgtgagatgggctgacgcagtacagaattttaaacagcaagaaaggaccctttgcggcgatatcctactcattactgcttttatcagttatctaggtttcttcactaagaagtaccgacagtctctgcttgatagaacttggaggccctacttatctcagctcaaaacacccatccctgtcacgcctgccctggatccattgagaatgttaatggacgacgcagacgttgctgcatggcaaaatgagggtctccccgccgatcgtatgagcgtggagaatgccactattcttatcaattgcgaaaggtggcccttgatggttgaccctcagcttcagggaataaaatggattaaaaataagtacggcgaagatctgcgtgtgactcaaatcgggcagaagggctacctacagattatcgagcaggccctggaggccggcgctgtggtacttattgaaaatctcgaggagagtattgatcctgtcctcggcccactgctagggcgcgaagtcatcaagaagggtagattcattaagattggggacaaggagtgcgaatacaatccgaagttcaggctgattctccacactaaactggcaaatccccattatcaacctgaactgcaggctcaggccacccttatcaatttcaccgttactcgggacgggttggaagaccaattgctagccgccgttgtatctatggagcgtcctgatctcgaacaactcaaatctgatcttacaaagcagcagaatggcttcaaaattaccttaaagaccctggaagacagtttgctgtcccgcttgtccagtgcaagtggcaactttctcggtgagactgtgctcgtggaaaatctggaaattaccaagcagactgccgctgaagttgaaaaaaaggtgcaggaggcgaaggtcacagaggtgaagattaacgaagcacgagagcactaccgtcctgctgcagctcgcgcaagtctgctttacttcattatgaatgatttaagcaaaattcacccaatgtaccagttctcactgaaggccttttccattgtttttcagaaagccgttgagagagccgcccctgacgagtcccttcgggaacgggtcgcgaatttaatcgattcaataaccttctcggtgtaccagtataccattcgcggtctgtttgaatgtgataagctaacttatcttgcacaattgacctttcagatcctattgatgaacagggaagtgaacgctgtcgaattagactttttgcttcggtccccagtgcagacaggcaccgcttcgccggttgagtttctgtctcaccaagcttggggcgcagtcaaagtcctgagctccatggaggagttcagtaacctggatcgagacatcgaagggtcagccaagagttggaaaaaattcgttgagagcgaatgtcctgagaaggagaagttgcctcaagaatggaagaataaaacggccctgcagagactttgtatgctgcgcgccatgagacccgacaggatgacctacgcattgagggactttgttgaagagaaactcggcagtaagtatgtggtaggacgggcactcgatttcgctactagtttcgaggagtctggaccagccacacccatgttcttcatcctgtcacccggagtggaccctttgaaagacgtggagagccagggacgaaagctgggttacacgttcaataatcagaattttcataacgtctccctaggtcaaggtcaggaggtcgtggcggaggcggccctagatctagcagcaaagaagggccactgggttatcctgcagaatattcatctggtggccaaatggctgtctacattggaaaagaagttggaagagcactccgaaaactctcaccctgaattccgggtgtttatgagcgccgagcccgcgccctcccccgaggggcacattatcccgcagggcattctggaaaattccatcaagatcaccaacgagccacctaccgggatgcatgccaatctgcacaaggctcttgataatttcactcaggacacgcttgaaatgtgttctagagagaccgagttcaaatccatcctcttcgcactgtgctactttcatgcggtggtcgccgaacggcggaagtttggcccgcaggggtggaacaggtcctatcccttcaataccggagatctcacaatcagcgtaaatgtcttgtataattttctggaggccaacgccaaagtgccttatgacgacctgaggtacttattcggcgagattatgtacggtggacatataaccgatgactgggacagaagactatgtaggacttatctaggcgagtttattaggcctgagatgctggaaggtgaactatctttggccccgggattccccctgcctgggaatatggactataatgggtaccaccagtacatcgacgctgaattgcccccagaaagtccatacctatacggtttgcacccaaacgccgagatcggctttctaacccagacatcagaaaaactgttcaggacagtcttggagttgcagcccagagacagtcaggccagagacggggccggcgccacccgagaggaaaaagtgaaagccctgctcgaggagatcctggaaagggtgacagatgagtttaatatcccagagttgatggccaaggtcgaggagagaaccccatacattgtggtagcctttcaggagtgcgggcggatgaatatcctgacacgggagattcagagatcactacgagaactggagcttggcctgaagggggagttgaccatgacttctcacatggagaatcttcagaacgcactttatttcgatatggtgcctgagtcttgggcccgccgtgcttatccctctactgccggtctcgcagcatggttccccgacctgctgaaccgcataaaggagttggaggcctggacgggggacttcactatgccaagcactgtgtggcttactggattcttcaaccctcagtccttcctgacagcaatcatgcagagcactgccagaaagaatgagtggcctctcgaccagatggccctgcagtgtgacatgacgaagaagaaccgggaagagtttagaagcccaccgcgggaaggcgcttatatacacgggttgttcatggagggggcctgctgggatacacaggcaggtataatcactgaggccaaactgaaagaccttaccccaccaatgcccgtcatgtttataaaagcaattccggcggacaagcaagactgcagatcagtgtacagttgccctgtgtacaaaacgtcccagcgcgggcctacgtacgtgtggacattcaacttgaaaactaaggagaatcctagcaagtgggttttggcaggggtggctttgcttcttcagatctag

SEQ ID NO: 117313 - DNA, 2397 bp, Artificial Sequence
  derived and/or modified sequence
atgaacgatctgtctaaaatacacccgatgtaccaattctccctgaaggctttttcaattgtgtttcagaaggcagtggaaagagcagccccagacgaatcactccgagagcgcgtcgcaaatctgatcgactccatcactttctctgtctaccagtataccattcggggactgttcgagtgcgataaactgacttatctggcccagctaacattccagatactactaatgaatcgcgaagttaacgcagtggaactagattttctgctgagaagcccagtacaaacaggaacagcaagcccagtcgaattcctctcccaccaagcttggggcgccgttaaagttctgtcttccatggaagaattcagcaacctggatcgggatatcgaaggcagtgctaagtcttggaagaagttcgtcgaatccgaatgtcccgaaaaggagaaactaccccaggagtggaaaaacaagacagcgctccagaggctctgtatgctccgagccatgagacctgatcgcatgacctacgccctcagagatttcgtggaagaaaaactcggatccaagtacgtggtgggaagagcattagattttgccacttcgttcgaagagagtggaccggctacccctatgttcttcattctcagtcccggagtcgaccccctgaaagatgtggagtcacaggggcggaagcttggctatacattcaacaaccagaattttcataatgtttccctgggccagggccaggaggttgtggccgaggcagcattggaccttgcagctaaaaagggccattgggtgatcctgcagaatatccatctggttgccaagtggttaagcacacttgagaagaaactggaagagcattcagagaattcgcacccagagtttcgcgtgtttatgagcgcggagcccgccccctctcctgaaggtcacataattccccagggcattcttgaaaattctattaaaataacaaatgagccacccactggtatgcacgctaacctgcataaagccctcgacaacttcacacaggacaccctcgagatgtgctcacgtgaaaccgaatttaaaagcattctctttgcgttgtgctacttccacgctgtggtggccgaacggcgaaaatttgggccacaggggtggaatcgcagttaccccttcaatacgggcgatctcaccatctccgtcaatgtcttgtataacttcctggaggccaacgctaaagtaccttacgatgatctgcgttacctcttcggagagattatgtatgggggccacatcaccgatgactgggatcgaaggctctgcaggacctacctgggcgagttcatccggcctgagatgctcgagggtgagctcagcctcgctccgggctttcctctccctggaaacatggactacaacggctaccaccaatacatcgacgctgagcttcctccagagagcccatatctgtacggactccatcccaatgcagagatcggttttctcacacagaccagtgagaagctgttccgcaccgttctcgaactccagccccgcgacagtcaggccagagacggcgccggagccaccagagaagagaaggtgaaagcgttgcttgaggagatacttgagagagtcaccgacgagttcaatatcccagaacttatggctaaggtcgaggagagaacgccgtacattgtcgtggccttccaagagtgtggccggatgaatatactgaccagagagatccagcggagtctgagagaactggagctgggtctgaaaggggagttaactatgacgagccacatggagaaccttcaaaatgccctctattttgacatggtgcccgaatcgtgggctcgtcgggcctatcctagtacagccgggctggctgcttggttccccgatctccttaacaggattaaggagttggaagcgtggacaggggactttaccatgccttccaccgtatggcttacaggttttttcaatccccagagcttcctcacagctatcatgcagtccactgcccggaaaaacgaatggcctttggaccagatggccttgcagtgcgatatgaccaagaaaaatagagaggagttccgtagccccccacgcgagggagcttacatacacggcctcttcatggagggagcatgttgggacacgcaggccggcattatcaccgaagccaagcttaaagacctgaccccaccaatgcccgtcatgttcatcaaggctattcctgctgacaagcaggactgtcggtctgtctacagttgccctgtttataagacttctcagcgtggccctacttacgtttggaccttcaatctcaaaactaaagagaaccccagcaaatgggtcctagccggcgtggcattactcctgcagatttag

SEQ ID NO: 117314 - DNA, 8979 bp, Artificial Sequence
  derived and/or modified sequence
gaggtgcggggaattgtggacaaagccgcaaaagagatgggcatggagaaaacattgaaggaactgcagacaacctgggctggaatggaattccagtacgagccccaccctcgcactaacgttcccctgctctgcagcgacgaggacctcatcgaggtccttgaagacaaccaggtccaactgcagaacctcgtcatgtctaagtacgtggctttttttctagaagaggtgagcgggtggcagaaaaagctctcgactgttgatgcagtgatctccatttggttcgaggtccagcgaacatggactcacctagagagtatttttacaggtagtgaagacatcagagcccagctgccgcaagacagcaagaggtttgagggaatagacatcgatttcaaggagctcgcctatgatgctcaaaagattccaaatgtggtgcaaaccaccaataaacccgggctttacgaaaagcttgaagatatccagggaaggctgtgtctgtgcgagaaggcccttgcagaatatctcgacacaaaacgtctcgcattccctcggttttacttcttgtctagtagcgaccttctagatatccttagtaacggtacggcacctcaacaggtccagcgacatctctccaagcttttcgacaacatggctaaaatgagatttcagttggacgccagcggggaaccaaccaagacgagcttgggaatgtactctaaggaggaggaatatgtagcattctcagagccttgtgactgttcggggcaggtggaaatctggttgaaccacgtgctagggcacatgaaggcaacggttcggcatgaaatgactgagggtgtgaccgcctacgaagagaaaccccgggaacaatggctctttgaccatccagcccaggtggctctcacatgtacacagatctggtggacaacagaggttggtatggccttcgcaaggttggaagaaggctacgagtccgccatgaaggactactacaaaaagcaggtggcccagctgaagacgttaattaccatgcttatcgggcagctgagcaagggtgacagacaaaagattatgaccatctgtaccatcgacgtccatgcacgcgacgttgtggccaagatgattgctcagaaggttgataacgcccaggcctttctctggttaagtcagctgcggcacagatgggatgatgaggtgaagcactgtttcgccaatatatgcgacgcccagttcctctattcttatgaatatttggggaacacccctcgtcttgtgattacacctttgacagacagatgttacattaccctgacacagtctctgcatctgaccatgagcggagctccagctggccctgccggaacaggcaagacggagacgactaaagacctgggacgagctttgggcatccttgtatacgtgttcaattgttccgaacagatggattacaagagctgcggtaatatctataagggattagcacagaccggagcttgggggtgcttcgatgagtttaaccggatctctgtcgaggtccttagcgtggtggcagtgcaggtcaagagtatccaggacgctatccgcgacaagaaacagtggttttccttcctcggagaggaaattagtttaaatccctccgtgggaatcttcattacgatgaatccaggatatgctggccggactgagttgccagagaaccttaaatctctgtttcgaccctgcgccatggtcgtccccgacttcgaattaatctgcgagataatgctggtggcagagggcttcatcgaagcacagtccctcgcccggaagttcattactctctatcaactgtgtaaagaactgctctccaagcaggatcactacgactggggattacgggctatcaagtctgtcctggttgtcgccgggagcttaaaacggggggaccccgatcgccccgaagatcaggtcctgatgcgaagcctgcgagatttcaatatccctaaaatcgttaccgacgatatgcctatattcatggggcttattggtgatctattcccagccctggatgtgcccagacgccgggaccccaacttcgaggcattggtgagaaaggccattgtcgatctgaagctccaggccgaggacaacttcgtgctgaaagtcgtccagctggaggagctgttggccgtgcgtcactcagtctttgtagtaggcggcgcaggcacgggcaagtcccaggtcctgcggagtttgcacaagacctaccaaatcatgaagaggcggccggtgtggacggacctgaatcctaaggccgtgactaatgacgagctctttgggatcattaatcctgccaccggcgagtggaaggacggcctgttttcaagcataatgcgggaattagcaaatataacccacgatgggcccaagtggattctactcgatggcgatatcgaccctatgtggatcgagtccctcaataccgttatggatgataataaagtgttaactctggcgagtaacgaaaggatacccctcaatccaacaatgaagttattgtttgagatcagtcacttgagaacggcaacacccgctactgtctctcgtgccggcattttgtacataaatccagccgatttggggtggaatccaccagtatcttcttggatcgaaaagagagaaattcagaccgagagagcaaacctcacaatcctctttgataaatacctgccgacttgtctggacacactgagaactcggttcaaaaagataattcccatacctgagcagagtatggtgcagatggtgtgccatctgcttgaatgcctgctgacaaccgaggatataccggccgattgccctaaagaaatatatgagcactacttcgtgtttgccgccatttgggcattcggcggcgctatggtacaggaccagttggtggactaccgcgcagagttctccaagtggtggctcaccgaatttaagactgtgaaattcccatcgcaaggtacaattttcgactattatattgatccggagacaaagaagttcgaaccatggagtaaactggtgccacagttcgaattcgatcccgaaatgcccctacaggcatgtctcgtgcacacttcggagaccattcgcgtctgctactttatggagaggctaatggctcgacagaggcctgtgatgctggtagggactgcgggcacaggtaaatccgttctcgtgggtgcaaagttggcttctttggatcctgaagcataccttgtaaaaaacgttccgtttaattattacaccacttccgctatgttgcaagccgtgctcgaaaagcccctggagaagaaggcaggaaggaactatggaccaccagggaataagaaactgatctatttcatcgacgatatgaatatgcctgaagttgacgcctacggcacagtccagcctcacacaatcattaggcagcatctggactatggacattggtacgatcgttctaagctctcactgaaggaaatcacaaatgtgcagtatgtgagttgtatgaaccctactgccgggtcttttactataaatccaagattgcagaggcattttagtgtttttgttctaagctttccaggcgcggatgccctgagttctatttactccatcatccttacacaacatctgaaactgggcaacttccccgcctctttacagaaatccattccgccacttattgatctcgccctcgcttttcatcagaaaattgcaacaacttttctgccgaccggtatcaagttccattatatcttcaacctcagggactttgccaacatctttcagggcatcctctttagtagtgtcgaatgtgttaagagcacatgggacctgatcaggctgtacctccatgaaagtaacagggtttatagagacaagatggtggaagaaaaggactttgacctctttgataaaatacagactgaagtcttaaagaaaacgtttgatgatatcgaggaccccgtcgaacagacacagagccccaacctgtattgccatttcgccaacggaataggagagcctaaatatatgcctgtgcagtcctgggagctgcttacccagacacttgtggaggccctggaaaaccacaacgaggtgaataccgtgatggaccttgtcctgttcgaggatgctatgaggcacgtatgtcacatcaatcggatcctagaatctccacgcggaaatgctttgcttgtcggcgtgggtggttctgggaaacagagcctgaccaggcttgctgctttcataagttccatggacgtgttccaaattacgctgaggaaaggctatcagatacaggattttaagatggacctggcatccttgtgtctgaaagcaggtgtgaagaacctcaacactgtgtttcttatgacagacgctcaagtcgctgatgagagattcctggtcctgataaatgatctgctggcatccggggagatccccgacctgtactcggatgacgaagtcgaaaacatcattagcaacgttcgcaacgaagttaagtctcagggacttgttgacaatcgcgagaactgttggaagtttttcattgacagaatcagacgccagttgaaagtgacactgtgttttagccctgtggggaataaactgcgggtgcggagcaggaaattccccgcaattgtgaactgtactgccatacattggtttcatgaatggcctcagcaagccctggaatctgtctcactcagatttttgcagaacactgagggcatcgagccaacggtgaagcaatctatttcaaaattcatggcttttgtgcataccagtgtgaaccagacgtctcagtcctatttgtctaacgaacagaggtacaactataccacacctaagagctttttagaattcatccggctataccagtccctgcttcatcgacacaggaaggaattgaaatgcaagacagagaggctggagaacgggctgctaaaactgcattctacctccgcccaggtcgacgatctaaaggccaagctggctgcacaggaggtggagctgaagcagaagaatgaggacgcagacaagcttatccaggttgtcggcgttgagacggacaaggtcagtcgggaaaaggcaatggcagatgaggaggaacagaaagtggcagtcataatgctcgaggtcaaacagaaacagaaagactgcgaggaagatctagcaaaagcagagcctgccctgaccgccgcccaagccgcactgaatactttgaataaaacgaatctgaccgagctcaagagcttcgggtcccctcccctcgcagttagcaatgtaagtgccgccgtcatggtcttgatggccccgaggggaagagttccaaaggaccggtcctggaaggccgcgaaggtgacaatggcaaaggtggatgggttcttggatagtttaatcaattttaacaaagagaatattcacgaaaattgcctgaaagctatccggccatatctccaagatcctgagttcaaccctgaattcgtggccaccaagagctatgcggcagccgggctgtgtagctgggtgattaacatcgtacgcttttacgaagtcttctgcgatgtagaacctaagcgacaggccttaaacaaagcaacggcagacttaacagccgcccaagaaaaactggccgccatcaaggcaaaaatcgcccacctgaacgaaaacctggctaagcttaccgctagattcgagaaagccacagcggacaaactcaagtgtcagcaagaggccgaggtcactgccgtgaccattagcttggcaaacagactcgttggcggactggcatcggaaaacgtgcggtgggccgacgcggtgcagaatttcaaacaacaagagagaactctgtgcggcgacatcctcttaattaccgcttttatctcttatctgggtttttttacaaaaaaatatcgccagagcctgctcgacagaacatggcgcccgtacttgtcacagctaaaaacccccatcccagtcactcccgccctggacccgctgcgtatgttgatggatgacgccgacgtggccgcttggcagaacgagggattacccgccgaccggatgagcgtcgagaatgctacgattctgattaactgtgaacgttggcccctgatggtggatcctcagctccagggcataaaatggatcaagaataaatatggcgaagatctcagagtgacccaaattggccagaagggctacttgcagattatcgagcaggctctggaggcgggtgcagttgttctgatcgagaatctcgaggagtccatcgatcctgttttgggtcccctgctcgggagagaagtgataaaaaaggggagatttattaaaatcggcgacaaagaatgcgaatataaccctaagttccgtttgatactgcatactaagctggctaatccccactaccagcccgagctgcaggcgcaagccacactgatcaatttcaccgtgacaagggacggtttggaggaccagctgttggctgccgtcgtgagcatggaacgccctgatctggaacagttgaagtctgacctgacaaaacagcagaatggctttaaaattacactcaagacccttgaggactccctgttatctagactcagcagcgctagtggtaacttccttggtgaaacagtcttggtggagaacttagaaataaccaagcaaacagccgctgaggttgaaaaaaaggttcaagaagccaaagtgactgaagtgaaaattaatgaagcgcgagaacactaccggcctgctgctgctagagcctcactgctgtacttcattatgaacgaccttagtaagatacatcccatgtaccagttttccctcaaggcattctctattgtgtttcagaaagcagttgagcgtgcagcccctgacgaatcgctcagagagagagtcgccaacctaatcgacagcattaccttcagtgtgtatcagtatacaattagggggctcttcgagtgcgataagcttacatatctcgcccagcttacctttcagattcttctcatgaatcgcgaagttaacgccgtggaactggattttctcttaagatcccccgtccagaccgggaccgccagtcctgtagaattcctgagccaccaagcttggggggccgttaaagtgctgagttcaatggaggaattctcaaacctcgatcgcgatatcgagggttccgctaaatcgtggaagaagttcgtggagtcagagtgtccggaaaaggagaagctccctcaggagtggaaaaacaagactgccctgcagagactgtgcatgctgagggcaatgcgccccgacaggatgacctatgctctgagagactttgtcgaggagaagctcgggagcaagtacgttgtaggacgagccttggactttgcaacatcttttgaggagagcggcccagccactccgatgttcttcatcctgtctcccggagttgatcctctgaaagacgtggaatctcaggggcgtaagctcggatataccttcaataaccaaaattttcataacgtctctctcggtcaaggccaagaggtcgttgctgaagcagccctcgatctagctgccaagaagggacattgggtgatcctccaggacaccctggagatgtgtagcagggagacagaatttaaatcgatcctgttcgccttgtgttacttccacgcagtcgtagctgagcgaaggaaatttgggccacaggggtggaaccggtcatatccctttaacaccggagatctgaccatctctgtgaatgtcctttataatttcctcgaggctaacgcgaaagtgccttacgacgacctcaggtacctctttggtgagattatgtatggcggccacataacagacgactgggaccgccgcctctgccggacgtatctgggtgaatttattagaccagaaatgcttgagggagagctgtcactcgctccaggatttccattgcccggtaacatggactataacgggtatcaccagtacatcgatgccgaactgccacccgaatcgccttatttatatggtcttcatccaaacgccgagatagggttccttacccaaacgtctgagaagctctttaggactgtgctggagctgcagccacgagactcgcaggcccgggatggagccggcgccacccgggaagagaaagttaaggcactcctcgaagagattctggagcgagtaacagacgagttcaacattcccgagctgatggcgaaggtagaggaacgtaccccttatattgtggtggccttccaggagtgtggtcgcatgaacatcttgactcgagagatacaaagatccttgcgtgagttagagctgggactgaaaggagagctgactatgacctctcacatggagaatctgcagaacgcgctgtacttcgatatggtaccagaatcctgggctcgcagggcgtatccatctacggcaggattggcagcctggttccctgacctgctgaatcgcatcaaagagctggaggcttggaccggcgactttacgatgccgtctacagtttggctgacagggttctttaatcctcaaagttttctgacagccattatgcagagtacggctcggaaaaacgaatggccccttgatcaaatggctctgcaatgtgatatgactaagaaaaatcgagaggaatttcgtagtccgccacgtgaaggggcatacattcacgggttgttcatggagggcgcatgctgggacacacaggccggtatcattaccgaagccaaattgaaggatctgactccccccatgcccgttatgtttatcaaagccatccccgctgacaagcaggattgtcgctccgtatattcctgcccagtgtataagacttctcagcgtggccccacctatgtttggacttttaatcttaaaacaaaggagaacccctcaaaatgggtcctggctggcgtggcactgctgttgcagatctag

SEQ ID NO: 117315 - DNA, 13233 bp, Artificial Sequence
  derived and/or modified sequence
atgaggttggcagaggaacgggcagctctggctgccgaaaacgccgacggggaacccggtgctgaccggcgcctgcgtttattgggcacttatgtcgctatgagcctgcgtcctgccgccggtgcatgggagcgctgcgcaggatcagctgaagctgagcagctgctgcaggccttcctaggacgggatgctgcagagggccctagacctctgctggtcgtaaggcctggaccaaggggattggcaatccgaccaggtctcgaagtcggtcctgaaagcggattagcgggtgccaaagcactgtttttcctccggacgggccccgaaccccctggtccagacagtttcaggggcgcagtagtgtgtggtgacctgcctgccgcaccactggagcacctcgcagcgctctttagtgaagttgtgttacctgtcctagccaacgagaagaataggctgaactggcctcacatgatctgcgaagacgtccgccgtcatgctcatagcttacagtgtgacctgagtgttatcctcgaacaggtcaagggcaagacgctgttaccactcccagctggttctgagaagatggaattcgcagactcaaaaagcgagactgtgctcgatagtatagacaagagcgtgatctacgctatagagagcgccgtcatcaaatggagttatcaagtccaggtggtgttaaagcgcgaatcatctcaacctttgctccagggagagaatcccacacccaaagtggaattagagttctggaagtcccgttatgaggacctgaaatacatttacaaccagcttcgcaccatcaccgtgagaggaatggcaaaactgctggacaaacttcaatcatcatactttcctgcctttaaagcaatgtaccgagatgtagtagccgccttggctgaggcacaggatattcacgtccacctgatcccactgcagcgccacctggaggccctggagaacgcagagtttccagaagtaaaacctcagctgagaccattgctgcacgtggtgtgcctgatttgggcgacctgcaagtcataccgctcacccggccgcctgactgtcctgctgcaggaaatctgcaacctgctcattcaacaggcctccaactatctgtctcctgaggatctgcttagatctgaggtcgaagaatcacagcgaaagctacaggtcgtcagtgatacactgtcattctttaagcaggagttccaggatcggcgtgagaatttgcacacatacttcaaggaaaatcaagaagtgaaggagtgggatttccaatcatctctggtctttgtaaggttggacgggtttttgggacaactgcacgtggtagagggattgctgaaaacggcactggattttcacaagttgggtaaagtggagttcagcggcgtccgcggcaacgccctgtcacagcaggtccagcagatgcatgaggaatttcaggaaatgtatcgcttgctctctggatcttcgagtgactgcttgtatctccagtctacagacttcgagaatgatgtctctgagtttaaccagaaggtcgaagatttagatcgtcgcctcggcaccatctttatacaggcatttgatgacgcaccgggactggaacacgcttttaagctgctggatatagctggaaacttgttggagcgtcccttggtggcacgagacacttctgacaagtatttagttctgatacagatgtttaacaaagatctcgatgcagtgcgcatgatatactctcagcatgtccaggaagaggccgaactgggcttttctcccgttcataagaatatgccaactgtggccggagggcttaggtgggcacaggagctacggcagaggatacagggacctttctccaacttcgggcggataactcatccgtgcatggaatcagccgagggcaagcggatgcagcagaagtacgaggacatgcttagtctgctcgagaaatatgagaccagactctatgaggattggtgtagaactgtgagtgagaagtcacaatacaacctgagtcagccacttcttaagcgagaccccgagaccaaggagatcaccataaacttcaatccccagctaatcagcgttttaaaagaaatgagttacctggagccgcgggaaatgaagcatatgcccgaaaccgccgccgctatgttctccagcagagacttctaccgccaacttgttgcaaatcttgagctgatggcaaattggtataataaggtgatgaagaccctgctggaagtcgagttccccctagtggaagaagagctccagaacatcgacctgagactgagggcagcagaagagaccctcaattggaaaacagaagggatttgtgactatgtgacggagatcacatcatccatccatgacctggagcagcgcatccagaagacaaaggataatgttgaagagatccagaatattatgaagacctgggtgacacctatttttaaaaccaaggatggaaaacgtgagtctctcctgtccttagatgaccgccatgaccgtatggaaaaatattataacctgataaaagaatcaggactcaagattcatgcattggtccaggaaaatctgggcctgttcagcgcagaccctacctctaatatttggaaaacttatgtgaacagcatcgacaaccttctgctgaacggctttttcctggctattgaatgttctctgaagtatttgttagaaaacaccgagtgtaaagcaggtttgactccgatttttgaagctcagctgtcactggccatcccggagctagtgttctacccttcattagaatccggagtcaagggaggattctgtgacatagtcgagggcttgattacatcaattttccgaattccatcacttgtcccaagactgagcccccagaacgggagtccacattatcaagtggatctggatggaatcccagatttggctaacatgcggcggaccctcatggagcgggttcaaagaatgatggggctttgctgcggctaccagagcacgttctcccaatactcatacctatatgttgaggatcgtaaagaagtcttgggtcagtttctcctgtacggccacattttgacacccgaagaaatcgaggatcacgtggaggacggaatccctgaaaatcctcccttattatcccagtttaaggtgcagattgacagttacgaaacactctacgaggaagtatgcagactagagccaatcaaggttttcgacggatggatgaaaattgacatccgcccttttaaggcatcccttctgaacattattaagcgctggagcctgctgttcaaacaacacctggtggatcacgtaacccatagcctcgcaaatctggacgcttttatcaaaaagtctgagtctgggctgttgaaaaaggtggagaagggagatttccaaggtctagtcgagataatggggcacctcatggcggtgaaggagaggcagagcaataccgacgagatgtttgagcccctaaagcagacaattgagttgcttaaaacatacgaacaggaactccccgagacagtgttcaaacagctggaggaactgcccgagaaatggaataacattaagaaagttgccatcactgtgaaacaacaggtggcccccctgcaggctaacgaggtgacgctacttagacagcgctgtaccgcatttgacgctgagcagcaacagttttgggaacagtttcacaaagaagccccgtttcggtttgattctattcatccccaccagatgctggatgctagacacatcgagatccaacagatggaaagcaccatggcctccattagcgagtcagcctcattgttcgaggtcaatgtgcccgattataagcagctgcgccagtgtcgcaaagaggtttgccagctgaaggaattgtgggacaccatcggaatggtaacaagctcgattcatgcctgggagaccacaccatggcgtaacatcaatgtggaggctatggagctagaatgtaaacagtttgccaggcacatccggaatctggacaaggaggttcgcgcatgggatgcgtttaccggcctggaaagcacagtgtggaacactctgtccagcctacgagcggtcgcagaacttcagaacccagcaattcgcgagcggcattggcgccaattaatgcaagcaaccggcgtgtcatttacgatggaccaggacacgacattggcacacctgttacagctgcagctacaccactacgaagacgaggtgcgtggcatagtggacaaagcagcaaaagagatgggtatggaaaagaccctgaaggagctgcagaccacttgggcaggcatggagttccagtacgagccacaccccagaactaatgttcccctgctgtgctctgacgaagatttaattgaagttctggaagacaaccaggttcagctgcagaatctcgtgatgagcaaatacgtggctttcttcctggaggaagtgtctgggtggcagaagaagctaagtaccgtggacgcggtcatttcaatttggttcgaggtgcagcgcacctggacacatctcgaatcaatttttactggcagcgaggacattcgtgcccaactgcctcaggattctaagcggtttgaaggcattgacatcgactttaaggaactggcctatgacgcacaaaagatccctaacgtagtccaaacaacgaataaacccggattgtacgagaaactcgaggatattcaggggagactatgcctatgtgagaaggccctggctgaatacttggatactaaaagactggccttccctcggttctattttcttagttcatccgatctgttagacatactaagtaatggaaccgcgccacagcaggttcagagacatctgtctaaactgttcgacaacatggcaaaaatgagattccagcttgacgcttccggcgaacccacgaaaaccagtctcggaatgtactcgaaagaggaggaatatgtggctttttccgagccctgtgattgttcaggccaggtggagatttggctcaaccacgtgctaggacatatgaaagccaccgtgaggcacgaaatgactgagggggttactgcctacgaagagaaaccacgtgagcagtggctgtttgatcatcccgcccaggttgcgctgacctgcacccagatctggtggacaacagaagttggcatggcattcgcaagattggaagagggctacgagagcgctatgaaagactactacaagaaacaggtcgcacagctgaaaacgttgatcactatgcttatcggacagctctccaagggagatagacaaaagataatgactatctgcaccatcgacgtgcacgcccgggatgtggtcgccaaaatgatcgcccagaaggtggataacgcacaagccttcctgtggttgtcacagctgcgccatcgctgggacgacgaagtgaaacactgcttcgcgaatatctgcgatgcccaattcctttacagctatgaatacctgggcaatactccgaggttagtgatcacaccgctgacggatagatgttatattacgctgacgcagagcctgcaccttacgatgagcggggctcccgcaggtcccgccggaacaggaaagaccgagacaactaaagatcttggtagagccctcgggattttggtgtacgtcttcaattgtagtgagcaaatggattataagagctgcggtaatatttacaaaggtctggcgcaaaccggagcatgggggtgcttcgatgagtttaatcgcattagtgtcgaggtcttaagtgtggtggcagttcaggttaaaagcattcaggatgccattagagacaaaaaacagtggttcagctttcttggagaggaaatctcccttaatcccagcgtaggtatcttcatcacaatgaatcctggctacgccgggcgcaccgagctccccgagaaccttaagtctctgtttaggccttgtgccatggtcgtcccagacttcgagttgatttgcgaaatcatgctagtcgccgaaggatttattgaggcccagtcattggcacggaaattcattacattgtatcaactctgcaaggaattgctctctaaacaggaccactacgactggggtctccgcgccattaaaagtgtgctcgttgtggccggcagtcttaagcgaggagatcccgacaggccagaggaccaggtcctgatgcgctccctgcgcgattttaacatccccaagatcgtcaccgacgacatgccgattttcatgggcctgatcggtgacctgttccccgccctggatgtgcctaggcgccgagatcccaacttcgaagcgctggtgcggaaagctattgttgacctcaaacttcaggcagaagataatttcgtcttaaaagtggtgcaacttgaagaactcttggcagtcagacatagcgtctttgtggtgggcggcgcagggactggcaagtcacaagttttgcggtccctacataaaacctaccagatcatgaagcgccggccagtatggacagacttgaatcccaaggccgtcacaaatgacgaactgttcggcatcatcaatcccgctaccggagaatggaaagacggcttgttctcttccatcatgagggagctggccaacatcacccacgacggaccaaagtggatcttacttgacggcgacatagatcctatgtggatcgaaagcctgaacactgtcatggatgataacaaggtgctgacgcttgcctccaatgagcgaataccactcaaccccactatgaaactgcttttcgaaatctcccatttgcggaccgctactcctgcaactgtatctcgcgctgggattctgtatattaaccctgccgacctgggctggaacccccctgtgagcagctggatcgagaaacgagagatccagacagagagggccaatttgaccatactctttgataaataccttcccacctgtctggacacgctgagaacgaggtttaaaaaaattattccgattcctgaacagagcatggttcaaatggtttgtcatctgttggaatgcttactaacgacagaagatattccagcggattgccccaaggaaatttacgagcactattttgtattcgccgcaatatgggcctttggcggcgcaatggttcaggaccagctggtggattatagagcagagttctctaaatggtggttgacggaattcaagaccgtcaagttcccgagccaaggaaccatttttgactactacattgatcctgagacaaagaagttcgaaccctggtccaaactcgtgccccagttcgagtttgacccagagatgccccttcaggcctgtctggtgcacactagtgagactattcgcgtatgctattttatggagaggctgatggccagacagcggccagtcatgttggtgggcactgccggtactggtaaatcagtcctggtcggggcgaaactggcgtcacttgatcctgaggcttacttagtgaagaatgtaccgttcaactattacaccaccagcgcaatgctccaagcagtgctggaaaaaccgctggaaaagaaagcgggaaggaattatggtccaccaggaaacaagaagctcatctattttattgacgatatgaatatgcccgaagttgacgcctatggcaccgtgcagccgcacacaataatccggcagcacctcgactacggccattggtatgaccgtagtaagttgtccttgaaggaaatcaccaatgtccagtacgtatcctgtatgaacccaaccgctgggagtttcaccattaacccccgtctgcaacgccacttctccgtgttcgtgttatcctttccgggggccgacgctttgtctagcatctattctattatactaacacagcacttaaaactgggcaactttcccgcgtcgctgcaaaaaagcattccaccattaatcgatctggccctggctttccaccagaagattgccaccacctttttgcctacaggaataaaatttcactatatctttaacctcagggactttgccaacatcttccaaggtattctgtttagtagtgttgaatgcgtgaaaagtacctgggacctgattaggctgtatcttcatgagagtaatagagtgtaccgcgataagatggtggaagagaaggactttgacctgtttgataagattcagactgaagtactgaaaaaaactttcgatgacattgaggacccggttgaacagacacagtcccccaatctctattgccactttgccaacggcatcggtgaacctaagtatatgcccgttcagtcctgggagctcctgacccagacactggtggaagcgttagaaaatcacaatgaggtgaacactgtgatggatctggtgctgttcgaagatgcaatgcgacatgtgtgccacatcaataggatactcgagtccccccgtggcaatgcccttctcgtaggagtgggcggctcaggaaaacagtcgcttactcgactcgccgcttttatctcctcaatggatgtctttcaaatcacccttagaaaaggctatcagatccaggattttaaaatggatctggcttccctttgccttaaagctggagtcaagaatctaaatacagtctttctgatgaccgacgcacaagtggcagacgagcggtttctggttctcattaacgatctcctggcttccggggaaattcccgatctgtatagtgacgatgaggtggagaatataatctccaacgtccgcaacgaggtgaaaagtcagggcctggtggacaacagagagaattgctggaaatttttcattgatcggatccggcgccagctgaaggtgactctctgctttagccctgtcggcaataagttgagagtgaggtctcggaaatttcctgccatagtgaactgcaccgcaatccattggttccacgaatggccccagcaggccctcgaatccgtatcacttcgcttcctgcagaacacagagggtattgaacctaccgtgaaacaaagcataagcaagtttatggccttcgtgcacacttctgtgaaccaaaccagccaatcttacttgtcaaacgaacaacggtataattataccacacccaagagttttctcgagttcatcaggctctaccagagcttactacatagacaccgaaaagaactcaaatgcaaaactgaacggcttgaaaatggcctacttaaactgcacagtacctctgctcaggtggatgaccttaaggccaagttggctgcgcaggaggtggagctgaaacagaaaaacgaagacgctgacaaacttatccaggtcgtcggcgttgagacagacaaggtgtcccgagaaaaggccatggcggacgaggaggagcagaaagtcgccgtgatcatgcttgaagtgaagcagaagcagaaggactgtgaagaggatctcgctaaagccgagcccgcgcttaccgccgcccaggctgcccttaacaccctaaataaaacgaatttgactgagcttaaatccttcgggtcccctccacttgctgtttccaatgtcagcgcggccgtcatggtgctgatggcgcccagagggagagtcccaaaagataggagctggaaggctgcgaaggtaactatggctaaggtagacggcttcctcgactccctcatcaactttaacaaagagaacatccatgagaattgccttaaggcaattaggccatatcttcaggaccccgagttcaatcctgaattcgtggctaccaaatcctatgctgcagccgggttatgcagttgggtgattaacatagttcgcttttacgaggtgttctgtgacgtggagccaaaacgccaagccctcaacaaggccactgccgatctcaccgcagctcaggaaaaactggctgcaattaaggcaaaaatcgcgcaccttaacgaaaacctcgccaaattaaccgccaggttcgaaaaagctacggccgacaagctgaagtgtcagcaggaagccgaagtgacggccgtgaccatcagtcttgctaaccgactggtcggtggactggccagtgaaaatgtgcggtgggcggacgcagtgcagaatttcaaacaacaggagaggaccctgtgtggcgacattttgttgattactgcgttcatttcctacttgggattctttacaaagaagtaccggcaatctctcctggaccgcacatggagaccttacctatctcagctgaagacaccaatccccgtcactcccgccctggacccattgcgcatgctgatggatgatgccgacgtggcagcatggcagaacgaaggcctccctgccgaccggatgagcgtggaaaacgccactatcctgatcaactgcgagagatggcccctaatggttgacccacagttacagggaatcaagtggattaaaaataagtacggcgaagatctacgggtaactcagatcggtcagaaagggtatcttcagattattgaacaggcacttgaggcaggtgcagtcgtgctgattgaaaacctggaggagtccatcgatcctgtccttggcccactgttgggcagagaggtgataaagaaaggccgattcataaagattggggacaaggagtgtgagtataatcctaaattccggctgattctgcatacaaagctcgccaacccccactaccaacctgaactgcaggcccaagctaccttgatcaatttcacggtcacaagggatgggcttgaagaccagcttctcgcagctgtggtaagcatggagcgtccggaccttgagcaattaaagagtgatttgactaaacaacagaatgggttcaaaattactctcaagacgctcgaggatagcctgctcagtaggctttccagcgcgtccggcaatttcttgggcgagacagtgctcgtcgaaaatttagaaatcaccaagcaaacagccgcagaagttgagaagaaagtccaagaggctaaagtcacagaggtgaaaataaacgaggcccgggagcactaccgaccagctgccgctcgcgcatctttgctctatttcattatgaatgacctgtccaaaattcatccgatgtatcagttctccctcaaggcattcagcattgtgttccagaaggctgtggagcgcgccgcccccgacgagagtctgcgagaaagggtggctaacttgatcgactccattacattttcggtgtaccagtacacaatccgaggcctgtttgagtgcgacaaactgacctatctggcccagctaacctttcaaatcctgttaatgaatcgggaagtaaacgccgttgagttagacttcctcctcaggagtccagtgcagactggaactgcatcaccggtcgaattcctgtctcaccaggcatggggggcagtcaaggtgctgagctctatggaagaattttcaaacctcgaccgggacattgaaggcagtgccaagtcttggaaaaaatttgttgagtctgaatgtcctgagaaggaaaagttgcctcaagagtggaaaaataagacggctctacagaggttgtgcatgctcagagctatgcggcctgacagaatgacctatgccctcagagacttcgtcgaagagaagctcggtagtaagtacgtggtgggtagggccctcgacttcgccacatctttcgaggagtcaggccccgcaacacccatgtttttcatcttgagccccggggttgatccactcaaagacgtagaatcccaaggcagaaagctgggatatacttttaacaaccagaacttccacaacgtctcccttggacaggggcaggaagtcgtggcagaggcagctctcgatctggcggctaaaaaggggcattgggtgatcctccaggataccctggaaatgtgcagcagggaaaccgagttcaagagcatattgtttgcactctgttattttcatgctgtggtggctgagcggcggaaattcggcccccagggctggaacaggagctatcctttcaatactggcgatctgactatttctgtgaacgtcctttacaactttctggaggccaacgcgaaggtcccctacgatgacctgaggtacctgttcggcgagattatgtacggggggcatataacagatgattgggacaggaggctttgtcgcacgtatctgggtgagtttattaggcccgagatgctagaaggggaactgagcctggccccaggctttcctttgcccggtaatatggactacaacggttatcaccagtatatagacgcggaactgcctcctgagagtccatacctttacggactgcatccaaacgccgaaatcggtttcctgacacaaacctcggagaagctcttcaggactgtactcgaactgcagcctagagactcccaagcccgcgacggcgcaggggcaactcgggaggaaaaggtgaaggcacttcttgaggagattctcgaacgggtcaccgacgagtttaacatacccgaactaatggccaaagtcgaagagagaacgccatacatcgtagtggcgttccaagaatgcggcaggatgaacatattaacccgtgaaatccaacgttctttgcgggaactggagctcgggttaaaaggcgaacttacaatgacttcccatatggaaaacctgcagaatgccctgtatttcgacatggttcctgagtcctgggcacgccgcgcgtacccgagtaccgcaggactagccgcgtggtttcccgatctgctgaaccgaataaaggaattagaggcgtggactggggactttaccatgccatccaccgtctggctgacaggcttcttcaaccctcagtcctttctgacggccatcatgcagtcaacagccaggaagaatgagtggcccctggaccagatggcactgcagtgcgatatgacgaaaaaaaacagggaggagtttaggagcccaccgcgcgaaggggcttatatccatggactctttatggaaggagcttgctgggacacccaagccggaatcataaccgaggcaaagctgaaagaccttaccccccctatgcccgttatgttcatcaaagcgatccccgccgacaaacaggactgtaggagtgtgtatagctgcccagtttacaagacgtcacagcgtgggcccacatacgtctggacatttaatctaaagaccaaggagaatccaagcaaatgggtattagccggggtcgctctgctcctgcagatttag

SEQ ID NO: 117316 - DNA, 13461 bp, Artificial Sequence
  derived and/or modified sequence
atgaggctggccgaggagcgggccgccctggccgcagaaaatgctgatggagagcctggagctgaccggcggctgcggctgctgggcacctacgtggccatgagcctgcggcctgctgctggggcctgggagcgctgtgccggcagcgctgaggccgagcagctgctgcaggccttcctgggcagagatgctgctgagggcccccggcccctgctggtggtgcggcccggcccccggggcctggccatccggcccggcctggaggtgggccctgagagcggcctggccggggccaaggccctcttcttcctgaggacaggccctgagcccccaggccctgacagcttcagaggagctgtggtgtgtggggacctgcctgctgcccccctggagcacctggccgccctcttcagcgaggtggtgctgcctgtgctggccaatgagaagaaccggctgaactggccccacatgatctgtgaagatgtgagaagacatgcccacagcctgcagtgtgacctgagcgtcatcctggagcaggtgaagggcaagaccctgctgcccctgcctgctggcagcgagaagatggagtttgctgacagcaagtctgagaccgtgctggacagcattgacaagagcgtcatctatgccattgaatctgctgtgatcaagtggagctaccaggtgcaggtggtgctgaagcgggagagcagccagcccctgctgcagggcgagaaccccacccccaaggtggagctggagttctggaagagccgctatgaggacctgaagtacatctacaaccagctgcggaccatcaccgtgcggggcatggccaagctgctggacaagctgcagagcagctacttccctgccttcaaggccatgtacagagatgtggtggccgccctggccgaggcccaggacatccacgtgcacctgatccccctgcagaggcacctggaggccctggagaatgctgagttccctgaggtgaagccccagctgcggcccctgctgcacgtggtgtgcctgatctgggccacctgcaagagctaccgcagccctggccgcctgactgtgctgctgcaggagatctgcaacctgctgatccagcaggccagcaactacctgagccctgaggacctgctgcggtctgaggtggaggagagccagaggaagctgcaggtggtgtctgacaccctgtccttcttcaagcaggagttccaggacagaagagagaacctgcacacctacttcaaggagaaccaggaggtgaaggagtgggacttccagagcagcctggtgtttgtgcggctggatggcttcctgggccagctgcacgtggtggagggcctgctgaagacagccctggacttccacaagctgggcaaggtggagttcagcggcgtgagaggaaatgccctgagccagcaggtgcagcagatgcatgaggagttccaggagatgtaccgcctgctgagcggcagcagcagtgactgcctgtacctgcagagcacagactttgaaaatgatgtgtctgagttcaaccagaaggtggaggacctggaccggcggctgggcaccatcttcatccaggcctttgatgatgcccctggcctggagcacgccttcaagctgctggacattgctggcaacctgctggagcggcccctggtggcccgggacaccagtgacaagtacctggtgctgatccagatgttcaacaaggacctggatgctgtgaggatgatctacagccagcacgtgcaggaggaggccgagctgggcttcagccctgtgcacaagaacatgcccaccgtggccggcggcctgcgctgggcccaggagctgcggcagaggatccagggccccttcagcaactttggccgcatcacccacccctgcatggagagcgctgagggcaagaggatgcagcagaagtatgaggacatgctgagcctgctggagaagtatgagacccggctgtatgaggactggtgcaggacagtgtctgagaagagccagtacaacctgagccagcccctgctgaagagggaccctgagaccaaggagatcaccatcaacttcaacccccagctgatctctgtgctgaaggagatgagctacctggagccccgggagatgaagcacatgcctgagacagctgctgccatgttcagcagccgggacttctaccggcagctggtggccaacctggagctgatggccaactggtacaacaaggtgatgaagaccctgctggaggtggagttccccctggtggaggaggagctgcagaacatcgacctgcggctgcgggctgctgaggagaccctgaactggaagacagagggcatctgtgactatgtgacagagatcaccagcagcatccatgacctggagcagaggatccagaagaccaaggacaacgtggaggagatccagaacatcatgaagacctgggtgacccccatcttcaagaccaaggatggcaagcgggagagcctgctgagcctggatgacagacatgacaggatggagaagtactacaacctgatcaaggagagcggcctgaagatccacgccctggtgcaggagaacctgggcctcttctctgctgaccccaccagcaacatctggaagacctacgtgaacagcattgacaacctgctgctgaatggcttcttcctggccatcgagtgcagcctgaagtacctgctggagaacacagagtgcaaggccggcctgacccccatctttgaggcccagctgagcctggccatccctgagctggtgttctaccccagcctggagagcggcgtgaagggcggcttctgtgacatcgtggagggcctcatcaccagcatcttccgcatccccagcctggtgccccggctgagcccccagaatggcagcccccactaccaggtggacctggatggcatcccagacctggccaacatgaggaggaccctgatggagcgggtgcagaggatgatgggcctgtgctgcggctaccagagcaccttcagccagtacagctacctgtatgtggaggacaggaaggaggtgctgggccagttcctgctgtatggccacatcctgaccccagaggagattgaagatcatgtggaggatggcatccctgagaacccccccctgctgagccagttcaaggtgcagattgacagctatgagaccctgtatgaggaggtgtgccgcctggagcccatcaaggtgtttgatggctggatgaagattgacatccggcccttcaaggccagcctgctgaacatcatcaagcgctggagcctgctcttcaagcagcacctggtggaccacgtgacccacagcctggccaacctggatgccttcatcaagaagtctgagagcggcctgctgaagaaggtggagaagggggacttccagggcctggtggagatcatgggccacctgatggctgtgaaggagcggcagagcaacacagatgagatgtttgagcccctgaagcagaccatcgagctgctgaagacctatgagcaggagctgcctgagaccgtcttcaagcagctggaggagctgcctgagaagtggaacaacatcaagaaggtggccatcaccgtgaagcagcaggtggcccccctgcaggccaatgaggtgaccctgctgcggcagcgctgcacagcctttgatgctgagcagcagcagttctgggagcagttccacaaggaggcccccttccgctttgacagcatccacccccaccagatgctggatgcccggcacatcgagatccagcagatggagagcaccatggccagcatcagcgagagcgccagcctgtttgaggtgaatgtgcctgactacaagcagctgcggcagtgcaggaaggaggtgtgccagctgaaggagctgtgggacaccatcggcatggtgaccagcagcatccacgcctgggagaccaccccctggaggaacatcaacgtggaggccatggagctggagtgcaagcagtttgcccggcacatccggaacctggacaaggaggtgcgggcctgggatgccttcaccggcctggagagcacagtgtggaacaccctgagcagcctgcgggctgtggccgagctgcagaacccagccatccgggagcggcactggaggcagctgatgcaggccactggagtgtccttcaccatggaccaggacaccaccctggcccacctgctgcagctgcagctgcaccactatgaagatgaggtgcggggcatcgtggacaaggccgccaaggagatgggcatggagaagaccctgaaggagctgcagaccacctgggccggcatggagttccagtatgagccccaccccaggaccaacgtgcccctgctgtgcagtgatgaggacctgattgaggtgctggaggacaaccaggtgcagctgcagaacctggtgatgagcaaatatgtggccttcttcctggaggaggtgtctggctggcagaagaagctgagcacagtggatgctgtgatcagcatctggtttgaggtgcagaggacctggacccacctggagagcatcttcaccggcagcgaggacatccgggcccagctgccccaggacagcaagagatttgagggcatcgacatcgacttcaaggagctggcctatgatgcccagaagatccccaacgtggtgcagaccaccaacaagccaggcctgtatgagaagctggaggacatccagggccgcctgtgcctgtgtgagaaggccctggccgagtacctggacaccaagaggctggccttcccccgcttctacttcctgagcagcagtgacctgctggacatcctgagcaatggaacagccccccagcaggtgcagaggcacctgagcaagctgtttgacaacatggccaagatgaggttccagctggatgccagcggggagcccaccaagaccagcctgggcatgtacagcaaggaggaggagtatgtggccttcagcgagccctgtgactgcagcggccaggtggagatctggctgaaccacgtgctgggccacatgaaggccaccgtgagacatgagatgacagagggcgtgacagcctatgaggagaagccccgggagcagtggctgtttgaccacccagcccaggtggccctgacctgcacccagatctggtggaccacagaggtgggcatggcctttgcccggctggaggagggctatgagagcgccatgaaggactactacaagaagcaggtggcccagctgaagaccctcatcaccatgctgattggccagctgagcaagggggaccggcagaagatcatgaccatctgcaccattgatgtgcacgccagagatgtggtggccaagatgattgcccagaaggtggacaatgcccaggccttcctgtggctgagccagctgcggcaccgctgggatgatgaggtgaagcactgctttgccaacatctgtgatgcccagttcctgtacagctatgagtacctgggcaacaccccccggctggtgatcacccccctgacagaccgctgctacatcaccctgacccagagcctgcacctgaccatgtctggggccccagctggccctgctggcaccgggaagacagagaccaccaaggacctgggccgggccctgggcatcctggtgtatgtgttcaactgcagcgagcagatggactacaagagctgtggcaacatctacaagggcctggcccagacaggagcctggggctgctttgatgagttcaaccgcatctctgtggaggtgctgtctgtggtggccgtgcaggtgaagagcatccaggatgccatccgggacaagaagcagtggttctccttcctgggggaggagatcagcctgaaccccagcgtgggcatcttcatcaccatgaaccctggctacgccggccgcacagagctgcctgagaacctgaagagcctcttccggccctgtgccatggtggtgcctgactttgagctgatctgtgagatcatgctggtggccgagggcttcatcgaggcccagagcctggccaggaagttcatcaccctgtaccagctgtgcaaggagctgctgagcaagcaggaccactatgactggggcctgcgggccatcaagtctgtgctggtggtggccggcagcctgaagagaggagaccctgacaggcctgaggaccaggtgctgatgaggagcctgcgggacttcaacatccccaagatcgtgacagatgacatgcccatcttcatgggcctcatcggggacctcttccctgccctggatgtgccccggcggcgggaccccaactttgaggccctggtgaggaaggccatcgtggacctgaagctgcaggccgaggacaactttgtgctgaaggtggtgcagctggaggagctgctggccgtgcgccacagcgtgtttgtggtgggcggggccggcaccgggaagagccaggtgctgcggagcctgcacaagacctaccagatcatgaagagaagacctgtgtggacagacctgaaccccaaggctgtgaccaatgatgagctgtttggcatcatcaacccagccaccggggagtggaaggatggcctcttcagcagcatcatgagggagctggccaacatcacccatgatggccccaagtggatcctgctggatggagacatcgaccccatgtggattgagagcctgaacacagtgatggatgacaacaaggtgctgaccctggccagcaatgaaagaatccccctgaaccccaccatgaagctgctgtttgagatcagccacctgaggacagccaccccagccaccgtgtcccgggccggcatcctgtacatcaacccagctgacctgggctggaacccccctgtgtcctcctggattgagaagcgggagatccagacagagcgggccaacctgaccatcctgtttgacaagtacctgcccacctgcctggacaccctgcggacccgcttcaagaagatcatccccatccctgagcagagcatggtgcagatggtgtgccacctgctggagtgcctgctgaccacagaggacatcccagctgactgccccaaggagatctatgagcactactttgtgtttgctgccatctgggccttcggcggggccatggtgcaggaccagctggtggactacagagctgagttcagcaagtggtggctgacagagttcaagacagtgaagttccccagccagggcaccatctttgactactacatcgaccctgagaccaagaagtttgagccctggagcaagctggtgccccagtttgaatttgatcctgagatgcccctgcaggcctgcctggtgcacaccagcgagaccatccgggtgtgctacttcatggagcggctgatggcccggcagaggcctgtgatgctggtgggcacagctggcaccgggaagtctgtgctggtgggcgccaagctggccagcctggaccctgaggcctacctggtgaagaatgtgcccttcaactactacaccaccagcgccatgctgcaggccgtgctggagaagcccctggagaagaaggccggcaggaactacggccccccaggcaacaagaagctgatctacttcattgatgacatgaacatgcctgaggtggatgcctatggaacagtgcagccccacaccatcatccggcagcacctggactatggccactggtatgacaggagcaagctgagcctgaaggagatcaccaacgtgcagtatgtgtcctgcatgaaccccacagctggcagcttcaccatcaacccccggctgcagaggcacttctctgtgtttgtgctgtccttccctggagcagatgccctgagcagcatctacagcatcatcctgacccagcacctgaagctgggcaacttccctgccagcctgcagaagagcatcccccccctgattgacctggccctggccttccaccagaagatcgccaccaccttcctgcccaccggcatcaagttccactacatcttcaacctgcgggactttgccaacatcttccagggcatcctcttcagctctgtggagtgtgtgaagagcacctgggacctgatccggctgtacctgcacgagagcaacagagtgtacagagacaagatggtggaggagaaggactttgacctgtttgacaagatccagacagaggtgctgaagaagacctttgatgacatcgaggaccctgtggagcagacccagagccccaacctgtactgccactttgccaatggaattggagagcccaagtacatgcctgtgcagagctgggagctgctgacccagaccctggtggaggccctggagaaccacaatgaggtgaacacagtgatggacctggtgctgtttgaagatgccatgagacatgtgtgccacatcaaccgcatcctggagagccccagaggaaatgccctgctggtgggcgtgggcggcagcggcaagcagagcctgacccggctggccgccttcatcagctccatggatgtgttccagatcaccctgaggaagggctaccagatccaggacttcaagatggacctggccagcctgtgcctgaaggccggcgtgaagaacctgaacacagtgttcctgatgacagatgcccaggtggctgatgagcgcttcctggtgctgatcaatgacctgctggccagcggggagatcccagacctgtacagtgatgatgaggtggagaacatcatcagcaatgtgagaaatgaggtgaagagccagggcctggtggacaaccgggagaactgctggaagttcttcatcgaccgcatccggcggcagctgaaggtgaccctgtgcttcagccctgtgggcaacaagctgcgggtgcgcagcaggaagtttcctgccatcgtgaactgcacagccatccactggttccacgagtggccccagcaggccctggagagcgtgtccctgcgcttcctgcagaacacagagggcatcgagcccaccgtgaagcagagcatcagcaagttcatggcctttgtgcacacctctgtgaaccagaccagccagagctacctgagcaatgagcagcgctacaactacaccacccccaagagcttcctggagttcatccggctgtaccagagcctgctgcaccgccacaggaaggagctgaagtgcaagacagagcggctggagaatggcctgctgaagctgcacagcaccagcgcccaggtggatgacctgaaggccaagctggccgcccaggaggtggagctgaagcagaagaatgaagatgctgacaagctgatccaggtggtgggcgtggagacagacaaggtgtcccgggagaaggccatggctgatgaggaggagcagaaggtggccgtcatcatgctggaggtgaagcagaagcagaaggactgtgaggaggacctggccaaggccgagcccgccctgacagctgcccaggccgccctgaacaccctgaacaagaccaacctgacagagctgaagagctttggcagcccccccctggccgtgtccaatgtgtctgctgctgtgatggtgctgatggccccccggggccgggtgcccaaggaccgctcctggaaggccgccaaggtgaccatggccaaggtggatggcttcctggacagcctcatcaacttcaacaaggagaacatccacgagaactgcctgaaggccatccggccctacctgcaggaccctgagttcaaccctgagtttgtggccaccaagagctatgctgctgctggcctgtgctcctgggtgatcaacatcgtgcgcttctatgaggtgttctgtgatgtggagcccaagaggcaggccctgaacaaggccacagctgacctgacagctgcccaggagaagctggccgccatcaaggccaagatcgcccacctgaatgaaaacctggccaagctgacagccaggtttgagaaggccacagctgacaagctgaagtgccagcaggaggccgaggtgacagctgtgaccatcagcctggccaaccggctggtgggcggcctggcctctgaaaatgtgcgctgggcagatgctgtgcagaacttcaagcagcaggagaggaccctgtgtggggacatcctgctgatcacagccttcatctcctacctgggcttcttcaccaagaagtaccggcagagcctgctggacaggacctggaggccctacctgagccagctgaagacccccatccctgtgaccccagccctggaccccctgaggatgctgatggatgatgctgatgtggccgcctggcagaatgaaggcctgcctgctgacaggatgtctgtggagaatgccaccatcctgatcaactgtgagcgctggcccctgatggtggacccccagctgcagggcatcaagtggatcaagaacaagtacggggaggacctgcgggtgacccagatcggccagaagggctacctgcagatcatcgagcaggccctggaggccggggctgtggtgctgattgagaacctggaggagagcattgatcctgtgctgggccccctgctgggccgggaggtgatcaagaagggccgcttcatcaagatcggggacaaggaatgtgagtacaaccccaagttccgcctcatcctgcacaccaagctggccaacccccactaccagcctgagctgcaggcccaggccaccctcatcaacttcaccgtgaccagagatggcctggaggaccagctgctggccgctgtggtgtccatggagaggccagacctggagcagctgaagagtgacctgaccaagcagcagaatggcttcaagatcaccctgaagaccctggaggacagcctgctgagccggctgagcagcgccagcggcaacttcctgggggagaccgtgctggtggagaacctggagatcaccaagcagacagctgctgaggtggagaagaaggtgcaggaggccaaggtgacagaggtgaagatcaatgaggcccgggagcactacagacctgctgctgcccgggccagcctgctgtacttcatcatgaatgacctgagcaagatccaccccatgtaccagttcagcctgaaggccttcagcatcgtgttccagaaggctgtggagagagctgccccagatgagagcctgcgggagcgggtggccaacctgattgacagcatcaccttctctgtgtaccagtacaccatccggggcctgtttgaatgtgacaagctgacctacctggcccagctgaccttccagatcctgctgatgaaccgggaggtgaatgctgtggagctggacttcctgctgcggagccctgtgcagacaggaacagccagccctgtggagttcctgagccaccaggcctggggcgctgtgaaggtgctgagctccatggaggagttcagcaacctggaccgggacatcgagggcagcgccaagtcctggaagaagtttgtggagagtgaatgtcctgagaaggagaagctgccccaggagtggaagaacaagacagccctgcagaggctgtgcatgctgcgggccatgaggccagacaggatgacctacgccctgcgggactttgtggaggagaagctgggcagcaaatatgtggtgggccgggccctggactttgccaccagctttgaggagagcggccctgccacccccatgttcttcatcctgagccctggggtggaccccctgaaggatgtggagagccagggcaggaagctgggctacaccttcaacaaccagaacttccacaacgtgtccctgggccagggccaggaggtggtggccgaggccgccctggacctggccgccaagaagggccactgggtgatcctgcagaacatccacctggtggccaagtggctgagcaccctggagaagaagctggaggagcacagcgagaacagccaccctgagttccgggtcttcatgtctgctgagcccgcccccagccctgagggccacatcatcccccagggcatcctggagaacagcatcaagatcaccaatgagccccccaccggcatgcacgccaacctgcacaaggccctggacaacttcacccaggacaccctggagatgtgcagccgggagacagagttcaagagcatcctgtttgccctgtgctacttccacgctgtggtggccgagaggaggaagtttggcccccagggctggaacagaagctaccccttcaacacaggagacctgaccatctctgtgaatgtgctgtacaacttcctggaggccaatgccaaggtgccctatgatgacctgcgctacctgtttggagagatcatgtatggaggccacatcacagatgactgggaccggcggctgtgcaggacctacctgggggagttcatccggcctgagatgctggagggggagctgagcctggcccctggcttccccctgcccggcaacatggactacaacggctaccaccagtacattgatgctgagctgcccccagagagcccctacctgtatggcctgcaccccaatgctgagatcggcttcctgacccagaccagcgagaagctgttcagaacagtgctggagctgcagccccgggacagccaggccagagatggagctggggccacccgggaggagaaggtgaaggccctgctggaggagatcctggagcgggtgacagatgagttcaacatccctgagctgatggccaaggtggaggagaggaccccctacatcgtggtggccttccaggagtgtggccgcatgaacatcctgacccgggagatccagaggagcctgcgggagctggagctgggcctgaagggggagctgaccatgaccagccacatggagaacctgcagaatgccctgtactttgacatggtgcctgagagctgggcccggcgggcctaccccagcacagctggcctggccgcctggttcccagacctgctgaaccgcatcaaggagctggaggcctggacaggagacttcaccatgcccagcacagtgtggctgaccggcttcttcaacccccagagcttcctgacagccatcatgcagagcacagccaggaagaatgagtggcccctggaccagatggccctgcagtgtgacatgaccaagaagaaccgggaggagttccgcagccccccccgggagggcgcctacatccacggcctcttcatggagggcgcctgctgggacacccaggccggcatcatcacagaggccaagctgaaggacctgaccccacccatgcctgtgatgttcatcaaggccatcccagctgacaagcaggactgccgctctgtgtacagctgccctgtgtacaagaccagccagaggggccccacctacgtgtggaccttcaacctgaagaccaaggagaaccccagcaagtgggtgctggccggcgtggccctgctgctgcagatctag

SEQ ID NO: 117317 - DNA, 2397 bp, Artificial Sequence
  derived and/or modified sequence
atgaatgacctgagcaagatccaccccatgtaccagttcagcctgaaggccttcagcatcgtgttccagaaggctgtggagagagctgccccagatgagagcctgcgggagcgggtggccaacctgattgacagcatcaccttctctgtgtaccagtacaccatccggggcctgtttgaatgtgacaagctgacctacctggcccagctgaccttccagatcctgctgatgaaccgggaggtgaatgctgtggagctggacttcctgctgcggagccctgtgcagacaggaacagccagccctgtggagttcctgagccaccaggcctggggcgctgtgaaggtgctgagctccatggaggagttcagcaacctggaccgggacatcgagggcagcgccaagtcctggaagaagtttgtggagagtgaatgtcctgagaaggagaagctgccccaggagtggaagaacaagacagccctgcagaggctgtgcatgctgcgggccatgaggccagacaggatgacctacgccctgcgggactttgtggaggagaagctgggcagcaaatatgtggtgggccgggccctggactttgccaccagctttgaggagagcggccctgccacccccatgttcttcatcctgagccctggggtggaccccctgaaggatgtggagagccagggcaggaagctgggctacaccttcaacaaccagaacttccacaacgtgtccctgggccagggccaggaggtggtggccgaggccgccctggacctggccgccaagaagggccactgggtgatcctgcagaacatccacctggtggccaagtggctgagcaccctggagaagaagctggaggagcacagcgagaacagccaccctgagttccgggtcttcatgtctgctgagcccgcccccagccctgagggccacatcatcccccagggcatcctggagaacagcatcaagatcaccaatgagccccccaccggcatgcacgccaacctgcacaaggccctggacaacttcacccaggacaccctggagatgtgcagccgggagacagagttcaagagcatcctgtttgccctgtgctacttccacgctgtggtggccgagaggaggaagtttggcccccagggctggaacagaagctaccccttcaacacaggagacctgaccatctctgtgaatgtgctgtacaacttcctggaggccaatgccaaggtgccctatgatgacctgcgctacctgtttggagagatcatgtatggaggccacatcacagatgactgggaccggcggctgtgcaggacctacctgggggagttcatccggcctgagatgctggagggggagctgagcctggcccctggcttccccctgcccggcaacatggactacaacggctaccaccagtacattgatgctgagctgcccccagagagcccctacctgtatggcctgcaccccaatgctgagatcggcttcctgacccagaccagcgagaagctgttcagaacagtgctggagctgcagccccgggacagccaggccagagatggagctggggccacccgggaggagaaggtgaaggccctgctggaggagatcctggagcgggtgacagatgagttcaacatccctgagctgatggccaaggtggaggagaggaccccctacatcgtggtggccttccaggagtgtggccgcatgaacatcctgacccgggagatccagaggagcctgcgggagctggagctgggcctgaagggggagctgaccatgaccagccacatggagaacctgcagaatgccctgtactttgacatggtgcctgagagctgggcccggcgggcctaccccagcacagctggcctggccgcctggttcccagacctgctgaaccgcatcaaggagctggaggcctggacaggagacttcaccatgcccagcacagtgtggctgaccggcttcttcaacccccagagcttcctgacagccatcatgcagagcacagccaggaagaatgagtggcccctggaccagatggccctgcagtgtgacatgaccaagaagaaccgggaggagttccgcagccccccccgggagggcgcctacatccacggcctcttcatggagggcgcctgctgggacacccaggccggcatcatcacagaggccaagctgaaggacctgaccccacccatgcctgtgatgttcatcaaggccatcccagctgacaagcaggactgccgctctgtgtacagctgccctgtgtacaagaccagccagaggggccccacctacgtgtggaccttcaacctgaagaccaaggagaaccccagcaagtgggtgctggccggcgtggccctgctgctgcagatctag

SEQ ID NO: 117318 - DNA, 8979 bp, Artificial Sequence
  derived and/or modified sequence
gaggtgcggggcatcgtggacaaggccgccaaggagatgggcatggagaagaccctgaaggagctgcagaccacctgggccggcatggagttccagtatgagccccaccccaggaccaacgtgcccctgctgtgcagtgatgaggacctgattgaggtgctggaggacaaccaggtgcagctgcagaacctggtgatgagcaaatatgtggccttcttcctggaggaggtgtctggctggcagaagaagctgagcacagtggatgctgtgatcagcatctggtttgaggtgcagaggacctggacccacctggagagcatcttcaccggcagcgaggacatccgggcccagctgccccaggacagcaagagatttgagggcatcgacatcgacttcaaggagctggcctatgatgcccagaagatccccaacgtggtgcagaccaccaacaagccaggcctgtatgagaagctggaggacatccagggccgcctgtgcctgtgtgagaaggccctggccgagtacctggacaccaagaggctggccttcccccgcttctacttcctgagcagcagtgacctgctggacatcctgagcaatggaacagccccccagcaggtgcagaggcacctgagcaagctgtttgacaacatggccaagatgaggttccagctggatgccagcggggagcccaccaagaccagcctgggcatgtacagcaaggaggaggagtatgtggccttcagcgagccctgtgactgcagcggccaggtggagatctggctgaaccacgtgctgggccacatgaaggccaccgtgagacatgagatgacagagggcgtgacagcctatgaggagaagccccgggagcagtggctgtttgaccacccagcccaggtggccctgacctgcacccagatctggtggaccacagaggtgggcatggcctttgcccggctggaggagggctatgagagcgccatgaaggactactacaagaagcaggtggcccagctgaagaccctcatcaccatgctgattggccagctgagcaagggggaccggcagaagatcatgaccatctgcaccattgatgtgcacgccagagatgtggtggccaagatgattgcccagaaggtggacaatgcccaggccttcctgtggctgagccagctgcggcaccgctgggatgatgaggtgaagcactgctttgccaacatctgtgatgcccagttcctgtacagctatgagtacctgggcaacaccccccggctggtgatcacccccctgacagaccgctgctacatcaccctgacccagagcctgcacctgaccatgtctggggccccagctggccctgctggcaccgggaagacagagaccaccaaggacctgggccgggccctgggcatcctggtgtatgtgttcaactgcagcgagcagatggactacaagagctgtggcaacatctacaagggcctggcccagacaggagcctggggctgctttgatgagttcaaccgcatctctgtggaggtgctgtctgtggtggccgtgcaggtgaagagcatccaggatgccatccgggacaagaagcagtggttctccttcctgggggaggagatcagcctgaaccccagcgtgggcatcttcatcaccatgaaccctggctacgccggccgcacagagctgcctgagaacctgaagagcctcttccggccctgtgccatggtggtgcctgactttgagctgatctgtgagatcatgctggtggccgagggcttcatcgaggcccagagcctggccaggaagttcatcaccctgtaccagctgtgcaaggagctgctgagcaagcaggaccactatgactggggcctgcgggccatcaagtctgtgctggtggtggccggcagcctgaagagaggagaccctgacaggcctgaggaccaggtgctgatgaggagcctgcgggacttcaacatccccaagatcgtgacagatgacatgcccatcttcatgggcctcatcggggacctcttccctgccctggatgtgccccggcggcgggaccccaactttgaggccctggtgaggaaggccatcgtggacctgaagctgcaggccgaggacaactttgtgctgaaggtggtgcagctggaggagctgctggccgtgcgccacagcgtgtttgtggtgggcggggccggcaccgggaagagccaggtgctgcggagcctgcacaagacctaccagatcatgaagagaagacctgtgtggacagacctgaaccccaaggctgtgaccaatgatgagctgtttggcatcatcaacccagccaccggggagtggaaggatggcctcttcagcagcatcatgagggagctggccaacatcacccatgatggccccaagtggatcctgctggatggagacatcgaccccatgtggattgagagcctgaacacagtgatggatgacaacaaggtgctgaccctggccagcaatgaaagaatccccctgaaccccaccatgaagctgctgtttgagatcagccacctgaggacagccaccccagccaccgtgtcccgggccggcatcctgtacatcaacccagctgacctgggctggaacccccctgtgtcctcctggattgagaagcgggagatccagacagagcgggccaacctgaccatcctgtttgacaagtacctgcccacctgcctggacaccctgcggacccgcttcaagaagatcatccccatccctgagcagagcatggtgcagatggtgtgccacctgctggagtgcctgctgaccacagaggacatcccagctgactgccccaaggagatctatgagcactactttgtgtttgctgccatctgggccttcggcggggccatggtgcaggaccagctggtggactacagagctgagttcagcaagtggtggctgacagagttcaagacagtgaagttccccagccagggcaccatctttgactactacatcgaccctgagaccaagaagtttgagccctggagcaagctggtgccccagtttgaatttgatcctgagatgcccctgcaggcctgcctggtgcacaccagcgagaccatccgggtgtgctacttcatggagcggctgatggcccggcagaggcctgtgatgctggtgggcacagctggcaccgggaagtctgtgctggtgggcgccaagctggccagcctggaccctgaggcctacctggtgaagaatgtgcccttcaactactacaccaccagcgccatgctgcaggccgtgctggagaagcccctggagaagaaggccggcaggaactacggccccccaggcaacaagaagctgatctacttcattgatgacatgaacatgcctgaggtggatgcctatggaacagtgcagccccacaccatcatccggcagcacctggactatggccactggtatgacaggagcaagctgagcctgaaggagatcaccaacgtgcagtatgtgtcctgcatgaaccccacagctggcagcttcaccatcaacccccggctgcagaggcacttctctgtgtttgtgctgtccttccctggagcagatgccctgagcagcatctacagcatcatcctgacccagcacctgaagctgggcaacttccctgccagcctgcagaagagcatcccccccctgattgacctggccctggccttccaccagaagatcgccaccaccttcctgcccaccggcatcaagttccactacatcttcaacctgcgggactttgccaacatcttccagggcatcctcttcagctctgtggagtgtgtgaagagcacctgggacctgatccggctgtacctgcacgagagcaacagagtgtacagagacaagatggtggaggagaaggactttgacctgtttgacaagatccagacagaggtgctgaagaagacctttgatgacatcgaggaccctgtggagcagacccagagccccaacctgtactgccactttgccaatggaattggagagcccaagtacatgcctgtgcagagctgggagctgctgacccagaccctggtggaggccctggagaaccacaatgaggtgaacacagtgatggacctggtgctgtttgaagatgccatgagacatgtgtgccacatcaaccgcatcctggagagccccagaggaaatgccctgctggtgggcgtgggcggcagcggcaagcagagcctgacccggctggccgccttcatcagctccatggatgtgttccagatcaccctgaggaagggctaccagatccaggacttcaagatggacctggccagcctgtgcctgaaggccggcgtgaagaacctgaacacagtgttcctgatgacagatgcccaggtggctgatgagcgcttcctggtgctgatcaatgacctgctggccagcggggagatcccagacctgtacagtgatgatgaggtggagaacatcatcagcaatgtgagaaatgaggtgaagagccagggcctggtggacaaccgggagaactgctggaagttcttcatcgaccgcatccggcggcagctgaaggtgaccctgtgcttcagccctgtgggcaacaagctgcgggtgcgcagcaggaagtttcctgccatcgtgaactgcacagccatccactggttccacgagtggccccagcaggccctggagagcgtgtccctgcgcttcctgcagaacacagagggcatcgagcccaccgtgaagcagagcatcagcaagttcatggcctttgtgcacacctctgtgaaccagaccagccagagctacctgagcaatgagcagcgctacaactacaccacccccaagagcttcctggagttcatccggctgtaccagagcctgctgcaccgccacaggaaggagctgaagtgcaagacagagcggctggagaatggcctgctgaagctgcacagcaccagcgcccaggtggatgacctgaaggccaagctggccgcccaggaggtggagctgaagcagaagaatgaagatgctgacaagctgatccaggtggtgggcgtggagacagacaaggtgtcccgggagaaggccatggctgatgaggaggagcagaaggtggccgtcatcatgctggaggtgaagcagaagcagaaggactgtgaggaggacctggccaaggccgagcccgccctgacagctgcccaggccgccctgaacaccctgaacaagaccaacctgacagagctgaagagctttggcagcccccccctggccgtgtccaatgtgtctgctgctgtgatggtgctgatggccccccggggccgggtgcccaaggaccgctcctggaaggccgccaaggtgaccatggccaaggtggatggcttcctggacagcctcatcaacttcaacaaggagaacatccacgagaactgcctgaaggccatccggccctacctgcaggaccctgagttcaaccctgagtttgtggccaccaagagctatgctgctgctggcctgtgctcctgggtgatcaacatcgtgcgcttctatgaggtgttctgtgatgtggagcccaagaggcaggccctgaacaaggccacagctgacctgacagctgcccaggagaagctggccgccatcaaggccaagatcgcccacctgaatgaaaacctggccaagctgacagccaggtttgagaaggccacagctgacaagctgaagtgccagcaggaggccgaggtgacagctgtgaccatcagcctggccaaccggctggtgggcggcctggcctctgaaaatgtgcgctgggcagatgctgtgcagaacttcaagcagcaggagaggaccctgtgtggggacatcctgctgatcacagccttcatctcctacctgggcttcttcaccaagaagtaccggcagagcctgctggacaggacctggaggccctacctgagccagctgaagacccccatccctgtgaccccagccctggaccccctgaggatgctgatggatgatgctgatgtggccgcctggcagaatgaaggcctgcctgctgacaggatgtctgtggagaatgccaccatcctgatcaactgtgagcgctggcccctgatggtggacccccagctgcagggcatcaagtggatcaagaacaagtacggggaggacctgcgggtgacccagatcggccagaagggctacctgcagatcatcgagcaggccctggaggccggggctgtggtgctgattgagaacctggaggagagcattgatcctgtgctgggccccctgctgggccgggaggtgatcaagaagggccgcttcatcaagatcggggacaaggaatgtgagtacaaccccaagttccgcctcatcctgcacaccaagctggccaacccccactaccagcctgagctgcaggcccaggccaccctcatcaacttcaccgtgaccagagatggcctggaggaccagctgctggccgctgtggtgtccatggagaggccagacctggagcagctgaagagtgacctgaccaagcagcagaatggcttcaagatcaccctgaagaccctggaggacagcctgctgagccggctgagcagcgccagcggcaacttcctgggggagaccgtgctggtggagaacctggagatcaccaagcagacagctgctgaggtggagaagaaggtgcaggaggccaaggtgacagaggtgaagatcaatgaggcccgggagcactacagacctgctgctgcccgggccagcctgctgtacttcatcatgaatgacctgagcaagatccaccccatgtaccagttcagcctgaaggccttcagcatcgtgttccagaaggctgtggagagagctgccccagatgagagcctgcgggagcgggtggccaacctgattgacagcatcaccttctctgtgtaccagtacaccatccggggcctgtttgaatgtgacaagctgacctacctggcccagctgaccttccagatcctgctgatgaaccgggaggtgaatgctgtggagctggacttcctgctgcggagccctgtgcagacaggaacagccagccctgtggagttcctgagccaccaggcctggggcgctgtgaaggtgctgagctccatggaggagttcagcaacctggaccgggacatcgagggcagcgccaagtcctggaagaagtttgtggagagtgaatgtcctgagaaggagaagctgccccaggagtggaagaacaagacagccctgcagaggctgtgcatgctgcgggccatgaggccagacaggatgacctacgccctgcgggactttgtggaggagaagctgggcagcaaatatgtggtgggccgggccctggactttgccaccagctttgaggagagcggccctgccacccccatgttcttcatcctgagccctggggtggaccccctgaaggatgtggagagccagggcaggaagctgggctacaccttcaacaaccagaacttccacaacgtgtccctgggccagggccaggaggtggtggccgaggccgccctggacctggccgccaagaagggccactgggtgatcctgcaggacaccctggagatgtgcagccgggagacagagttcaagagcatcctgtttgccctgtgctacttccacgctgtggtggccgagaggaggaagtttggcccccagggctggaacagaagctaccccttcaacacaggagacctgaccatctctgtgaatgtgctgtacaacttcctggaggccaatgccaaggtgccctatgatgacctgcgctacctgtttggagagatcatgtatggaggccacatcacagatgactgggaccggcggctgtgcaggacctacctgggggagttcatccggcctgagatgctggagggggagctgagcctggcccctggcttccccctgcccggcaacatggactacaacggctaccaccagtacattgatgctgagctgcccccagagagcccctacctgtatggcctgcaccccaatgctgagatcggcttcctgacccagaccagcgagaagctgttcagaacagtgctggagctgcagccccgggacagccaggccagagatggagctggggccacccgggaggagaaggtgaaggccctgctggaggagatcctggagcgggtgacagatgagttcaacatccctgagctgatggccaaggtggaggagaggaccccctacatcgtggtggccttccaggagtgtggccgcatgaacatcctgacccgggagatccagaggagcctgcgggagctggagctgggcctgaagggggagctgaccatgaccagccacatggagaacctgcagaatgccctgtactttgacatggtgcctgagagctgggcccggcgggcctaccccagcacagctggcctggccgcctggttcccagacctgctgaaccgcatcaaggagctggaggcctggacaggagacttcaccatgcccagcacagtgtggctgaccggcttcttcaacccccagagcttcctgacagccatcatgcagagcacagccaggaagaatgagtggcccctggaccagatggccctgcagtgtgacatgaccaagaagaaccgggaggagttccgcagccccccccgggagggcgcctacatccacggcctcttcatggagggcgcctgctgggacacccaggccggcatcatcacagaggccaagctgaaggacctgaccccacccatgcctgtgatgttcatcaaggccatcccagctgacaagcaggactgccgctctgtgtacagctgccctgtgtacaagaccagccagaggggccccacctacgtgtggaccttcaacctgaagaccaaggagaaccccagcaagtgggtgctggccggcgtggccctgctgctgcagatctag
